United States Patent Application Publication US 2020/0377945 A1 - sequence listing, part 34

SEQ ID NO: 6299 - DNA, 8292 bp, Unknown
  gut microbiota DNA sequence
agtccgcgttcgtccgccttatccgcgtagtccgcgtacccattccctcgccgctaaattatcatttataggtttctggttgcaaagtaagggcatttcccctgtctccgcaatcctcatttattaggatttagatacggtctgcttcaacgtacccgtgcattacagcataaatcgtcagcccggccactgatttaatgcctagtttctccgtaatattctttcggtgggagatgacggtagtcaggctgatattcagtttatcggctatttctttattgataagtcctttggttatcagtaccaatacttctatttcgcggggagaaagatcatgttcgctgtcggcatgaggattaccgcacggatgtgctgttacaccgtggggatgtccgtgggggtggctatgaggatgtccgcctttgtgtccgaactgatgcagttgcaggatgtttctgatcagtgttttctcgtcctgataaatattcaaggtcggtattcctgccagttgaggctgattgtcaccgtttgccaatacaatggtcttgggcttgcgcggtaggaaaaaagcggtatgctcaaaatatatctgtgctgaaacgaaataatgcgcgtacatatcgggggtatcgtccatcagttcctcgaacgaactgaatacacggatgacggccatcgggataatttcttccagaaggctttgcaatcccatacatgataaggtgttggagtcagcaattgctatttcgggagctaccatagtatttcttaaatttctgcaaaagtacagataaattttaggatgtaggctattgtgattgaaaaacagtaactttccttaataggttgtcatagaactttgcgctcttctcttttgttgttaagtatataatttacttaatactactgatttatgaaatatgatatagctatcatcggtggtggccctgccggatatacggcagccgaaagagcggctgcaaacgggctgcaaactgttttgtttgaaaagaaagctattggcggtgtttgtctcaatgaggggtgtatccctaccaaaactctactctattccgccaagttgtgggacaatatgaaaggcgcgtccaagtatggcatctctgtgcccgatggttcgtcattcgatatgaaaaagattatcgaccgtaaagataagattgtgaaaaagctgaccggtggtgtgaagatgaccgtcaactcttacggtgctgttattgtgccgcaggaagccgttattgtgggtgaggcggacggacgtttccagctttcggctgccggcgaagcatatgaagtaacctatctgttggtatgtacaggttccgatacattgatccctcccattaaaggattatctgaaattgattattggacatcaaaggaagcattggagatcacaactttgccccgttcacttgtcattattggcggtggtgttatcggaatggaattcgcttcttttttcaatagcatgggtgtgcaggtgcatgttgttgaaatgatgcccgaagtattgggcgccatggataaggaaaccagtggcatgttacgttcggaatatcagaagcgtggggttaatttccatttgaatgccaaagtgatcgaagtcggcaaagagggtgtcactattgaaaaggaaggtaagactgcacgtatcgaagctgaaaaggtactcgtcagtgtgggtaggaaagctaatttatcccaagtcggtttggataaactgaacattgaactgctgcgcaacggtgtgaaggtggatgaacatatgcagacttcccatcctcgtgtttatgcctgtggtgatattaccggacactctatgctggcacatactgccattcgtgaaagtgaagttgctatcaatcatattctgggagtggaagaccgtatgaattacgattgtgtacccggtgtggtgtataccaatcccgaagtagcgggagtaggtaagactgaggaagaactgaaagcatccggtatcagttatcatgtacagaagctaccgatggcctattccggtcgttttgtagccgagaatgaattggtgaacgggctttgtaagttgatattggacgatgatgatcgggtgataggctgccatatgctgggaaaccctgtttccgaattgattgttcttgccggacttgccgtgcagcacggatatacggtggaagagtttcaaaagactgtttttccgcatccgacggtcggtgaaatcttccatgaaactttgtttgcgtaatgttctgtattgataatcgctgtacggatatttattttaatctggcagcagaagagtatttgttgaagcagaagcgaggtaacttctttatgctttggcagtcggaaccttccgtagtgatagggaaacatcagagtgtggcggcggaagcggacgagaggtttctggatgaaaagggaataaccctggcacgccgtttctccggtggaggtgctgtatatcatgaccggggaaacattaacctgagttttattgaaaccgtaaagcagccggactttgtatattacctgcaacaggtcgtcgatttcctcgaaaaggtaggcatctcagcttatgctgaccagcgtctgggcatttatgtggacgaacggaaaatatcaggtagtgcgcagtgcatacacaaagaccgtgtgatgtatcattgtactttgttgttttctactgatctgggtacgttgaatgcggcattgaatggcgatccggatatggaaagccgtttaccgggctctcgtactatgcgtgcagtaccttccgtacggagtgaagttgcgaatataaaagactttttgtctgagcctatggacatcaagcgtttcatgcatttgctctttcactcctttgtggatgatgacgataaccggatttaccgcttctctgccggagatatggaagccatcgaacggttgaaagcggaaaagtatgcctgcaaagagtggatatatcataaatccgcattaacttttacttaagttaaaaacttactactcagttgtttgttgtatatataataaaccgagaacctaaaacttaactatatgtcaagatttgaaataaagatgcccaaattgggtgaaagtataaccgaaggtaccatcatctcatggtcggtacaagtaggagacatcatcaaagaagatgatgtgttgtttgaagtaaataccgctaaggttagtgccgaaataccatctccggtagaaggtaaagtcgtggaaattttatttaaggaaggagataccgtagctgtgggtacggtggtggctattgtcgatatcggaggtgaaaactccgaggatgaggatagcgtagaggttctccaaagttccgccactgatgagagtgttgcggttatttctaaggctgtctctgaggaaactcctcaagtcaaggctgtaaaatcggaagaagaacgttggtattcgcctgtagttcttcagttggctcgtgaggccggcattcagcctaaagaactggatactattccgggtaccggatatcagggacgggtgagcaagaaggacatcaagagttacattgtccggaaacaaagtggtggtaccatcacggcacaacctgctgttaaatcaagtccgcaacctgttgcaagcgttgcaccgcaaccggtaactacagcacctgcccagtcgtctgctaaacctgctgcaactcctgaagtacaacgtactacaccagcttccggcacattctcagcagaaggtgttgaagtaaaagagatggatcgtgtacgcaaggtgatagccgaccacatggtaatgtctaaacatacttccccgcacgtaaccaatgttgtggaagtggatgtaacgaaacttgtaaagtggcgtgataagaataaagatgctttcttccgtcgtgagggagtgaaacttacgtatatgcctgccatcacagaagctgtggcgaaggcactggctgcttacccgcaagtgaatgtatcggtagagggatataatatcctgttcaagaaacatattaatgtcggtattgccgtttctctgaatgatggcaatctgattgttccggtggttcgtgatgccgatcgtctgaatctgaacggacttgccgtagccattgattcactggcactcaaggctcgtgataataaactgatgcccgatgatatttccggtggcacttttacgattacgaacttcggtacattcaagtctttgttcggtacacctatcattaatcaacctcaggtggctatcttgggagtaggatacattgagaagaagcctgccgtaatagagactccggaaggggatgtgattgccatccgtcataagatgtatctgtccctttcttatgaccatagagtcgtggatggttcattaggtggcaacttcctctattttattaaagattatctggaaaactggaaagaataacttaatacccttgataagtatgaaaaagtacaatataaaaaccacagatgtggtactgctgaagaaatggtattacctgatgacgctggggcgtgcgctcgatgaaaaggcgcccgcttacctgttgcagtcccttggctggtcctttcacgctccgtatgccggacatgacgggatacagttggccatcggacaggtatttaccaaaggagaagactttcttttcccttactaccgtgatatgctgactgccctttccgccggaatgacggcagaagaacttatactgaatggtatctccaaagctactgatccgggaagtggcggacgccatatgtccaatcactttgccaaacccgaatggcatatcgagaatatatcctcggctacaggtacgcatgatcttcatgcagccggtgtggcacgtgcaatggtatattatgaccataaaggagtcgttattacttcacacggcgaatctgcttcatccgagggctttgtctacgaagctgtcaatggtgccagccttgaacgcctgcccgttatttttgtatggcaggataatggatatggtatatctgttccgaagaaagaccagacggcagcccgtaaagtggcggataacttctctggattcaagaatctgaagattatccattgtaatggaaaagatgtgttcgactccatgaatgccatgactgaggctcgtgagtatgcattgttgaaccggaatccggtaatcgtacatgccaattgtgtccgtatcggttcccattccaactctgacaaagatactctgtacagggatgaaaatgaactggcttatgtgaaagaagctgatccgttgctgaagttccgccggatgctgttgcgttacaagcgtctcaccgaagaagagctgaaagaaatagaggagaaagcaaagaaagacctggctgctgccaatcgtaaggcgctgacagctcccgatcccgatcctaaaaccattttcaattatgtattgccggaaccttacgaaccggaaaaatataaagatggaacacatcgtgagacagaaggagagaagaaattctttgtaactgctatcaatgaaacgctgaaagcagagtttcgccataatcctaataccttcatctgggggcaggatgttgccaatcgggataaagggggcgtgttcaatgtaaccaaaggaatgcaacaggaattcggtgaagctcgtgtattcagtgcacctattgccgaagattatattgtcggcacagcaaatggtatgagccgttttgatcctaaaatccgggtagtgatagaaggtgcggagtttgccgactatttctggcctgccgtagaacaatatgtggaatgtactcatgaatattggcgtagcaacggacagttcgttcctaatgtaactttgcgtctggcttccggtggttatatcggtggtggactctatcactcgcaaaatctggagggcgctttggctactttgcccggagcgcggattgtttgtccatcctttgctgatgatgctgccggactgctccgtacaagtatacgttctcgtggttttacactgtttattgaaccgaaagcattatataattccgtagaagcagccaccattgtccctgatgattttgaagttccttttgggaaagcgcgcattcgtcgtgagggcagtgatctgagtattatcacctatggtaacacaacgcatttctgcttgaatgttgccgaacgtttggaaaaagaaggtagctggagtgtggaagtgattgatatccgttctttgataccgttggataaagaaaccatttatgagtctgtgaagaagaccagtaaagccctgattgttcatgaagataaagtctttggtggcttcggtggtgagatagcagccagtattggtacagacttgttccgttacctggatgcaccggtacagcgtgtaggctctacctttactcctgtaggttttaatccgatactggaacgtgccattctgccgggtgcagatagaatttatgaggcagccaagaagctgctggaatattaatttaataataagttattatgaaagagataggattattttatgcaatgaatgctgccaagacttctcatatcgcagagaagatacgcgagaagctcggacacaaagaagtagaaatgatcatgatagaaaaggcttggcagaatgatttccaggcttatgataatctgatagtaggtgcttccacctggttcgacggtgaattgcctacctattgggacgaaatgataccggagatagaaagcctcgatctgaaagacaagaaagttgctctcttcggacttggtgaccaaatcggttatcccgataattttgttgacggcctgggaatattggctgatgcctttgaaaaggcaggggctatccttgtcggatttacgtctgccgagggttattcatttaaccggtcaagagccttgagggatggtaaatggtgtggactggtgattgatatagagaaccagtcgaagctgacggataaacgtatagcggactggtgtgaacagttgaagaaggaattctgataaaaaatgagaactgattgaaagttctttaatagtatttttaaaagttctctcatatcaatagatagagagaactttttttatacgctttcctatttcgtgttatggtgattgaaaaaaataatgtttttgatatttaaatatagaaactattttaaataatcgactgtgttagatatttctttgcttggaaatgcttctattaaatgaagaagttctttcttcgtaatacctataacagtgccatgacggggagtaaaagagccgcttgttttagtctgtgctataagttcgaaatgttctaaatcggaagaacgacagaattgataataaccatccatgtaacagtcatacattaagatccagtctgttgagttattcatttgaaatacaccgggtccttcagctttcttgtctgtctgttgatatttcttgtgcttttcaagtggtgaccatggcccttttatatctggcgcagtcattttccatatacctgcaaggaacatgtggtaaagattatcatgttttactatatctgcgtcaataatagatgaaccacaatctatcaatttcttgggttctgaaagactagtaaaatctttattggcataagaataataaattgtaagataatcatctttattctgtaacgaataatataccatgtatttcccttctttctcgtcataaattgtttgaggtgcccacacacgtttcaaatcttcgcgtgtatagagatgaggaaatactgtaggaaaatctattgctgtagtttcccagtttatcagatctgtagatttaaacaatactataccatcattagaagaccaacctgcagaagatttcatatctgtagccaccatataaaaagtttttctatcataaccgcgaagtatgtgtggatctcgaatacatttccaacgtgctacgctatctatattgattatacgttttccattatttaatggtatgtaattatatccatccttacttacggcaaagtataattgttccccttttggagaattattcataaaataaacaaaaagataggcaaacttaggctcttcttttgctatagctttacagctaaagcatatacaacaacaaatggtaataagtagcgagagtattcggactttactatatactactttcttattggtcaatgatatttgttttcttattatcataattttatcattttaaatatcttgtagaaagaatactatccaaagcttactatgtatttcgtagatcatt

SEQ ID NO: 6300 - DNA, 24644 bp, Unknown
  gut microbiota DNA sequence
tgcaatggtagccgtggtgatataaaagaattgattattgaagaatttatcaagtttgatagtgagataacattgcttacggtgacgcaaaagaatgggcctaccttgttttgtccgcccatcggacatgtgcagaaagggggagattatcgtgaaagttttcagccggcgcacattgatccggctcatttgaaggaagcgcaggaaatggctgagaaagtgacacgggctctgaccggtgccggcctgtggggagttgaatttttcttgagtcatgaaaatggagtttatttctcggaactttctccgcgtccgcatgatacgggtatggtgacattggcaggaacacaaaatttgaatgaatttgaacttcatttacgtgctgtactaggcttgcctattccaaacatcaagcaagagcgtattggtgccagtgctgtgattctttcaactattgccagccaggaacgtcctgattatcgcggtattgaagaggtgacgaaagaagaagacacttatctccgcattttcggtaagccgacgacgcgtgtcaatcggcgtatgggcgtggtgttatgctatgcaccattaaagtcagatctggatgcattgagagataaggctaagcgaattgcagaaaaggttgaagtgcattaaggcttacttattagataaaagaaaagcagttgtcacagattgagtggcagctgcttttttatttcgcaactactatttcaacatcatatccgataaaaagcccgctttcaattaccccggtaattgctttcaggttttgttccaaagaagggtcaacataactgaagcgggtatcaaaaataaagttgccgttttcggtgagaacaggtccgtcttttccaccggcaagacgcaatttcacgtcagaagctcctaaccgttgcatttcgctttctacaaaagttaatgcacctggaaacacttctacaggtattggaaaatgacttcccaaatgatctaccagttttgtatcatcaatgataatgaagctcttactactgctttttatcagaagtttttctttgaacatggctccaccacgtcccttaatcagacttttctccggatctacttcatcagcaccatcaaaaacccagtctggacgcttattccaaagggtcgtttgtggtatacccaattgtatgcaggtcatagaaatttctgcagaggcagggatgatttctatgtgtagagattctttgcgaatacgttccgctaatgcgaatagcgtcaggtaaacggtagaaccggagccggctccgatcacatcaccatccttcgccattgcagcaatttcctgtgctacgatttctttgccctcacgattaatgatcgcattcgaccattgcaaatgatttatcagttgattatcccatttcattgtcagaggttgctaatcgttattatcttcttcgtcgtcagtcaggttgttcagttctacttcaagttcaaccaactcttgttcccaaatttctctgatgtttgccggcgtattttggggagcttccttaatacgtttttgagctaatgatacttcatgctccagctgtgaacgtctactcataagtcttgctatttatagttgtttttatagataacattctgttttgctcaattgttcttatatttggtaagaattttgtattacccgaataactcgggatagatttctccatcaccaccggatacatcgaggctctgtagtagtttaccgtcaggagcatagaaaagctgaatttctctgtcagagttatactcttctatatcgatgattactacagcaggcattttggggaaggtaattatctttatatatctgatttgtataggaggggtctctgtctgcataaatgctttagctacgggagcagggacatcttccagactttcgacgtttgtctccgtcattatccattgggcattgtttccgaaccaggcgttcatttcgtggctatctgaaacgaatccggcaatgtggtaatcacttttatgcatccattccacggtcgtcactttaggatacatctttttgaaagtttcctgtactttttccggagtattttctgcgcatacggaagcagatatcagcaacaacaagcctgccaataaactgaaattaaactttttcataatcaaggtctgtttttagttgctattagaaacaaccctgagagacttttgtttattgcatttttgagcaaaaacagagttgttttcatctcttgaaaataattattgagtctgcgatattttgtattatttaattcactactttcaggcacttttttaaaaagacgaaatgaacaatgtattgatccttgtagacagcttggatgattggaaaccatattccaaaacaaacagcattttaacagtatctgactacctgaagtataaatcaccgggaaaggatcgtaaattagtaatcaacctgagtaatgattatagctataactccgaaggctattattgctcgttattagcccagacgagggggcataaagttattcccggagtagatataattaataaggtggaagctggtgcaggtatccgtatggatagcagtcttcaaaagctttgttatcaatggattcagaaaaatgaaataaccgatgatttttggtctctgaatgtatactttggcacttgcaaagagaaaggattggagcgtatagcccgttttatttttgagaattatccggctcctttattgcgggttacattaaatacgcggcataagaatcagatagaaaatattcagtttttacctttgagctcattgaataatgaggaagaggattatttcgctaatgctctggatttgtttaacagaaaagtgtggcgcaatcctcaggcttcgaaatcggcaagatacaacctggctatactgtatgatccggatgagaaatttccgccaagcgataaaaaggcacttcacaagctacttgaactggctaagaagatggatattcatgccgaattgctaactgaagaagatgccacacgactgatggagtttgatgccttatttattcgtaccactacttcgttaaaccattacacgttccggctttcacaattggccacacaaaatgggttggctgttatagatgatcctcaatctattatccgctgtaccaataaggtttatctgaaagaattgtttgagaaggaaaagattccggcaccgctttccatgttactattcaaatcgaatgtcaactcttatgaggaaattacggaacaacttggtagtccttttatcctgaaaatcccagatggttctttctctatcggtatgaagaaagtcaataatgagatcgagttggatgaagcgttgaaagtattgtttgataagtcgtctatactgctggctcaggaattcactccaacagattttgactggcgtatcggcattctgaatggagagcctctctatgcgtgtaagtattatatggctaaaggacattggcaaatctattgccattatgcttccggacggagccgctgcgggctggtggagactattcctatttatcaagtgccacgtaaggtattggatacagcgctgcgtgcggcttcttttattgggaaaggcctgtatggagtagatttgaaaatggtaaatgaccgtgctattgttattgagataaatgataatcccagcattgaccatgggttagaagatgccattctgggagacgaactctactatcggttgctgaataacttttggcgtatgttggatgtaaaacgtttctaattcgtatggaacagcgatttatacttcgtttggctgaaattgatgatattccgtcaattatggagatagaacaaatttgttttgataaagatagtttttcaaaacgtcagtttgtttatcttatttctcaagcaaaaggatacttttgtgtagcagaatatcagcaaagggtggggggctattttagtgtgttgataaatcaacgtgcttgtagtctacgtatctattcgatagctgttcatcctgattttcgtggcaaaaaagtggggcaattactaatagatcagatagctgctattgcccaaaaacaaggcttaaagagaattactttggaggtgaatgtttctaattccccggctattcatttatatgaaaaaaatggttttaaatgtacttccataaaagagaactattatcataacgggacttctgcatattatatgcagaggcccactatagttgaatagatattcttctctggaaatccggcatcttcttaattcctgtttaaaaatatagtgtaatactctcttttctttgtcaaattgttaacaaggtcgatagaattattaaaccttgttgtaaaatgccctgtaaaggctctgaaatttggagaaatcaagaaaagccgtacctttgcaatgtgtttttcatagtattagatttaaggttaacaaaagattggctgtctgggatagatagcctttttttatgtttgccccgcatggggcgaactgctaatcttctccaagtagatcgtaagacggtgcaaagaacagggtcccggtaaccgcagtactaaaatcaagcaagcggtcggtgttgcctacaggattcccgataaacatactttccaacatctggcgcgtagtactgaatgtacttgcatatccaatgaaataagtaccgtattctccttttgaagtattggcaaatggcatattggcacgtactatttttaaatcatctccaatatttgttacagcattatgtgcatttgcaggcttttcttcatccgacaattccacatcattgaactttcttcgtcctatcaccttttcctgctcttctaccggaagcgcattccaagcattcatatcgtgaatatacttctgtacaaatacataacttccacctgcaaaatccggatcttcttcaccaactacggcaaagtgataaggattctcgtccacggctggagattctgttccatctacgaagccaatgattgctttaccatccatatacctgaaaccgtgagtttcatcaatagcttcgacaactccctttagtttttcatcgatgatagaagcaaattcgtaacatagccccatttgccgtgcccggatatgaaacagtatatcaccgggagtggatacagctgtatatttacttccccttatttctttgaaagtttccaattctttgggtttccccttgccagggaaaatacgatcccatacattagcactgaaacttatcgtgctactgaactgtgcatcgggaaagcgattacgcatactacgtatcaacgctgagaaattggcacatacatcttttactttgtcgacagcatcaggagattgatttaatccgtaaacgatgaaaatggcattttcaccttgtctttcggtaacatcctgtggggtgtttcctgcgaatggattttgatgtggattcatacttttttcctttcattaaatttatacttcaaaatataacttaccaaatgacgttttgttcacacaaaaatagtggaattccttcttagtatctgttgatgaatgtttaagcaacgttaaatggatgtcgcttttttgttcttattgtagtaataatagttcaaaagggtataatttatagaaaaaacgttttcatagagtacaacttgaaagtttttgtgtttacatttgcaaggttgcttatgtaactattccgtaaaaattaagatttgaagctttgaacaaaaactattcaataggtgttaagctcatagcagcggaatgacaagaacgcgacttgtagagtttagaaaaagagaaattatataaaaagattgcttatgtcacaaattatcggacatatctctcaggtcatcggaccggtagtagacgtctattttgaaggtacggatgccgaactgatgcttccaagtatccacgacgcactggagataaaaagatcaaacggaaaaacattaatcgtagaagtgcagcaacacattggtgaaaatacagtgagaactgtagcaatggatagtacggacggtttacaaagaggtatgaaagtgtatcccacaggtggtcctattaccatgccggtgggcgaccagattaaaggtcggttgatgaatgtagtgggtgattccattgatggtatgaaagagttagaccgtgtcggtgcttatcccatccaccgtgatcctcctaagtttgaagatttgactaccgtacaagaggtgctctatacaggtatcaaggttatcgacttgctggaaccttacagtaagggtggtaagatcggcttgttcggtggtgctggtgtaggtaaaacagtgcttatccaggaactcattaataacattgctaagaaacaacatggtttttctgtgtttgcaggagtaggagagcgtacccgtgaaggtaacgacttgctgcgtgaaatgattgaatccggtgttatccgttatggtgaagagttcaagaaaagtatggaagaaggaaactgggatttatctaaggtagattacagtgaagtggaaaaatcacaggtatccttgatattcggccagatgaacgaacctcccggtgcgcgtcaatcagtagcattgtccgggctgacggtagcagaatctttccgtgaccaaggtgctgaaactggtggttcacgtgatatcctgttctttatcgataatattttccgtttcacacaagcaggttccgaagtatccgctttgttgggacgtatgccttcggctgtaggttaccaaccgacgctggctactgaaatgggtgctatgcaggaacgtattacttctacccgaaatggatctatcacctctgtacaggctgtatatgtgcctgccgatgacttgactgacccggcacctgctactacatttacacacctggatgccacgacggtattgagtcgtaaaattactgagttaggtatttatcctgccgttgatccgctggaatctacttcacgtatcctcgacccgcatgttgtgggagaagagcattatgaagtggcgcaacgggtgaaacaaattctgcaacgtaacaaggaattacaggatattatttctatccttggtatggaagaactttcggatgccgaccgtacattggtgaatcgtgcacgtcgcgtgcaacgtttcttatctcagccttttgccgttgccgaacaatttacaggtgtaccgggaacgatggtgcccatagaagacactatcaaaggctttaagatgattctggatggtgaggtggactatctacccgaacctgctttcttgaatgtcggtacgattgaagaagcgatagagaaaggtaagaaattgctggatcaggtaaataattaaaaaataaaagaaggaaagaggctatgaagaagttgtatttgaacatagtgtctcctgaaaaggaaatttataatggagaagtggaaagtgtaacgctacctggcacaataggaacgtttaccatccttccgcaacatgcacccattgtgtcttcgcttcgtgaaggtaaggtgatgtatgtaccgacagaaggagaagaacagactcttgacatagagggtggtttcattgagttaagtggtggagtggtttctgcctgcgtagactgacaatagtcttttcatccttaattcttttattcttaattttgaataatactatgagtatcagcttgacaaagcgcaattttttataccagatcaccctgttgacattaatagcaggatgggtaggcgcagggattttacattatttattgcctggacattattttggaggatatcctttcattccggtatatttcttcttgttcgggctttttgaaatatctatgtttgatgcttgccgtaagcatgccccgcaaaagatgttgctgctttacatggcgatgaaggtgatgaagatgttgctctctgtgatactcttggtggtgtactgctttgcagtgcgggaagaagctaagttattcctgctgacattcatcctttactatatagtctatctgatatatgagacttggttcttttttacttatgaagtaggaaagaaacagaaaaaagaaaagaaaaatgaaacaaatgcgtaatctattgaccggaatattcctgatgctgggaatgctgcttactaccttgcctgttgtggcacaggggattgaagcggaacttgacagcgtagccaaacgggatgatgtcacctctaccgaacagaaagaaaacacggtggatgtgaaagagatcgtcttcgggcacattggcgatgcttacgagtggcatattaccacatggggaaaaacgcacgtcactatcccattacctattattgtatatagttcgcagactggttggcacgctttcctctcttcacggttggaagaaaatggaggatcttatgaaggattcttcatagctccggcaggtagcaggtacgaaggtaagttggttgagcatgatgcaaccggaaacgaaatacgtccctgggatatttctatcacaaaagtgacactgtcactgttgattaacagtgtattgctacttgtcattattctggccgttgcccagtggtatcgtaaacatccgcaaggtagtgcggctccgggcggcttcatcggatttatggagatgtttatcatgatggtgaacgacgatatcattaagagttgtgtagggccgaagtatcggaagtttgctccttacctgctgacagcgttcttcttcatctttataaataatatcatggggttgattcccattttcccgggtggagctaatgtgacgggtaatattgctattacgatggttctggcactttttacatttgttgccgtcaacctgttcggaacgaaaacctattggaaagatattttttggccggatgtgccttggtggttgaaggttcctgtaccgatgatgccttttattgaattcttcggtatcttcaccaaaccatttgccttaatgattcgtctttttgccaatatgctggccggacacatggcaatgttggtgttaacatgtctgatctttatttctgccagtatgggacctgcgcttaacggtacgcttaccgtggcatctgtgctgttcaatatctttatgaatgcattggaactattggtggcatttatccaggcgtacgtattcactatgttgtctgccgtatttatcggactggctcaggaggagcataaagaagtaaaagtgaaagaaaacaacaattaataataaaccatttaaaaacaaaagattatgttactatctgtattattgcaagctactgcggctgcagccggaattagtaaattaggtgcagcaatcggcgccggacttgccgttattggcgcaggtttgggtattggtaaaattggtggttcagctatggaggctattgcccgtcagccggaagcatcgggagacattcgtatgaacatgattatcgctgctgcattgattgaaggtgttgctctgttggcagtagttgtgtgtctgttagtgttcttcttataataggcctatacttgcttttaatttataattattaatttataattaagattatgtcattgttattacccgatagtggtctgctgttctggatgcttttgtcgttcggtgtggtgtttgtggtgttggcgaagtatggttttcctgtcattactaagatggtagaaggccgtagaacctacatagaccaatcgctggaagtggcaaaagaagctaatgcgcaacttcaaagactaaaagctgagagcgaagcattggttgctgctgccaacaaggagcaaggacgcatcctgcgggaggcgatgcacgagcgtgacaagattatcgtcgaagcacgcaagcaggcggaagttgccgcgcagaaagagctggacgatgtgaagaagcagatacagcaagaaaaggaagaggcgatacgcgatatccgtcgccaggttgccgtgctttctgtggatattgcggagaaagtaatccgtaagaatctggatgaagagcacgaacaaatggagatgatagaccggatgctggacgaagtgctggcagcctcaagaagcaattaagtagcgataagcgattagtgatgaatgattagcgaaatgttggtcatgagtcgctaatcactaataattaaaggaaatggatataggaattgtttcgatgcgatatgccaaagcgttgatagaatacgcaaaaggtacgggggctgaagactgcgtataccatgaattgcgtatgctggaacgaagcttccgtaagcatcctgatttacgggaggcgttggataaccctattttgaagatcaaggagaaatttgctctgatttgtactgctgccgcaggcaatggagaggtgagccgggaattttcccgtttcataacacttgtgttgagaaaccgccgggagtattatttgcagtacatctgcctgacttatcttgatctatacaggaaattgaagcatatcggcgtaggaaagctgattacgtctgtacctgtgagccgggaagtttgggagcgcattcgaaatagtgcttctactttgctacatgcacagatggagttacaaactgaagttgatccttcgattgaagggggctttatatttgatatcaacgatttccggctggatgccagcatcgccacgcaactaaagagagtgaaacaacagttcattgataagaacagaagaatagtgtgatttacgattggacgatttacgatttacgattagagttactctacattgtaagtagtgaatcggacttaatgatggtaatctcaatcgtaaattgtaaataactaaatcgtaaatagaaacatgtctgaaaatataaaagtaagcgaagtctccgatattctccgtcaccagttagagggaattgatacccgcgtgcagttggatgagatcggtacggtgctgcaagtcagtgacggtgtggcacgtatctacggactgcgtaatgctgaagcaaacgaactgttggagtttgacaacggtatcaaggcgattgtgatgaatctggaagaggacaacgtaggagctgttttgctgggtcctacagataaaatcaaagaaggctacgtcgtaaagcgtaccaagcgaattgcttccattatggtgggagagggtatgctgggacgtgttatcgatcccttgggatcaccactggatggtaagggactcattggtggagagctgtgcgaaatgcctttggaacgtaaagcgccgggcgttatctttcgtcagcctgtgaaccagccgttacagactggactaaaagctgtggatgccatgatacctatcggtcgtggacagcgtgagttaattatcggtgaccgtcagacgggaaagacagctattgccgtcgatacgatcatcaaccagcgtgccaattatgaggcaggtgatcctgtatattgtatttatgtggccattgggcagaaaggttctactgtagctactattgtgaatactttgcgtgagaatggtgcgatggattatacaattgtggttgccgctacggcaggtgatcctgcggcattgcagtattatgctccgtttgcaggtgctgccattggtgaatatttccgtgataccggtcgtcatgcgctggtggtttatgatgacctttccaagcaggcggtagcttatcgtgaggtatcactgattttgcgtcgtccttcagggcgtgaagcctatccgggtgatatcttctatctgcattcacgtttgctggaacgtgcagcacgtattatcaatcaggaagaagtagcacgtgaaatgaatgatttgccggaaagtctgaaaggcagagtaaaaggtggcggttcgctgactgcactgcctattattgagacacaggcaggagacgtatctgcatacatcccaacgaatgtgatttctattactgacggacagatattccttgatacggacttgtttaaccaaggtaaccgtccggccatcaatgtaggtatctctgtgagtcgtgtgggtggtaatgctcagattaaggcgatgaagaaagtggccggtacattgaagatagaccaggcacagtatcgtgagctggaagcatttacgaagttcagcggtgatatggaccccgttactgcactgaccattgataagggacaaaagaatacccgtttattggttcagccgcaatacagtccgatgccggtagaaaagcagattgccattctgtattgtggtacacatggcttactgcgtaatgttccgttggataaagtaacagatttcgaaaggagtttccttgaagcgcttgaaatgaatcaccgcactgatgtgctcgatgtactgaagagtggcgtcattgacgatgatgtctgcaagaagatagaggaaacggcagatctgatgtcgaaacaatatttggagtagtgattaacgttgagtgacaagtgattagtggcatgtgttcatttgccgcttatcactaatcattaatcacttaccactaaaaaaaatgctatgggttctttaaaagaagtaaaaaacagaataaactccgtcaagagtacgcgtcagataacatcggcgatgaagatggtggcatccgctaaattgcacaaggcacagacacggattgagaatatgctgccttatcaacagaagctgaatgaaattctgactaacttcttgtctacagatgctacatttgagtcgccttataccgaagtgcgtcccgtaacgcgggtagcggtcgtagttttctcatccaatagttcactgtgcggagctttcaatgcgaatgtggtaaaaaagctcggagaaacgctggaagaatataaatcacttggtaaagagaacgtcctgatataccctgtaggaaagaaagtggagcaggctgtgaaaaagctgggctatacgtcgcagggaagctatcaagagatggcggataaaccctcatacgtacaagcgtatgagcttgctgcattgttgatgcaagagtttatggaaaaacaaatcgaccgggtggagctgatttatcatcatttcaaatcaatgggttcgcagatattgatgcgtgaagaatatcttcctattgatttgagtaaggtggcggcaacagctgcaacagaaggatcgggaaaacgtggtttccagaatgattatattgtagaaccatctgtcggacagctgattgctgatttattgccgaaggtgttgagtcagaaattatttactgtacttcaggattctaatgcttctgaacatgctgcgcgtacacttgccatgcagactgcaacagataatgcgaatgaactgatacaggatttgacgaagcaatataacaagagcagacaacaggcaattacaaatgaattgctggatattatagcaggaagtctgaagtgataaagctaaaagctacgagctacaagttacgagcggctttcggaacatagcgcagccactcgtcacttgtagctcgtagcttgtcactcttatagcttttccttttttttgcaaaaagatgtgccaatggaggctttagctcttttatttgtgctacctttacacctccaaccaacattgatgaaataatggaacagaatcctgaattggcattagcgtggcaatttatagaaaatacaggcacacatctctttctgaccggtaaggcagggaccggaaaaactacattcctgcggcggctgaagtccgaaagtccaaagcgtatggttgttcttgccccaacaggtattgcagctatcaatgcaggcggcgtaaccattcactctttctttcagttaccttttgccccttacgtacctgatacctcattcagtgcggatggcaaagcacaatatcgtttccgtttcggaaaagataaactcaacattatgcgtagtatagacctgctggtgattgatgaaatcagtatggtgcgtgctgatcttctggatgcgatagacgatgtgctgagacgttttcgtgatcgcagtaaacccttcggtggtgtgcaattgctgatgattggcgatttgcagcagcttgccccagtgataaaagatgaagagtggcagatgctgaacagctactatgatactccttatttcttttccagtcgtgcactgagacagtctgaatattgtacgcttgaattgaaaacagtgtatcgtcagagtgatactcactttctggatatgctgaaccgtattcgggagaaccgttgtgataaaactttgctggatgaattgaaccgtaggtacattccgaatttcaacccttcgaaagaggaaggatatatccagttgactacccataactatcaggcgcaacgcatcaatgaacatgaactggcacaattacccggtcgttccttcacctttcgtgcccagatagatggaaagtttcctgaatattcttatcccacagatgaagtgcttgaactgaaacgtggtgcccaagtcatgtttgtgaagaatgattcatccggtgagcaccgttattataatggtatgatcggtgaagtggtcaatgtctcagctttgggtatagaagtacgcagtaaaggaagtgaggatgcttttatgctgcaagaggaagaatggacgaatgcaaaatacgtgttggatgaagagactaaggaaatcaccgaagatatagaaggagtcttcaaacaattccctctgaagctggcatgggctattactatccataaaagtcagggactgacatttgaacgtgcaataattgatgccagtgcttcttttgcacacggacagacttatgtggcattaagtcgttgtaaaacattggaagggttggtattgagcgctccactgtcggcaagagcggtcatcagtgacagtgctgtagatacttttacggaagatgcgcgtagaaacgaacctgatgaaacgcgttataggagattgcaacaagcatactttctggaattgctatcgggattgtttgatttcttaccgttagagttggcattgaagcgttttgtgagattggtggatgaacacttgtataagctctaccccaaactattgactgaatataaatcagaaacggaacgttttcatgagaaggtaacgaaagttgcccagaagttcagccttcaatacacacgcctggttgatggtgccgaagattatgcaacggataaaagcttgcaggaacgtattcatttgggggcggaatattttaaagaacagttagaacctttggatgctatcaggagtagtaccattgtggaaacagataataaagaactaaagaaacagttgaagactgccagtgaggaattggatgatctacttctgttaaaagttgacttgttggaatttgttatcagtaacggctttcatgtaggagaatatctgaaacaaaaggcggtactttccattgacgatacggcatcgactaaaggcaaaggggaaaagcgttccggtaattctaccgaaagaagaaaacggaaaggcggaaccgaagaaagtggaaatacccctgcacggaaaaaaacggcagcagtggaagttccttcggatattctgcatcccgaattatacaggcgtctggtagcatggcgtaatgcggaagcgtctcaattaggattaccggtatataccgtaatccaacagaaagctattttaggtatcaccaatttattaccggaagataaatccgctcttctccgaatcccttattttggtaaaaaaggagtggaaaagtatggggatgagttgttggagatggtgcgggtgtataagaaggagagtgggattgcagaaacgttgtttagtgattagtggcactcaccactaatcacttatttaaagattgaacattagttttattccttcttccagagtatgtggttggtatcccagttctctgcgtgctttttcaatgcttaatccgctgaaacggggacggggagttgtttctcccatttgcttggtagtgactggcagaattaatgaataatccagattcaaagtatctgctacgcgataagcaatatcggctatagtcagacattccgagccacagatgtgataaatgccattattgggatgatttatcagtttctctattccttgagaaacatcgcctacataggttggcgtgcgccactggtcggaaaccacccgtatttcttcattatttcttaaacgattggctaccaattgcagaatattcccgtgttgccccggcaaggcggcaccatagaccactaccacacgtgcgatggcataattgctacagagttcagctacccgtttttcacctttcagtttggttgccccataatagttgacggggtcaggagtatcttcttctgtataaagctgccctgtatctccattaaatacaaagtcagtagatagatgtataaagcgtgcagcggatgcttcgcatcggaatgccaattgtcccacagcattaacattgatactgtctgcctcctcacggtgtgcttcgcaataatcaggaacggataatgcggacgtgttgatcactatattcgggcgtacttcccggaacaatgcgctttgttcccccatctggcagatgtctgcactgatgaaacgataattcccggaatcgggagcaatgtcgtcatgcagagaacaacctgttactatgtactcgtcattgcgtgacaaatcattcaagatccggcgtcctgtgaagccattggcacctattaccaatacttttttcttcatattcatattatttcagtatataatcccttgactgtagtcttttttagtaaggtccattccttccttgttgtacttcgattctaattccgaatgatccgtttgccgacttcagttcgaaagcgcctttgaagttattccgttcccacggcagggcagaaggattagggactttccgtccgtccttgtcatactctccataagtattgatgcgcattccattcttcaaccggaaacttcccatttgcaggttttggggagatgatccgaaacctgtcagtccgaaagggttcatactgtatatggtggagctacctaaactgaataagtgtgagtagccttgtgagtaggtcacattcgggtccaagcgaaacagaaaactataatctttgctggcatcgggaatgtctaaagtcattttgggcatttggggagctgccattttcatcaggttcatatccaaaaggaatccatcaaaattctttgttgccggcatattcatactgcgaacactgtcagcgggtacttcattctgggcatttaccctgaaagaaagaagacagaaaagtatgattagtcctatatatttcatcacttaatggtctttatttaatggcgaatataagaaataagtatgaattatggaaatatatagcatttattaaaataaaacttgtatattatatgctgatatttgagtattgttgttatctttggagcgtaaataattgaattggttttataagcaatctatttgttcctctctaaccggtaaatgaacgggctgtatctcgtgtggaaatgcagcccgttttctatttcttttttctattgagatgaatcaccggagcaagtatcggtactgtttcccacttcattttcgaagcattgtacgctcgttccacgcctccctgtatttccagataatcattgattttcacttccatgactacaccgtagtggctttgtggatacatcggattcatatatccgttcagagagttttgtttgccaaagcctgaatattgcccgaaaaagcggatacgaaggaaattgttgatgcgataggcagcagaagcatccaagccaatgtcgaattgagaaccatgcatgcgcgaagggatggtgtacttggcggtatacatgccccctgtcaattcccagcgttcattaggacgatatataaaatcggcacctgactggataattgttcccatagtagggtaggtattgtaggtgctgaatgtgctcaatatactattgggggaaagctgaaaagcaccgtaatgctcgtaatccatcacgaaaggatcgtaactgctgatcatctttcccattctgatatccatccacggaaagttgggataataagtcggaagagtgatgtgtaagtccgtactatccgtgctgagagaagtctttaccgacatatcccgattaggagcagcagttgttccgggtggaggtgacaacggctcttttcccatttccgtgggaaaacgattcaataatgtgctgtcctttgtttgctcgttttgtgcagcaacgcgaaaggaaacagtgagaaggaacagaatgatgaatagttttttcataagtcgttatgtgttaacggaagtttcagttgatgataagtttgtatccgatacctcggacattgacaatgcggatacgttcgtccttggaaagtttatgtcgtaatttagtgatgaacacgtgcaggctgcgcgaattgaagaagctgtcgtctccccaaagatcgagcaggatattctgggtattcactacctgattacggttttcgcacaggcgtttcagaatttcggcctcgcggtgggagagttcctgctctattccggtatgggacaatatctgtgtgacagagttgaaatggtaatcgcctatctcgaaacaggtctcttccttcttcggttcctctctgaatgtaaatgctttgcccaccagcgctttaatgcgtacaataagttcctgcatgccgaaaggctttttcagatagtcgttggccccgagttcaaagccttctaccacatcattgatggaagaacgagcagtgagaaaaagtaccggagttcgtttgtcggtttgacggatgtggcgtaccatttcaaaaccatccatacgaggcatcataacatcggctaccagtacatcagggcgtaagtcgaagaacatacgcaggccttcctcgccatcggcagcagtatggatgatgaaactctggccttccagcgtatctttgataatcatggcgagggtttgttcatcctcaaccagcagtaccttgattttgtccatatcttgattcattttcataataagcaatgttattcagattcttattgtaaaagtacttccttttcccgcttcacttcgtacggttaccatgccaccgtgtttttctaccattgtctttacatagaaaagccccagtccgtagcctttggtattgtggatatttcctgtcggaacccggtagaatttatcgaaaatgtgaggctgtttatccgtagggataccaataccgtggtctgtaactgagatttccacttgttccgtttcctttttccggcaacagatcattatgtcggctttatccggagagtatttgatggcattatctatcaggttactcagaatgttactgaagtgtgtacggtcggcaatgattgtcaggtcttccggtgcaatgtcgagattgatttctacaggcttgcccgctttcagtttatgctgttcgatgagtgtcgggaacaaatcgtgcaagctaagggtctccggatgcagacggaaggttttacggcgttccatactcatagagagaatttgttccaccagtccgcttaatcgctgtaactgttcctggcagatacccagatacttatcccgttgttgcttgtcttctgccagattaaaattaagcaaagcatcgttggcggcatacgccacggcaataggtgttttcagctcgtgggtgatattgttggtaaagtcgctcttcatctcttccagtgttttctgccgcaaaatggtgcggataagaaaccagaaggagaaacctaatataataagaataacgaatgatgtggtaaggataccgctcatctgtcgcaatacaatcttataaataggttctattgtgaggcggtaactttgattggagtgaatgtcgaaagcataattatattgttttgctttttcactggggatgtatccgggagtcccgacaatggcgagcgtatcagtgtaaaccagcgttgagtccggatcggcaccggaatgaagacgctccaatcggtagggaagtttaagcccccgttcttgcagataggcattcagcagactgtcataaacggctatgtcaggttctataaaaatatccagtcccgagtgcattccacgctggatgaaagtggcaagttccaccatactgctttggtcacgcagcatcatgtctattccaccttcggctcttaaagaagcctgaggttcatcctcattaatcactgtatcttccaggacctcttttactgaatctctttctgcccagactgaaatgtttgtgccttcctgtccccgtgtgaaaaggatatctcttgtcgagtcattcgggtaactcactgagacgctgtcatacttcatagggataccttcttttaaaagtgaaagacttccggcactatctgtttggttaacagttgtactgctgcggacaaatgattttccggaatcggaattgtaccctgctgaaacctctacggaaccgtgggctttattttctttttgcattgcctttacacgaagcatcatctcattataatcgctcatgcgcatggcttctacgatgctttgttccagctcgtgtttcatcgttttgtatagtcccgtgatccagtatgcctggtaaataaagatacccagcagagagattatgactaatatggcaataggtttgaatggcagtttcatgtagctcttgtatttatatggacaaagataggaaagataaccggtacatgtatggacggtaagactaaataacactaaatggtggaattaacggtctttcgtacagatacttataaacattgaaaaaacggtaggtaacgagttagtaacaagctttttcattaataaatttatgcctgtgataatcgttgttattctcgttaatttgcttattattaagccattatcttttgggattctccattttacttcatttctttcattttattttagatttttatcggtttgacttaaccgattgaagaataaacttttagcgaattatttgagaaatagaggtaacgatttagcaactgtgcgaatttcagcgttttgcgttgctatgctgtcaaataactctcttatgtgcaaagatacgaattttctcaaaaatagaaaatgtgtatgaatgttttccttgtttatatagtctctaatttataatgttagtatttacaactgattattaatcaataatttacgagcagtaaatcagaaatatggtcgtaatctttaatcgtgtattctaaagggagaagatttaacacttttattgattattaacattgatattgacgtttctctcttttttctatgcaatttgcttccggtattccatttcaattttgactcactttctaagcgactgcaaaagtattattttttatttgattttgtttgatattccttgtctttgagtccactataagagataattgtctgacgctatcatatcttatcagaaattttatcggaatactgttgcgtacatatcttcctacaaaagattttaaaacagtaaacatcaaatcttcctgcgactatataccacctctattatgccgttgtatttcttggtacgaatcatttccaagtcaattttcttatcggtagcaccaaacagccttgtgccgttaccgagaagaaccggtataatcgccagatgataaatgtctatttgattgtttgcgatgagttgttgcgccacttctgcacctccgcaaatccacacatctttacccgattcctgtttcaactcctctaccagttggcatacatccatattcctgaaacggatattttctgtgccctcttcttcactgtgatgagtcaatacataggtcatcgcttccccgtagggccattggtcgggagaaagttcggtcacaatttggtcgtaggttctctttcccataatgaccgtgtccacaccactgaagaatggagtaaaggtgtcttccatctccacgtttttatcttgtccgcttatccattcaacggaaccttcgctgtcagcgatatagccatccagactgacggcaatataaaggattacttttctcataggtgtattattgtaaaagaggcagcaccatttcaaacggtttatttattgtagggatattcttgcttttgcttgctttaccctttggctttaagcaattcttcaatccgacctttcataaacccggtaagcgcgagcgtttcattttccattgtttcccattcgtcagacaggtttcctaaataggcttcctttgccgttttcaacagggaagaaaaggtttccggcaattggggaatcacccactccgcagcaacatctttcgttgtcacgtcttcggtttctaatgtaaaccacatgcgggatagcgtcaatagcacatttctttcatctcccttaacattggaaatcaaaccgagtagagaaaattgaatagccttttgtatttcgcggaacggaatcgggagaataagttgtttgcaatctgcgcccttcagcgtcatactactttttctcgcctgccataatagaatcgctatatcagggtcgaaacacgcctgcggaatcattccggcttccatctctttccgaagccactccccatacatatactcgcatttgggcggaaactgccacggaataatgtctttttgatggatgacagttatctctaatggtcttttttcggcgcaacctacgaagccggaaatttccaataattgcttggtcaactcctttttcgttgacagattcaattcttgtctggttattatcaatatatctatgtcactgtccggacgcaatttattcattgtcgcagagccatataaatacattcccaatatctgcccctgcaatagggtttctgctatggaaacgacttgcttcacttgttgtgggatttcattccgattgttcattgtattttccatatagatttgtttcctttattctttgattaatacaacagcgtcaaatgccagttccaaggcggtggatacacttgcttttccccacttccgttcttggtatttatgaggattcgagagcgtgtcggctgtaaaaagcaacatagcccatattacttctctaaattctgcacatgcagccagtgcagaacattccatttccactacttgacagccttcctctttgcggtattgcaccatttccagtgtttctcgataaaaaccgtctgttgtccatgtcttgacttccaaatatgggattttcttttgatttaaagcaaatttgattgcacttattcctgctgttgaaatctttatgtctctggatggcggaagataatggtaagaagttccctcatctctcaatgcagaaacgggtattaagaatctgttctccggaatatcttccaatacaccgcaggaaccgacagaaataatttctgtcacacctcctgctattaaatactctaaaatttggacagcagcagcactcccaaccggagccggacataaacatatcctttcctgattatgaaagcattcatagatgggatataattttgttgcactctcaaattcatctatctgtattccactgtgggcatgtgcatacttttccacttcatcccccaaaaatgcaaatacggcttttttagggaagtgctttttcccatttcccggctgaaagattgcttttgatgcggtatcgtattccaaaataggataatcgtgctttactaatgccatactatcatctccaataaaaattttctttctcacattttctgcatctattttttgcaaagttacttttttcatttggctatacatcaataaactcttagtattttgagtatattttttcgtgaagctatcttttatcttctcatcgaaaagcctctcttctgctgttggtcgtaccgcccctctaccacgttatcgacttcccgtctggctttgatttgctcccggttatccagtttgcctttctgcgtggcagtaatatacagaaaatccccggctgcacggtgagactgcttatcatcaccgaagaggttaaggacactcttgatgtccgatacttgctccgtatcgaaacggggcttgtaataatcccttgccagacggataatgccgtgtaccgccttgcggaagatgtcgcttgttttgagcagcaggaaactgagacagccgataatgtggttttgccacaaaatccgatttttgagcctcgtggtttcctccgtatgcgcagcctccttacggctaagttccgacaagttcttggcttccagctccatccgttcacggtgatggtcgttctgcatggtctgtattcgggtttgcagggcttcgatggcttccccgtgcgtggctacctctctgtgcagggcggcgttctccctctccagcgtcttgaccttgttactgccgaaaagagaaccgacgctctcggcgatgttggcggctgcggtggtcgccgcccctttcagcttctcggtctgtatctcttttttcgcccgtttgagttcctcctgcgccgtttctttctgacgctgcaaatccactacctccgctttgaggctgtctgcgagtttcttcgtttc

SEQ ID NO: 6301 - DNA, 2235 bp, Unknown
  gut microbiota DNA sequence
tttttgttcaccagtgaacaaaaaaatatcagggtctgataaaggttcagttgtagcttctggaaaatggcataaaaaaagaggctgaatttagcctctccaatatagttttaatcaaggtcgttattttaatattccgcggtatataaatgtcttctctccaaaagtattgctgggtaatatggcacttggttcgaacaatccaaaaacagacgaaccggaacctgtcatggaggcataaatagctccttgtttatacaggtcttccttaatttccctgatagccgggaactgggggaatacactttcctcgaaatcattcatcatccattctttccatttttctacaggacgtttcactatctcttttagtggcatttcttgccgatgcggttttatttgagcaaaagcttcccgggtggaaacaaaaatatccggtttgactaaaacaatctgatacccttttagggataaagagataggggagaagacgtttcctattccttcagcgtatgttggggcattccggatgaaaaaggcgcaatctgctcccaattttgcggcatattcttctaaggtctcatccgtgagtgccagattgaatttttcattcaataatttcagtatataagctgcgtcggatgatccgccgcctaaaccggcaccggaaggaatatgcttgaacaggtgaatatccacgggcggcagattgaacttttcatccaacagcttataggctttcaccactaagttattttcaacttctccttcgatttctaatcctgtctggtgcaatcgaaacttctcattgccttcgtgcagaatattcacttctagcgcgtcttctaggggaacaggatagaatactgtttccagattatgatacccgtcgggacgcttctctacaatgttcagtcccaggtttattttggcattcggaaatgttatcatgatatttagtttttaatatgttagtcctattatccacaaaggtagttttttccctgtagcatattctatgttatcggcaagaataaaggagtctgataagtcggcgatttgtttgaaggttttgtctgcacctcccacttcaaatgtatatttgtgatcgacaacgaagtctccttgtgtcttaccatattctatttcgtggttcacggaaagttgacttattgcgaaagtttctcttgccgtgccaatttgtacggatgtggaagctatggcataaagcaagtttgggttttgaagataaattttatcaggcttctgcatctttttgacggaggtcagatcggaatacaacaatttaagcagctcggcacgatccaagttctgtagataggtaatcaccgagttcctggtaagccctatagtccctgccagctttgtgatatcgacttcataaggcacagacgaggctaaaatgcttaataacgcttttagttttcttatatacgcagggtctactccgcacaataaaggcatttcctgttccaaaataaggttaactatattttcaatgtttatgtagtaatcttcccgattaccggtaaagaatggataatagccatcatgcaaatattcattgaacatttgtacaggtctgcattgttcattgatacccaggcaaatgtcgcctgcattctcaagtacttcttgtaatgaagtaaccggaatccgaatgtttttataaaacatcaaaaactctcggaatgacaaaccgtacatattataaggtaaacaccttctggaaagatcggcatctgcatttaatatgttgagcagcgatgagccactgaagactatctgcagtgatggatacaaatcgtatatttctttaagttctttgctccaagtggggtacttgtgtacttcatccaaaaacagatgttttcctccttgaagatagaatttctcggcaagttccagcagcgtgtgactactgaaataaatactgtcgagtgtacaatagagggctatccggtttcccggtggatagttcaatttgatgtattgtaacatcaaagttgtttttcctactccgcgggagcctctgatagcgattaaacgattgttccaatgaattttattcattagttcccttatgatattggtacttgtcagtgccaacattctttcttgttttaaaaacaggctatccatacttgaaattaatatatgtagcaaatatacgaatttgtttagtatgaaaagcaaatttatgggaattttgtt

SEQ ID NO: 6302 - DNA, 34358 bp, Unknown
  gut microbiota DNA sequence
aatgaagttatgaaagcattcagtttattagtagcacttatggctttaagctcattgggaggaaacggcaacggttttatgaaccttcatgaaaaagccattgacacagatcgccccaatggctggtattatgtaaccagcggaaaacaagacagtctttcagcagaaccgatagtatctaccaaggaatttgctgccgttgagctcgattctttccagaatgagcagaataaggaaatggtatatctgattgtaggtagagtaaaggattcttctgtcaaaacatgggcagatgccacagaacagtcgataggcaagcacatcgggtttgtctacaggaataaagtaatctgttatccccgggtgaacgcccgcatcgaaagcggtaatttttctatttcaagtaccgaagctgctgaaatgaaagcattatacaaagaaattcaggaggaaatactaaatgcagaaatcaaccgggaatacgatcaagcctgggaagatgcccgcaaggtacgtgaatccattactgactctacttttcttaaaactaaacgtcctatgtccgatgatgctataggtccttacaactatcagacaggttttcttgaagaccgcgcctacaaccggactgtttacgtaatagctatagacagagccaagaagcatctttccgtcaagaatgaccaactggtattgaacctgaaatcaggagcagaaattaatattgcagaagacatgtaccaatatatcaccaggttgtttgtcgactggaataaatgggtgaaagaaggaaaattcaaaatcataaaaacagaagaagggtattatgatattgaacctactcctcagaagaagaaaaattaagatcctttctccaaatctttcaaagcagcaatagaatcggaaacataaacattatccggttctatggatctccagtagcaaagagttccgatcagacgcttcagataagcaggatcatgagaacctatccggcgttgatgctctgcaagccctttcgtcagaatgaaatggacattcttgcgtatctcccttttctttgctttgggaatggtcagcttcacaccggagctgatggaaacgcctgtgataatctttctcttatgctcactcaggaaacgggttttcttatgattgatttcaaacttttcctcccgaatgatctgtttaatcagaggcaatatctgttgcgccggaaagacatctcccgaaaaggtgagatcatccgcgtagcgggtataaaccagattatattcagtagccagtgccgccagctttttgtccatctcataagagatgatattactcagtgccggactggtagatgctccctgaggcagacatctgcgtacacagcataaagccgcaagcactcttgcaatcttcggcggatatcccatactctcgaacattttccgtacccgcagactgcgtatagagccaaagaaatcatggatatcagttttcagcacatagggcttgcccagatgcggccggacattatcggaaatggacatcttgcaccggaaaccggtagcggcgggatgtagattcacaaatgataaaacgcgatgattgatagtatcctgaatggctttcagttctttgtccggtgctgaaatcatgcggtagcctccctttcttttaccaatccagaattcccggtaatgtccgggaatatctttcagtatctctttcagggccgcttcttccactcccaacagattggcacacttcatcactgcctcctcgtcgaaccatggaatggtgatcggagcagaagtaccaaagtaccggctaaaccatcctttacgggtagtttctgtatcggtagtatcttccgtattgctgcggtttccggctttccaccttttgtatccttcctgtttccggctcgaagagataatcttataaatcaacaagccggtgacaatcagtaccgctattagaattccgttcatcttaatatctgataaaaaagaagaggatgagtatttactaaaacaaatcgtggtatttataccagagtatttgttttctaagaaagctcctgagcttacgaggcgactgcacctctttcctgctaaatctttttctcatcctcttcgtacgcaaaaatagatcttttttcacttatagcgccaaagagagacaatttattttaatgtagtaatgtttttttaatcagattctataactttgcctcccataaagaaaatatctatactataatgagtacatccaaacacccgaaaggtctttacctcgtctttgctaccagcacggcagaacgtttcagctactacggtatgcgtgctatctttatcctgtttctaacccaggctctcttgttcgataaggaacatgccgcctctatttatggcagctataccggactggtttatcttactccgctcatcggcggatatattgctgataaatactggggcatccggcgttccgttttctggggagccatgatgatggcggtagggcagttcctgatgttcttcagtgcgtcgatgctggatactaaagagctttcccactggttgatgtatgggggactcaccttcttgattttaggaaacggatgctttaagcctacagtttcgtcattggtcggacaactttatgaaccgggagacagacggttggactctgcttatactatattctatatgggtgtaaatgtgggttctttctttgccccgctggtttgcggttacttcggtgagacgggggatcctaatgatttcaaatggggattcctgattgcagcaatcgttacagtattcacggtaattctgtttgaaacacaaaagagcaagtatctgatcggtcctgacggaaagccgctcggcattattccggacgccaaacgggagcaaccgaaagaacataaaacagttcagcaaacagccatagataaagataagaagatgcgcaacaatttgcttctcggagcactgaccattgcccttgccttattcttctactggtgtttcggcaacgattgggtcagtatagggatattcacagcctgtatcgtcttccccgtcagtattctgcttgatggctctctgacaaagatagagcgtgaccgtatcttcgttatttacattattgctttcttcgttatattcttctgggcagcctacgaacaagcaggtgcttcgctcactctttttgctgccgaacaaaccgaccgtacaatcctcggttgggaaatgcctgcctcctggatacaatctttcaatccgttcttcgtagttatactggcagccattatgcccagtgtatggggtgcgctgaacaaacgaggcatggaaccggcttctcccaccaaacaagctattggtttgttgctgctctcattgggatatttagtcatttgtttcggtgtgaaagatgtacagcctggtgtaaaagtcagccttatctggctaaccggactttatttcatccatactatgggagaaatagccctctcccctatcggtttatccatggtaaacaaactcacccctgtccgttttgcctctctcatgatgggaatctggtatctttccacctctacagccaataaatttgcaggtactttaggcggcctttatcccgaagacggaaaagtgaaaaccctgctcggattccgtattgaaaccatgttcgacttctttatggtattcgttatcatgtccggcgtagcctctcttatcctcttcctgctctcaaagaaattacagaagatgatgcatggagtagaataaaaatcgtatttttgtgccaattttaaaaatctatcccttatggacaccatacaaataaaagacaaaaagttcactgtttccatcaaggaacaggacattctgaaagaagtaacccgcgttgcaaatgaaataaatcgcgatctggctggtaaaaatcctctgtttctcagcgtcctgaacggctcgtttatgtttactgctgatctgatgaaaaacattactattccctgtgagatttctttcgtgaagctggcttcttatcagggggtgtcctctaccggagttatcaaggaagtgatcggtattaccgaagatctgacagaccgcacggtagtgattgtggaagatattgtagatactggcctgactatgcaacgtctgctggacacgctgggcacacgtaacccgaaagaaatccacatcgcttcgttactggtgaaacctgataagttgaaagtagatttgaatatagaatacgtagccatggaaattcctaatgacttcattgtaggttatggattggattatgacggcttcgggcgcaattatgcggacatttatacagtggtggattaaaaaagaatttgaattaggtataatataagtaacagttaaattgtaaatcacaaatgttgaacattgtaattttcggtgctcccggttcaggaaagggaacacaaagtgagaaaatcgtagaaaagtacggtattaaccacatctcaaccggtgacgtgttgcgtgctgaaatcaagaacggcacagaactgggcaaaacagctaaaagttatatcgatcaaggccagttgatccccgacgacctgatgattgatattcttgcaagtgtattcgacagctttgaagacagcaaaggtgtaatcttcgacggttttcctcgtacgattgcacaggcagaagctctgaagaaaatgcttgctgaaagaaatcagggagttagcgtgatgcttgacctggatgtacctgaagacgaactaatggtccgcctcatcaaacgtggtaaggattccggtcgtgccgatgacaacgaagagactatcaagaaacgtcttcatgtttatcattcacagacttctccgctgattgactggtacaagcaggaaggacaataccaacacatcaaaggacaaggtgcattggaggaaatctttgctgatgtttgcgctgcaatcgacgctgcaaagtaaagtaacacaatcataatttagaagcgcggtaatacccatgaaaatgatattaccgcgctttgttattctcccgtctgccctaaaataacaagaaactatttcacgatcttctttttatattcacgcggggtacattggattttcttaaagaatgtagcattaaaccgagctatagaattgaatccacattcgtatgcaatgtcggtaatgctcatgtctgtagtcagtaatttacgttgtgcatgagctattcttaactcagcaatatagtcacttattgtagtaccaaatgccttcttaaatatatgattggcataatcagggtgcagacctactgcatcaccgatatcattggctttaatatcattacaataattcttagtaagatatatggttattttttcgttgtgtcgcaagtaagtgatattcccttggggcaggtaatttatctctatttcattatgcctatcgtatctgggcataacacggggtatccatgtctcacatgtaagtccataaggtttaaactcctcacggaacttatcaaaactgtaacatttctcggaattcattatattcgtatataaaaatagagagtgttattcacattttggtggtaaatttgcaaaaataatctttaaacgccatgaaaaaagtacttttcttctttttctttcttacagcatggagcctttattcagaggcgcaagtggctaatgaggacaaacatcggctgattgtaaccactgatttagggggaactgatccggatgatatccagtcaatgatacacttgttattatgctcaaatgtaatcgacattgaggggttaatcagttcacaagtctggatggatgacccagataaaacagctaaaatttcagaggtagtagaacaatttggagaagttctgcctcgcttgaataaacatgcagaagggtatcccagtttgaatcaactgcgggcaattattaaacgagggcaaccttcctctaacatgaccggagtaggtcaaggtaaagattctccgggatcagaactgataatctcggtagttgataagaaaaaggatcaacgccccatatggcttgcagcttggggtggaatgaatacgatagcgcaagctttatggaaagtgaagcatacacgcagcgagaaagaccttaagaagtttactgcaaaaatccgcatatatgatgttctagggcaagatgatgccggagcctggatagccaagaacttcccggaaatagtatatatcagaaataaagaagtatatggttggggaccctccgatcaatggcttaaacagaatattcaaagtcatcagccattaggcaagcattatcctgaccggaagtgggcaacggaaggtgactctcctgctttcttttatgtatataccaatggcctgaacgtacccgattcacttgaatatggaggatggggcggtcgtttctccaatcaaaagacgagtggtatacgaggtatggattttatagtgcgcagcgggaaagatgaaacgcaatatgacccttattatatgcatggaagctgcaaagagggctgtgccgccatcaacaaatggcagcagcacatctggaataattttgcagcacgtatgttgtggactacaaccgatgattataaagcggtgaatcaccatccgcatgcagtgcttgatggagaccgttcgctaaaatgtatctttaagaaggtaaaagccggaaattccatggttttagatgccagcggttcaactgatcctgatggtaacaaactgatatacaagtggagtgtttatactgaaccaagcagttacaaaggtgaagtaaaaatagaaggggataatgcggaaaaatgcaaagtacatatccctgctgatgctgcgggccaaaacatacatatcattttagaattgacggatgaagcaactccggcacttaccgtttatagacgagtagtgctaaaaataagttagaaatgccctccgctacggattaataaataaaaaggaataaaaaagtttgaggtagtcttggagaatcgttacttttgcatcgaaaaagaaaataagtattttaaaatcaatcgtaaggaaagaaatggctgaatcgaactttgttgactacgtaaagatatattgccgctccggaaagggcggacgaggctctacgcacatgaggcgtgagaaatacatacccaatggcggccccgacggaggtgacggaggacgaggaggtcacattatcctacgtggtaaccgtaactactggacgctgttgcatttgcgctacgaccgccatgcactggcaggacatggagaatccggttccaagaaccgcagttttggtaaggacggagaagataagattattgaagttccctgtggcacagtggtatacaatgccgaaacaggcgaatatatctgtgacgtcaccgagcatggacaagaagttgttctgctgaaaggcggacgcggcggactgggtaactggcacttcaagacagccacccgtcaggcaccccgctttgcacaaccgggcgaaccgatgcaggaaatgacagtaatcatggagctgaaactcttggcagacgtaggtctggtaggcttcccgaatgccggaaaatcaaccttgcttgcttccgtatctgccgccaagcccaagatagccaactatcccttcaccacattggaacccaatctgggtattgtttcttaccgtgacagcaagtcgtttgtcatggcggacattcccggtatcattgaaggagccagtgcaggaaaaggtttgggattgcgctttctgcgccatatcgagcgtaattctctgttgctcttcatggtgcctgccgacagcgacgatatccggaaagaatatgaaatcctgttgaatgagctgagcactttcaatcctgaaatgctggacaaacaacgggtacttgccatcaccaagagcgatatgctcgatcaggaattgatggacgaaatagagcctacactccctgcaaacgttccgcatgtattcatttcttccattaccggtatgggactttccgtgctgaaagatattctttgggaagagttgaataaggatagtaacaaaatagaagctatcgttcaccgtccaaaggatgtaagcaaactccagcaagagttgaaagacatgggtgaggatgaagacctcagctatgaatatgtggaagatgacgaggacgtggaagacctggaagactttgagtatgaggaagaggactgggaggatgacaagcaatgattgctctgacagaagataaacgaatgttgggatacggggttatgacaccgtactccaacattttttgtttcgcaactacccgtcgaggaggtttcagcaagggagattatgcctctttcaactgtacgccttacacgggggatgatgcggaatctgtccgtcgcaatcaagaactactctgcaactccatgcctcaacagcctaaagaattagtcattccgttccagacacatggtacaaaggtggaggtgattgatgaaaagtatctcaatgccacatctgacgagcgaacggccatgctgcaaggggtggatgcactaatcacaaaggaaccgggttgctgcatttgcatttctacggcagactgtattcctatcctgttgtatgatcgcaagaaccaagtggtagccgccgcccatgcaggttggcggggaacggtgaattacatagccggacacactctcgacaggatgcgggcactctacggaaccgatggaaaagacgtaatcgcttgtatcggccccggcatatccttgccttcttttgaagtaggcgaagaagtgtacgaagctttccgcatgaacggttttgcaatggattatatatcagaatggaagccggaaacacataagcatcatatagacctgtgggctgcgaaccggatgcagttgctcgacttcggtgtacccggcgagcaaatagaaacatctggcatttgtacctatatgaggcacgaagaatttttctcggcaagacgactggggattaaatcaggacgtatactatcgggaattatgatagtagacacaaaaccataacttttttagtatgaagaatattttatccaaagggcaactatcgattctcattgtattgggaattttgattcttgaccaagtcataaagattgaggttaaaacgaatatgttttataatgaaagcattcatatcacggattggttttatcttcgttttatagaaaatcccggtatggctttcggtatgcagatagtgcctaaagccattcagactattgcccgcacaatatttgctatcgcaattggatggtatatcgtcatacttattaaagctaaatataagcgtggctatattgcatgtatttcattgatactggcaggagctatcgggaatatcatcgacagcatattctatggcgttattttcagtaagagtacacccgccgagatttctactttcgtacctataggggaaggatataccggttggctgcatggaaaagtggtcgatatgttctactttcctctttttgagtttaactggccaggctggatgccatttataggaggagacaattttgtattcttcagtccggtattcaatttagcggatgctgccatcagttgcggagtgattatcttatttttgttttacatgaaaagtttaaatagtagttttagtttatgtaccagatcaccgtatcagaagaaataaaaaatgcctgccccatcttcaaaggtgcagccgtctatgcagaagttaccaatacagccttttgcgaaggactttgggaagaaatcaatactttcacccaggaactgacttccactacccagccggaggacatcaaactgcaacccgccattgcagctacccgggaagcttataaacgttgcggtaaagaccccagccgttaccgtccttctgccgaagccttgcgccgccgtctgatgcgcggaattgccctttaccaaatagatacattggttgacctgattaatctggtatccctacgcaccggttattccatcggtggtttcgatgcggacaagatacagggcactgacctcaaactgggagttggacgcgccgaagaaccattcgaaggtatcggacggggcgtgctaaacatcgaaggacttccggtctatcgcgatgccgtaggcggtatcggtactcctaccagcgacaacgaacgtactaaaatggatttaggcacccagcatatccttgccatcgtcaatggttacagcggacaggaaggtctgcgggaagctgctgagatgatacaggaattactgaaaaaatatacttcttcgaatggaggagaaattatctattttgaataacgagaaggacctttaatcatgaacatattctttctgctgctgtcattcgcactggcttatattccgcctgaagagaaacctagcttctcgcaaatggaaatcaatcatatccgggttactacaccggggcttttcgataacgaaaaattattagaattgcatttggagcaaatacctgacaccgcttattgctttccgcttcccggaggaaaagtgatttctccttacggacgtggtggcggccgtcactcgggtattgatatcaagacttgcgccaaagacacgatacgcagtgctttcgatggcattgtacgtatgtcgaagccctacagtgcttacggcaacgtaatcgttgtgcgccattcttcgggattggaaacgatatacagtcataattttaagaatcttgttcagagtggcgacgtcgtaaaggccggacaacccattgcactgaccggacgtaccggacgggccagcaccgaacaccttcattttgaaacccgcatcaacgggcagcatttcaaccccaatctcattttcgatttcaaagaaaggacactccgcaaagagtgtattcactgcaccaagaatggaaaaggcgtcatcgtgaagcctgcaacaaaaaaaacagccggaaccagctaagtatccaaacgtttcactaaatttgcaactgttttacctataaaacgacatgaacttataaacaattcaatgatagaaaaactgattgttcttgaggatatcgacccggttatcttttacggtgtgaataacgccaatatgcagttgataaaagctttgtaccccaaactgcgcattgttgcacgcggcaatgtcatcaaagtgttgggagatgaagaagagatgtgcgcattcgaagaaaacattaccaagctggaaaaatactgcgccgaatacaactcattgaaagaagaggtgatcatcgacatcatcaaaggaaatgcaccgcaagcagaaaagtcgggtaacgtcatcgtattcagcgtgacaggcaaaccgatcatcccccgcagtgaaaatcagcttaaactggtagaaggtttcgccaagaacgacatggtatttgccataggtcctgccggttcgggaaagacgtatactgccattgcccttgccgtacgtgccctcaaaaataaagagatcaagaaaatcatcctcagtcgccccgccgtggaagccggtgagaagcttggattcctgcccggtgacatgaaggataagatagacccgtatctgcaaccgttgtatgatgccttacaggatatgattccggctgccaagctgaaagaatacttggagctgaacgtcattcagatcgctcccctcgcctttatgcgcggaaggacgttgaatgatgcagtcgtaattctggatgaagcgcagaacaccactacccagcagatcaagatgttcctcacccgtatgggtatgaacaccaagatgattgtaacgggagatatgacgcagatcgacctgccctcttcccagacttcgggactggtacaggcactccgcatcctgaaaggtgtgaaaggcatcagctttgtggaactgaacaagaaagatattgtgcgtcaccaattggtaacccgcattgtagatgcctacgagaaatttgataaggaaaccaaagccgaacgggaaaaaagaaaactcaccatgggataacaccgagtctcacagagcagaaaagaactctgtgagactctgtgtcactctgtggtgaaaaccatagaaaatatccaaatcataaatataacaatgatgaaagcattaacaaaaactgatttcaattttccgggacagaaaagtgtgtaccacggaaaagtacgcgatgtttataacatcaatggtgaaaagctggttatggtagcaaccgaccgtatctctgcattcgacgttgttttgccgaaaggcattcctttcaaaggacaaatgctgaatcagattgcagccaaattcctggatgctactactgacatttgccctaactggaagacagctacacccgacccgatggtaacggtaggtgtgatgtgcgaaggtttccccatcgaaatgattgtacgcggttatctttgcggtagcgcatggcgtacttacaaaagcggtgtacgcgaaatctgtggtgtgaagttgcccgaaggaatgaaggaaaaccagaagttccccgaacccatcatcacaccgactacgaaagctgaaatcggtgaacacgacgcagacatttcaaaagaagaaatccttgctaaaggtctggctactcccgaagaatatgccatattggaaaaatacaccatggcactcttcaacagaggaactgagatcgcagcagaacgtggtctgattctggtagatacgaagtatgaattcggtaagcacaacggtactatttacctgatggatgaaatccatacaccggactccagccgctacttctactctgaaggttatcaggaacgctttgaaaaaggcgaagcacagaaacaactttctaaagaattcgttcgcgaatggttgatggacaatggtttccagggcaaggaaggacaacaagttccggaaatgacagacgaaatcgtagcatccatcagtgagcgttacattgaactgtacgagcatatcaccggagagcaattcgtgaaagaagataccagcaacattgcttcacgtatcgagaaaaacgtaacggaatacttaaataagtgataaacggcttagtgataagtgattagtagatttattaatcacttatcactaaccactaaacactatcaacatggattatccccaggaacatatcaaaccttacggtgaggacggaaagaagagtgaacaggtagaagaaatgttcgacaacattgctcctgcttatgataagctgaaccatacactttcattaggcatcgaccgcagttggcgccggaaagcaatcaattggttaaagcctttccaaccgaagcgcatcatggacgtagccaccggtacaggtgactttgccattcttgcctgccgcgagttgcagcctgacgaactgataggcaccgacatctcagagggaatgatggacgtgggacgtaataaagtaaaacaggcgcacctctcggacaaaatatcctttgcccgggaggactgcacctctctctcatttgccgatgacacgttcgatgctgtaaccgtagcgttcggtatccgcaacttcgaagggttggacaaagggttggcggaaatgtgccgcgtgctgaaaaccggaggacatctcgtcattctggaactctccacaccggaccgttttccgatgaaacaacttttcaccatctactccaaagtagtcatccccctgctcggcaaatgcctgtcaaaagacaatagtgcttacacctacctgccccaaagcatccgtgctttcccgcaaggcgaagtgatgcaggaagttattcgcaaagcaggtttcagtcaggttaatttccgcagactgacattcggtatatgcactctttatactgcgactaaatagagtgataaagtgatagagtgataagtgatatcaccccaccttatatatattaacgttagcacactaagagaattatgcagaaatacggtttaataggctatccgctgagacattcgttttccatcggatatttcaatgaaaagttcaaatcggagaatatcgacgccgaatatgtaaactttgagatacccaacatcaatgactttatggaagtcatagaggaaaatcccaacctctgcggacttaatgtgaccatcccgtacaaggagcaggtcatcccctttcttgacgaactggacaaagataccgcaaagatcggcgcagtgaacgtcatcaaaatcatccgccagccgaagggaaaagtaaagcttgtcggctacaactcggatatcataggttttacacagtccattgagcctttactgcaaccccatcacaagaaggcgctgattctaggtacaggcggtgcatccaaagccgtctatcgcggactggctaatctgggcatcgaaagcgtattcgtatcgcgtacgaaaaaggaatcgtcttacctcacttatgacgaactgacaccggagatcatgcaggaatatactattatcgtaaactgtacacccgtaggcatgtatcctaaggtggatttctgtccggatattccttatgatcaattaactcccaaccatttactctacgatttgttatataatcccaatgaaacccttttcatgaaaaagggtgaggctcacggcgccgttactaaaaacggactggaaatgctgttattgcaagcatttgccgcatgggaaatatggaacaaatagagtgaaaggaaggaaagatgaagaaaggtatcaagtacagtctgctcggactgttagcagttatcattattgccctcacaggtgcgagtttctacatgctcggctactcgctgagaccggagcacaacaaagggaaagatattcccggctcctacgagtatatgctcagcgagtacccgcaaatcaagccttggatagatagtttgcaaactgtcggtgctttacgggatacctttattatcaaccctgaaggggtgcaactgcatgccatttacgcagccgctcccgaaccgacccacaaaacagccgtcatcgtgcatggttatacagacgattgcatccgtatgctgatgataggttacctttataacaaagatttaaagtataacattctgctgcccgacctgcaaaatcagggactaagcggaggccctgccattcaaatgggttggaaagaccggttggacgtattgcactggatggacattgccaacgatatttacggcggaaatacccagatggtagtacatggcatctctatgggtgccgccaccactatgatggtatccggtgagcctcaacaaccttttgtgaaatgttttgtggaagattgcggttataccagcgtatgggacgaattctcctacgagttgaaagggcagttcgggctgcctcctttcccgttgatgtacaccaccagctggctgtgcaacgcgaaatacggctggaacttcaaggaagcttcttcgctgaatcaggtcaggaaatgcaaactgccgatgttcttcattcatggcgatgcagatacatacgtgcccacctggatggtatatcccctctacgaggcaaaatcggaacccaaagaattgtggcttgcccccggtgccacacacgccatgtcctacaaggatcacccggaggaatacaccgaacgtgtgaagaatttcgtaggaaaatacatctattgatgtgatttttcctatattcgccacacaaatacattagtatgaaaagattaatctccataagtttattcctatgcctgctgctatccatgcaggcacagaaggtctatactacagacaatatccccaaagtacatcttcagaacaaaatgcgctatgtctgcaatccggacggcatcctctctcaggctgcctgcgacagcatcgaccgtatgctgtatgcattggaacaacagaccggcatcgagacagtagttgccgtagttccgtctatcggcaatgatgattgctttgactttgcacaccgcctgctcaatgaatggggtgtgggaaagaaaggaaagaataatggtctggtcattcttctggtgaccgaccagcgctgcatccagttctatactggttatggactggaaggagacctgcccgatgccatctgtaaacgtatccagacgcgcgatatgattccttatctgaaagatggtaactgggatgtgggtatggttgccggtgtgcgtgccgtatgcggcagattggacggcagcatggtgaatgatacagatgatgaagaagacatttccttcttcggcattctggcagcagttatcggattctttgttgttgccggaggaatcggctggatggcggcacgtgccgcaagcaaatgtcccaactgcgggcagcataaattgcaacgtaccagcagcaaagtggtttcacggatcaacggagtaaaaacggaagatgttacctacacttgccgcaactgcggacacaaggtagtacgccgcaaacagtcgtatgatgaaaactatcgcggaggtggcggaggaggtccggtcatcttcggtggtggcggaggcttcggcggaggaggcggtggcttcagcggaggcagcttcggtggaggtatgggaggtggcggaggtgccggttcccgattctgatgcaccgcagaaatatataaattgtataatcatttaataaaagaaaagtatgaagaaatcaactattatcattcttgttgttttagctctcctcgtcatttggggtgtcactggttataacggactggtaactatggatgaaaacgtaagcggacaatggtcaaacgttgaaacacaatatcaacgccgtgccgacttgattccgaatctggttagtacggtaaaaggatacgcttctcatgaaaaagaaactctggaaggtgtggtagaggctcgcagccaggctactcaaattaaagtagatgctaatgatctgactccggaaaagttggctgaataccagaaagctcaaggtgcggtaacttctgcattgggtaagttgcttgccattactgagaactaccccgacttgaaagcaaaccagaatttcctggaactgcaagcccaattggaaggtactgaaaaccgtatcaacgtggcacgtaccaacttcaacaatgcagcaaagaacttcaatactgccatccgccgcttcccgaagaacattcttgcaagtctgttcggtttcgaaaagcgtgcttactttgaagcttccgaaggagctgaaacagcaccgcaggtacagttctaaataagtttattcctaccgtaacaaacggttctataaaaaacaagtaccccttccacccatcggaaactccagtctattcgagtttccagggtggaaggggtacttccattttttaagatgactactgcaaatccgttattgcctctttcaattcttttatcccgctccatgctttgagaaacaaacgaattccgatcagcgttcctacgacaagaccagtccaggcacctatcaatatataacgatcccccatctgggacatatcccatatcatacttgccagtaaaggtacggcacacaacacactcacagctatccccactttgaaagacatccggaaacggctctccgccagacacacttcacgcacagtcatcttcaggcaatcaatcttccttaacagcaacatccatgtgaattgccgggctattatcacagctacaaacagaaacaacagcacccacgttgacatgctaaaatcacacatctgattatgaacaatataccagcaaaagaaaggtaaacagatcactacaatcgtaaatcgacgcaacacacgatcctggaccttctttactttactgaccactttattatttagttgctggcgctggtccatttccaggcgtccgagcctttcttccatgatattccaattttgttttaattcttccagttccataatctgttttattttagctattcgcttgttttgtaagtttatccttaattcgtttcaattttgaagccacggtattgcgcggcacgccgacaatttccgcaatctcttcgtaagaattttcatccagccacagcaagatgacggcgcgttcaaacttatccagtcccgcaatgaggcgatacatctctttcaagcgtttggtcgtttcactatcttctgcttccaagccatagagggaatccaaggaagtatgctcgccccggcgttgctgctggcgatagaaggagatacaggtattcaatcccacgcggtaaatccacgaagaaggtttaccctttccttcataaccctcgaagcctttccaaaggtttattactacatcctggtagagatctttaaaattatccccgtccgtggcatacatgtagcagattttatagatcactcgcttgtattcctcaatgagggaagtgaactgtttttccttatcattctgttccatcttaagatagtcttttatacataagacgcccggttggggaattagttgcagaggaaagaaaaaaaagaaaattgagggatatactacggacggggtatgaataaagtgataatcctgtatgacaaacgtctgtacataaacgataaatatcaacaatataagatatttgtgagatcagtcgtatacttagggtacctcagtgccatacttagggtacctcagtataatacttagggtacctcagtcgtatactgagataccatcattataacacttttgataatcagctatttacaaagcccctttcaatatcaataaattgagacaaatgagctgtttaaaatgataaattatactctttctattccgtaattaatacattttcgtcctcattatatacatccatattaaaaattcctgtatctttgttacatatttcttcaataatgaagagatatgctttgcgatttggagatatcattttattattcgtagtactaaaagtctggtaaatttttaaaagtacgaataataagtggaagtctccacgtctggattgcatataactctgttatataagctccgggcgtggggctattgcttattattttctttgcgggtttaccagagccttagtacggaataatatatcaatagttcccacgctcttttttacgatcaaggaacttgggacaaactacaacttttaaatttataacacgatgaatgtagactttacctgctcttgccaaatgaaaaccgacttagaaaactcagccgatgtattttctttttttgaagaaaactattctctgcctgctatcgcagataatctggatacgctttcccctaaagaattgcgctgtgcctgttgcctgatgggcgttgccttagtagcattatcccagaagaaaacgatttgggaacgactgaagactatgggattgggaagcaaagaataaagccttagccctacttcattactaccgccctcacacaactccctgagccatcatgcaaaagatggcatcttttgttgtaaaaggtggcatctttaacatcaaaagatggcatctttcgtagcaaaagatgccaccttttgcatcacttgtataagagaaagagatgaaaggtaagtgttatcagcatgaaaggattaagtgaagatgccccaaactccaatttcttatgcaaaggcaaggctataagcaaaataatcgctacttttgctacgtgaagataggctgcacctcagcaaaatgcaaatgccggggcactcagtttaaataaatctctcacattcgaaaaagagaatgaattctctttttactcataaaatcgagattttgcactatctttgcacattcaattgaaaaaacatatcaactcatgagtaaccaaagatacatgatgcgcggtgtcagcgcttctaaagaagatgtgcacaatgccatcaagaacatcgacaaaggtattttcccgcaggctttctgcaaaattatccctgacattttgggcggtgacccggagtattgcaacatcatgcacgccgacggtgcaggcacgaagtcctcattggcttatatgtactggaaagaaacaggtgatctttctgtttggaaaggcattgcacaggatgcactgattatgaatatcgacgacctgctctgcgtaggtgcagtagataatatcctggtttcttctaccatcggacgcaacaaacttctcattccgggagaagttatctccgccatcatcaacggaacggacgaattgctcgccgagctccgcgaaatgggtgtaggcgtatatgctactggcggtgaaactgccgatgtaggcgacttggtacgtaccatcattgtggacagcaccgtaacttgccgcatgaagcgcagcgatgtgattgataatgccaatatccgtccgggcgatgtaattgtaggcttggcttcttacggacaggctacttacgaaaaggaatataatggtggtatgggcagcaacggactgaccagcgcccgtcatgatgtattctccaaatatctggcagagaaatatcccgaaagttatgacaaggcagtgcccgaagaactggtttactccggtggtctgaaactgacggatgccgtagaagacagcccgctggatgcaggcaaattggtactctcccctacccgcacgtatgcgccggtagtgaagaagttgctggatgcacttcgccctgagatccacggtatggtacactgctcgggtggtgcacagacgaaagtgttgcactttataggtgacaattgccgcgtgattaaggataatctgttccctgttcctcctttgttcaaaacgattaaagagcagagcaatacggactgggcagagatgtacaaggtattcaacatgggacaccgtcttgaagtatatctgtcgcccgaacatgccgaggaagtaattgccatcagcaagagcttcggcatcgatgcacagattgttggacgtattgaagaaagcaaccagaaagaactgattatcaatagtgagttcggagaattcaaatactaattcaatggcagacaacaataccatattagagaaactcgaagggcttgttgcccgcttcgaagaagtatcgacgctgattacagacccggcagtgattgccgaccagaagcgttacgtaaaactcaccaaagagtacaaagaactgggcgacctgatggaggcccgtaaagaatatatccaggtgctgaacggcatcgaggaagccaaagagatcatctccaatgaagcagacccggagatgcgggaaatggcacgcgaagaattggatgcctgtcaggcacgccagccggaattggaagagcatatcaaactcctcctcgtgcctgccgacccacaggacagcaagaacgccatcctcgaaattcgtggaggtacaggcggtgacgaagccgctatctttgccggagacctcttccgcatgtataccaaatattgcgaaacaaaaggttggaggatggaaatatccagcgtcaacgaaggcgcagcaggcggattcaaggaaatcatttgcagcgttacgggcgacaatgtgtacggaacattgaaatacgaatcgggtgtacaccgcgtacagcgtgttccggctactgaaactcaggggcgtgtgcatacttccgccgcatccgtagccgtgctgcccgaagccgaagagttcgatgtagtgattaatgaaggcgaaatcaaatgggatactttccgaagtggcggtgccggcggacagaatgtaaataaagttgagtccggtgtacgtctgcgctatgtatggagaaatccaaacaccggtgcttccgaagaaatcctgattgagtgtaccgaaacacgcgaccaaccgaagaataaagagcgtgccctctcacgtctgcgtacctttatttacgacaaggaacatcagaaatatctggacgatattgcctccaagcgaaagacaatggtatctaccggagaccgctccgctaaaatccgtacctacaactatccgcaaggacgcatcaccgaccatcgtatcaactataccatctataacctctccgcctttatggacggtgacattcaggactgtatcgaccacctaattgtagcggaaaatgcagaacgtctgaaagaaagcgaactgtaaaccaacaggttaagaagcagagcgaatgaaaggacagctactacataaagtatttcataccctgacggaagcgtttcaaaattgcctgaggcgctttccttctacagtatgttttgtccttgcacttaccgtctatttagtctatctggtagctaccgacctggatgatgacaggaagctggtgatggttctgggttactatttttctatcggtacgttgctctcactcactctccacctgtggagcgaagagataaagagcaagataaaaggagtgatcgtacatatggtaatgcacgtattgctgattgccgatgcggtgtacctctacagcctttcaccggaacagtcgcttaccgaaataggcatagctcacggagccgccatcctggcattgtggctttcggctttcttcctttcattcatcaaagaaaagaatgacattccaagctggaacttcgcttcatacacgattggcgcttttgtcacggccaatgtggtggggcttatcatgagcggtggaatcagcctgctggtattttcgcttcgccaactcttcaacgtggatgtaagttggaattgctatctatatattcttattatatgtagtgtattgcttccgatgttgctcttccttggcatgttgcccaaagatgagcaaaaacataaccgggagccgcaaccgtcggagttcctgaacggtacgatacattttctctttctcccgctcatggcaggatacctcctcgtactttatgtctatgcagcccgcatatttatcagttgggaactgcccacaggctgggtatcctggctcgtggtagcgctgatggcaggatgtatcgccattgaattcgggttgtatcccgtgcgtattcaggagaagaaacctataaacgaatggattgcgcgttggttacccgctttggtattgccgatgctggtactgatgacaatcggcattatacgccgcttcaacgattacggcgttaccatcaatcgcctttaccttataactctcaacatctggtgctatattgtttgtatcggactcgtcttcactaaagcccggcgcatcagttggataccgatttcgttctccatcctctttctgctaacttcagcactgccagtcaattatgcaagtatcacccggaatatcatgcgcagcagcgtagagaaagagctgaaacgcactaatttaaaactaccactcacccgtgaacagtacgatgactggatggaatcgctcccggcagaaacgtcagtgcaagtaaacgacaagttcagatatctgcgcaactggttcggacggaaaagtatagccgaccttgtggacaaggatgcctcattctattcttctaaaaattacggtactaccgatacaacagacgattccgattccttcgtatcatacagcggcaagagttcacatcaagtcagcatccagataccggacgggtaccatcagttcatagtcgtaccggatgaaaatataaaggacagatacttccacataccatacgactatctggaaacaggaatactgcctgttccccttaccactcagactaataataagaacgatacgatcttcattgacctgaaaacaatggaggcacttgataatcacaaatataatcaaatgccccctacccgatttaaatgtaattccgacagatgccttttcatgctaacaagtttctctctggattacaataagaaaaggaaagatgctctcaggttacgcatagaaggctacttattcaagaaataaccaaacgaattataaacagattaaatagattcagtaatggataaacaacaactttttgaaaatatcaagcgtaagaaatcattcctctgcgtaggtctggatacagacatcaagaaaatcccggaacacttgttgaaagaagaagatccgatcttcgctttcaataaagccatcatcgacgcaacggctgacctttgcattgcctacaaaccgaacctcgctttctatgagagcatgggcgtgaaaggctggattgcttttgaaaagactgtgaaatatatcaaggaaaactatcccgaccaattcatcattgccgatgcaaagcgtggtgacattggaaatacctctgccatgtatgcccgcacattcttcgacgaactggacatcgactctgtaaccgtagccccttacatgggtgaggacagtgttactccgttcctgacttatgaaggcaagtgggtaatcctcctggcactgacaagcaacaaaggctcccacgacttccagttgacggaagatcccaacggcgaacgccttttcgaaaaagtacttcgcaagtctcaggaatggggcaacgacggacagatgatgtatgtggtaggtgccacacaaggccgtgctttcgaagatatccgcaagattgttcccaaccacttcctgcttgtgccgggcgtaggtgcacaaggtggctcactggaagaagtttgtaagtatggcatgaactccacttgcggactgattgtaaactccagccgtggcatcatctatgtggataagactgaaaaatttgcagaagctgcacgcaatgccgcaaaggaagtgcaacagcagatggcagaacagttgaagggagtgattaacgcctaatcacttatcacttacccttaatcactaacaacgtgttcgaacgaaagatcattaacgacccggtgttcgggttcatcaatatcccgaaggggttgctgtacgacatcgtgcggcatccccttttgcagcgtttaaaccgcatcaagcaactgggtttgtcgtctgtggtttatcccggtgcacagcacacgcgctttcaacattcgttgggcgctttccatttgacgagcgaagctgtccagcagctcgccagcaagggaaactttattttcgacagtgaagccgaagcagtacaggcagccattctgatgcatgacatcggacacggtcccttctctcatgtactggaagacaccatcgtacagggcgtatctcacgaggatatctccctcatgctgatggagcgtatcaacaaagaaatgaacgggcaactcacacttgccatccagatattcaaggacgaataccccaagaagttcctgcaccaactggtcagcggacaacttgacatggaccgcatggactaccttcgccgcgacagtttttacaccggcgtaacggaaggtaatatcggctcggcacgcatcatcaagatgctcgatgtgaaagaagaccatctcgtggtagaatccaaaggtatctattccattgaaaacttcctcactgcccgccgcttgatgtactggcaggtatatctgcacaaaacgtccgtggcatacgagaaaatgctcatcagtgccctgctccgtgccaaagaattagcaagtaaaggtgtagaattatttgcttcaccggcattgcgttttttcctttacaatgacatcaacaaggaaactttctataacaatccggagtgcctggagaactttatccaactggacgacaatgatatatggaccgcattaaaggtctggagcacccacagtgacaaggttctgtccacgttgagcctcggtatgatcaaccgtaatatctttaaagtggaaatttctaccgaaccaatatgtgaagaaagaaaaaaagagttaactttgcaaatcagtcagcaactggacatacccctctctgaagcgagctatttcgtctctacccccagcatcgagaagaatatgtacgacccggcagacgatagtattgatattctttataaagacggaagtatcaagaatattgctgaagcatcggacatgctcaatatttccctactgtctaaaaaggtaaaaaaatactatctttgctaccaacgtttgcataggtaagtataaaatattcacccaaggacaaggaaatataaaaaaaaagtccgttatttgtgatttgaaaccatctaacaagaataagacaatggagttctctgctaaacaaattgcaacatttatccaaggagaaatcgttggagacgagaatgcaactgtacatacttttgccaagatagaagaaggcatccccggtgctatatcgtttctgtcaaaccccaaatatacatcttatatctacgaaaccaaagccagtattgtactggtaaacaaagatttcgttcctgaacaagaaataaaagctactttaattaaggtggataatgcctacgaaagtttggctaaattgctcaacctttacgaacaaagtaagcctaaacgtgttggtattgatccgttagctttcgttgcagaaactgctaaaatcggaaaggatgtttacattgcacccttcgcttgcattggtgaatacgcagaagtaggagacaatacaatgatacatccgcatgcgactatcggtagtggtgctaaaataggcagtgattgtatcttatatgccaatacgaccatttatcatgactgccggataggcaatcattgcatcctgcattccggttgtgtgatcggtgcggatggttttggtttcgccccaactcccgaaggttacgaaaaaatacctcaaatcggtatcgtaatactggaagacaatgtagagataggtgcaaacacttgtgtagaccgtgctacaatgggggcaaccatcgtacacaaaggtgtgaaactggacaacctgatacaagtagcccacaatgacgaaatcggtgcaaataccgttatggcggcgcaagtgggtattgcaggatctaccaaagtaggcgaatggtgtatgttcggcggccaggtaggcattgcaggacatatccatattggaaacaaagtgaacctcggagcacagtctggtgttcccagcaatattaaggatggcagccagttaatcggtactcctcccatggagctgaaacaatacttcaaagcctccgttgctcaacggaacctaccggatatgctaacagaactccgccagctccgtaaagaactgaatgaattaaaacaacaaataaataagtaacaaatgttgaaacaaaagactctgaaagacagtttttccctcagtggtaaaggccttcacacgggacttgacctgaccgttactttcaatcctgctccggacaaccacggatataaaatccagcgcatcgacgtggagggacaacctatcattgatgcggttgcggacaatgtgactgaaaccactcgcggcaccgtcctttccaagaatggtgtgaaggttagcactgtagagcacggcatggcagccctttacgccttaggcatagacaactgcctgatacaagtcaacggtcctgagtttcccattctggacggtagcgcccaatattatgcacaagaaatagagcgcgtaggtacagaagaacaaaatgccgttaaagatttctatatcatcaagtcaaaaatcgagtttcgcgatgaaaagaccggttcttccattatcgtgttgcccgacgagaacttcagtctgaatgtactggtatcttacgactcgaccatcattcccaatcagtttgcaacgctggaggatatgtcgaaattccgagatgaagtagccggcagccgtacattcgtattcgtacgcgagatcgaaccactgttgcaggccggtcttatcaaaggcggtgatttggacaatgccatcgttatctacgaacgagaaatgtctcaggaagacttcgataagttggccgatgtgatgggagttccccacatggatgccaagcaactgggttatatcaaccacaaaccgctggtatgggccaatgaatgtgcccgtcataaactgctcgacgtaatcggtgacttggctttgataggcaaacctatcaagggacgtatcatcgctacacgtccgggacataccattaataacaagttcgcccgccagatgcgtaaggaaatccgcctgcatgatatacaggctccgacttacgactgtaaccgcgaacccgtcatggatgtaaaccgtatccgcgaactgttgccacaccgttacccattccaattggtagacaaggtgattgaaataggtgccaattatattgtaggcgtgaagaatatcactgccaacgagcctttcttccaggggcacttcccacaggaaccggtaatgccgggtgtgttgcaggttgaagctatggcacaggtaggcggtctgcttgtattgaactccgtagacgaacccgaacgctactctacctacttcatgaagatagatggtgtgaagttccgtcaaaaggtagtgccgggtgacacccttatcttccgcgtagaactgcttgcacctatccgccgtggcatttccacgatgaaaggttatgcgttcgtaggcgagaaagtggtttgcgaggcagagtttatggcacaaatagttaagaacaagtaaaaggatttatgatttaagatttattcgtggctaataataagcgcgaatatctcataaattataaatcataaatcataaatcagcatgataagtcccttagcgtatattcatcccgaggcaaaaatcggggaaaacgtagagattgctccttttgtattcatcgacaagaatgtggtaatcggcgataacaacaagattatggcaaatgccaacattctgtacggttcacgtatcggcaatggaaatactatttttccgggagctgttatcggtgccatccctcaggacctgaaatttcagggagaagagagtaccgctgaaattggtgacaacaataccattcgtgaaaatgttaccatcaatcgcggtacagctgccaaaggcagaaccattatcggtaacaacaacctgttgatggaaggtgtgcacgtagctcatgatgcccttgtcggtaattactgtatcattggtaactctactaaaatggcaggtgagattgtaatagacgatttttccattatcagtgccaatgtattaatgcatcagttctgccgtgtaggtggatacggaatgatacaaggaggttgccgtttcagtaaggatattccgccgtacatcattgcaggccgggaaccgattgcttacagcggtatcaacattatcgggttgcgtcgtcgcggattctccaatgaaaccattgagaatatacacaacgcataccgtatcatttatcagagtggattgaacacttcagacgcattaaagaaaatagaagaagaaattccgacgagcccggaaatcgaatacattgtcagcttcatccgtgactccgaacgtggtattattagatgataaaacgataaagtaattagaatatgatatacagatttacacttatctccgatgaagtggacgacttcgtaagagaaatacaaattgacccggaagctacattctacgacttccatgaggctatagtgaagtcagtaggttatactaacgaccagatgacttctttcttcatctgtgatgatgattgggaaaaagaaaaggaaattacactggaagagatggatgacaatccggagatggacagttgggtaatgaaagacaccactatcagcgaactgatagaagatgaaaagcagaagttactctatgtgttcgactacatgacagaacgctgtttcttcattgaactctccgagatcattaccggaaaagaaatgaaaggtgccaagtgtaccaagaaggaaggtgatgctccgaaacagacaattgacttcgaagaaatggcagccaacagcggatcgcttgatctggatgaaaacttctatggagaccaagactttgatctggaagaattcgaccaggaaggtttcgatatgggcggaggcgaaggtagcacagcaccgttcgaggaagaaaagttctaatattattttaaatttttcatccgcagataacgcggataacacagatttgaaagacttaagcctagaagagatctgcgttatccgcgttatctgcagatgggaaatgattctctaaataccatttccttatgaaaaccctgatagtgcttattggaccgaccggagtaggaaagaccgaactcagcctgcggctggcagagcattaccaaacttgcatcgtttccgcagactcccggcaactctatgccgacttgaaaatagggacagcagcccctacccccgagcaactgcaacgcgtgaaacattaccttgtaggaaccttgcaactcaccgattattacagtgccgcccaatatgaagcggaagtactgaaacttctggaaaccttatttaccgaacaggatacagtattgcttaccggtggctctatgatgtatgtggatgccgtttgcaaaggcattgacgatattccgaccgtagatgctgaaacacgccaagtgatgctacataagtatgaaacggaaggtctggaaagattgtgcgcagagctaaagttactcgatcccgaatactacaaaatagtagacctgaagaatcctaaacgcgtaatccatgcactggagatatgctatatgacagggaagacctacacctcattccgtacacaacagaaaaaagaacgccccttccgcatcatcaaaataggattgacgtgcgaccgggaagaactttacgaccgcattaaccgacgggtagagattatgatagaggatggcttggaagaagaagccagaaaggtatatccttatcgggcacttaattcattgaatacggtaggttataaagagatgttcaaatatctcgacggagaatggaccttgccttttgccatagagaaaatacaacagaactcccgcatctattcacgcaagcagatgacatggttcaagagagatgaagaaatccgttggttccatccgaaacaagaaacggagatactggcgtacctccgttcggtaatgtaagttctattctgattccagtaaactctgatagatcattctgatggatgattccagttcatcatacagcttcggtattgcttggatatcgaggcttccttttttgtaccactcttccagcaatggcttcgtcgtacggaagacttcatcttctgccgcagtaatcgctgtcatataaccgtcacctttctcaggactatacaatctttcccaattcagataacgtccggtacccattccctgcttatagctgaaaactctgtctgccaaacgaagtgaccaatcaatgagcggagctgcctcatgttctttaccgaaacgtaccattccgggaagaagtttaccggcatctttcacccacagtggcacagctataccggtaggaggataacctaacagtgtccacatggtagtcagttcggctttctcacccggttttacaccttgtaccactaccgaacacgatgtactgctacgcggaatgaaatcctgatctacaaaccaacccgacgcctgaggacgattatatgccccgctacgcaaatcaatatccagcatacggttacggaacgaacgcgataaatcattgaaaataaactgtggggtaatgctacccgtagccgaagctttcatcagcacctggtctgcttccatatagcgcacataaccggcaccctcgttcaccttaccagcaaaagaaaagttggtacgggcaatataaccataaggagcgtccttcgggttattggcatcatacatcacatatttatgataatctacctcaaacatagctgccccgccttgtgcatcgattacaccaaaattagcttcgatatcgctgggcttggaaatggtatccagaaaatgacagaaatcctctaccgttgcacaaacttcgagtgcacgataaataacacgcccattggctgcccctcgctcttcatcgccctttacatccaccagattatatgattgtgtattcatcaaagcaaatcctgcagagttagtccccatccatgcttctttcagatatgcattggcgctattcactacagcaataaaattatacttctcgcctttcacataatcaatatggtttcgcataaagtccgtatcacggtttttccaaagcagggggcgaccgtcgggtgttactttacccgatacaacagcagaagtacaggcttgcacaggagtagtgaacaaaacgattgctaccgcacacaggattaataaggatatttgtttcaacataagccatcaggtatttgggaagttgatacaaaaataagattttctactaaagaaatattcaaaaagatcagaattatttagttccggttgaatatctcaacaggatttattacttttgaacgcaactaaaaagtacagtactatgaaaccacttattccactggcaatatttatattcattctcacagtcagttcttgcactacggcacctaacttccgaatagatgctacaacgcagggaatacaaatcggagacacacttattcttacccaccatctactgccggactggaaagaaggcgaccgtgatactttcatagcaacaaaagaaggaaaattttctttctgcaaacagacggatgagacaaagctttacatcataacctaccatccttctcaaacggaacctttaagatattgcaatcgtggctttgtattttatgctcgtccgggcgatcatctgaaagtaaaggggaatgtagagttctttcctgccatgcacaaggagggcggaatgtatgatgatccacgtttgcaacgcatcctgaccctaaaagacagtataactgtggaacaaaacaagatatatcgtaaactatactattttgcaaacctgcgaggcaccccacaggccaatcccgactcagtgatatattatagcaaaacatacaatcaatgtcgttccagtgaactgagtgaagctcttaaagaattccgcaatacagcagatgatagtgaatatgccgctttagaatacttacaagctgtaaataaagtctcttattcggaagcagcagaaagatttactcattttactcctgaaatcaaatcatcggccatcggaagaaaactagaacaattactccaagtaatgaaaaacatagaaccggggaatattccaagcgaatttagcgtaatcacttccgatagtacccgtgtttctttatccgattatcgtggtaaatatttacttatttatcattggggatatggatgtcccggaactacctgggtgcatccgcgattactgaaactatatgaagaatatcatgataaaggctttgaaatcttaggattcactggcgataagcaaccagaaaatctctctcaaggctcagaagcagcttcactgttttacccaccctggcctacagtatacacaacacaaaaggaaaataactttatagtcaatgactattactttattggattccctatcctgatggttatctcacctgaaggaaaaacccttctgaggggatatagcgacatctatcaacccctcagagaattattggaaaaggaaattagataagtgaaaaacaccaattatttttattcatattctccccttaggaaaatcattggtttaatataaatttccagtattccgtctgcaccggtcttcacttccatttgctcaatactcgtttgatacgcagtactggccggaacttctttaccgtcaatatagtaacgcgcattcctcctgttcactccctttggcttgagaaaatcatctattttcttaatgtttttttcctcctttacctgttgtggagttttcaacttcagaataatgaccccatttattccacgtgtgccataaatggcagtagctgaagcatctttcaaaacttcaagactttcaatatgcgcggggttcaatgctgcaaaaatctcatagggaagttccattccatttactataaataaaggctcatcagatggaataggaatgcgatctctaataacgaatgtgccatttttcttcggagactgcggcacaatggtatcattcttcaaagtatctttgaaaagtacaagctcctttgtagaaggggcttcagcatgaatagatatagcggcagacatcactaataatagaaatactccccaaaagaagctatatccctggtgaatttgttttccttgtctcatagcattatcttttaagtgatagaatactaaaccgtctcaaacaaaaatacttaaaagtaatgatttaaacaaagaaataagaaacaaagttgattattcagctgataattcctttagtctatcaagcaaataggcccgtttac

SEQ ID NO: 6303 - DNA, 70956 bp, Unknown
  gut microbiota DNA sequence
cgggcttgggaaagtctgggctttgcgcataaaaaaaggttgtgccagcattttgacacaacctcataattttagcgtcggttcttgagtcgggttatgacctccttgatggacggcaaaaatttgctccaatagacaatcgctgcatcgtatccgccgctttccactttttgctcggcagtaagaatatacaatactgcgccaccgacaggtgtggaattatggtaaaaccgttctcgctcgtctttaaagaagtctgttttacttcctaagaagccaacagtcttcccaacaagattaagattcaggttgtctgttttgaaaacataatttaaatatcttccctcgtactcattaagtatcaaaaagctatctatccccattttgtctatatgagttaatagctctgtaggaatttctgcgaaatcacgaacttgtcgttggagaacttcttgttctatattattatttgaattacagattagaattgaagaacaacatagcctaagcaatcctaaacatattattactaataacttattcatattgtttcaatatttaaggtctttgatataaatacggattgccttttttgccaagataaccaaaagcaccgctggtgaaatcgtaagagaaagctccgaaacttacagatataggcgtttgtccatccgtataggcccatgtccctatggaatttgtcaatgaggacgctgttataccagccgtattagccatcggaatatctgaacccactacagctccaccgacatatccgcttactccacctataacagccccagcaaacatacatccccatgtcttaccggagttataatcccatttggtcgggttaaactgtcccttattagtgattacaccacccgaataagtgcctataatagctcctattatcactggtataaaccaaactatttctccattcggatccgtatatattaatggattgtttaagcaataagtataccgattgaaattttgtgagaaatccggcatctgtatatacggatcagggcttaggaaacgtcctaatgccggatcgtatagccgggcattcatattaatcaaatcaaagaccgcaagatgttcgtgcccggtatatcctctgcctaaaaaaaaatccggttcacttccttgtgtataaatagcttgtgtagctggatttcgcagtttcccccaggcgtcataactcaattctttttgtgcttctaataactcttgttttaattcgtccttttctgattgtgcaacctgcaattgtgtctctaaaaaatgaatatgttttgtgtttttctcgatgaatttaatacttttctgatattgcctttcttttatttcttgcagtcgcctttgctgttctttcttttgttctctctttcgctttgtatattgtgaataaagtaggaaacttgttattgatagtataagtatgaagatgagacctattacctttgcttcttgtttggcgtttatatccttgagtttttgattttctttttctctcaattgatagttgtacaaagattgcattttacgtatggtttccgtatcagtctgtttctttatggagtctgtatacgctaaatataaatcaacataatctaatgcctctttatataggtgattctgtttgcatatgttgcttaaaccttcataacctccttgtttagtatagtaattgtcgaattctaataatttgtgataatagtaataggctgaatcttgattattcatcttaaagtataagtcggctattgtggagatgcgagatgctaaattccttttttcctttgcctgcatagaaatgcgaattgcttcttcagcttgagagtacatccctaattgtgtgtagagactggcaagttctcctgaaataatggttgtcagatgtttgttctttatctctcttgcctgcttatatgcgttttcatagtagaaaagagaactgtcggcattattatatcctgtaaatgtacgccctatatcgcgtaaactgtatatttgtccaatactgtcattcgataaaatgtcataattatagcttttcttgaaaacggataatgcttcattgtatactctttggtatagatacaatgttcccatttggctatagattctactgattaacttataatccttgctgctttgtgaaacatccaaggctttttgatagtaatccaatgcttgcggtgcatctcctaaatctctgtaaacacgcccggcataataataggcctctggaagatgctttttttctcctttttgttcgtaatattttaatatttggagtatactgctatctgaagtatgggtaatataagctttgtctttagcttttagacatatcaactgatagtacatttgtgtttgtttattttcggctgcaatcttttctttcattgctgttagtatggctattgcactgtccggattcacgcttgagagagaatctgccgatattaacgtttggggataagatcggttttcgcatccacaaaaacaatgtagcaagatgatagataacagatatatttgtagtaatgccccttgttttataacttttataaattatatcacaaatttacatgtttattttaagtgagaagctaaaaacggatagtttatttaaggtaaaagtatcatttgatctcatttaacctagagcgacgaaaaactactacgtagtaaatactaaactacctgtaagtaggtgggcacttactgcgtagtagtttactaactgcttgtaggtggttcgggatatctttttgccgtacctgagatgcacttgctccgtaccaaagccgtactttcttcgttcagagctacttctgacagaagaatatacggagcaagtacggctcagatacggttcgggtatggttcagatattagcttgttacaaataaatttcctcttttcttttggaatcttcccgaatttcatgttactttgttatcagttgaactttaatactaagaacacattatgggaaagagtaagaaaaaggttatgcatagccgtaaggaagaagaacaagctaagaaagtgttgttgattattggtgtatctgcattgatactggtgctggtgatgctgataggatactcgttcttagggaaataactaatagatgtcgcaagaaatagaacggaaattcctcgtgacgggggagtacaaatcgagggcgtatgaacaaagccgtattgtacaaggttatatcagtagtgcaagaggccggaccgtgcgggtgcgcatccgtaacggaaagggatatcttacgataaaaggtgcttccgatgcctcgggactcagccgatatgagtgggaaaaagagattccattgaatgaagcggaggaactgatgaaactttgtgaaccgggtgttattgataaaactcgttatctggtgcgcagcggacggcatacgtttgaggtggatgagttctacggtgaaaatgaaggtttggtagttgctgaagtggaattgacttcggaagacgaggcttttgaaaaaccggatttcatagggcgggaagtaacaggcgacgtccgttactataactcgcaactgatgaagcatccatacaccgtttggtaaggccttaataccctgtcaacaagaagttaagagtttgtcaacaaggagttaacttcttgttgacaggaagttaactccttgcaaatggttgctaatcaagtatattcagaggacgaaatggagaaactttatgaatacctgcctagagaactggtgacctttgtattggtgactttgttttctttattaataggactttcacagcggaaaatcagtttgaagcgcgaaggggagacaacgttattcggtacggaccgcacgttcacttttataggtattttggggtacctgctttatattcttgatccggtggattaccgcttgtttatgggcggtggcgctatattgggactgctgctgggattgaactattacgttaaacaatctcagttccatgtattcggggttaccaccattattatcgcactcatcacttattgtattgctcctattgtagccacacaaccctcttggttttacgtgatggtggttgtgacggtattgctctttaccgaattgaagcatacttttacagaactcgcacagcgcatgaagaatgacgagatgattactctcgccaagttcctcgctatcagtggcattatcttaccgatgttgccgaatgaaaatctgatacccgacattaatttgactccttataccgtctggttggctacggtagttgtatccggtatctcttatttgtcttatctgctgaggcgatatgtatttcatgagtccggtattctggtatccggtattataggtggtttgtatagcagtacggcaactatttctgttctggcacgtaagagtcgcaaggcacctgcacaggaggcgccggaatatgccgcagcaatgttgttggcagtgagtatgatgtttcttcgtttccttatactaataggcatattcagtaaggcgattcttgcggaaatttatccatacctccttataatgtccttcgttacggcgggagtggcctggtatctgcatcggaagcgtaagtcgattccggtgacgggcgaagaagctgaagaagaagatagcagtaacccgttggaatttaaagttgcactgatttttgccgttctgtttgtgatattcaccattgtgacacattatactttgatttataccggtacgggtggattgaatgtcttgtcgttcattgccgggttgagtgatatcactccatttattctgaacctgctgcaaggttcgggtgttgccgttgtggtggtgacagcttgttgtatgcaggctatcgtgagcaatattgccgtgaatatgtgctatgcgttgttctttgccggtgggaagagtccgttgcgccggtgggtactgcgtgggtttggcggtgtgattgcagtgaatgtctgcctgctactttttttctatttgctataaattccgcaagaacgcttacaaatattctctctaatcccttttctttgtgcttttttaactccgaaaatctcgtaggtaaagaaaaagaggctatttttgccgcactcgtgtgataaaaaggcaacaatgtacgtctaatacaaaaacagtcaactaatattcatcaaacaaactaaaacagaaatgaaaattaaatgccctttgctgcttataatgttggtaatatcctcattggtagcggcacagaatgcggcacctccatttcagattaaaggagtcttactggattctttgactcaagagggagaaccttatgccacaatcaaaatcgtaaaaaaagaagcgcctgcccatgcattgaaaatgctggtaacagacatgaaaggtaagtttcaggaaaaggttccggggacgggtgatttcgtgatgacgatttcttctatcggtagaaataccattgtgaaagattttactgtgaaagcaggagagaaaattgttgatttcggtacgctgtatattacagatgcgtccaatgagcttggacaagtagaggtggtagctcaaaaaccactggtgaaagctgatattgacaagatagaatataatgtacaggatgatcctgattcaaagtcaaactctgtattggaaatgcttcgtaaagtgcctttggttactgtagatggcgaagataatattaaggtgaacggtagtagcagctttaaggtgtatgtgaatggtaaacctaacaatatgatgagtaataatccgacggaagtactgaaaagtatgcccgccaattctatcaaacatatcgaggttattactaatcctggtcctaagtatgacgctgaaggtgtaggggggatcctgaatattgtcactgtaggtagcggactggaagggtatacggctacatttagtggaaacgttagtaacatgggggctggtggtggcctgttcggtacaattaagagtggtaagttgacgataagtgctcgttataattataattataatgagcgtccgcgtagctattctggtggtactcgtcgtacagtaggcgacataaccgacggttcttcagatttagattatagtggcgatagtaaagggcatggtaatttccagtccggcagcatggaagccagttatgaaattgatactttgcgtttgataaccatgtcgttcggactttggggtggcggaaataacagcaatggactgagtaatacttttgcaacgatgcccggtaccggtgatgatctgtatcaatatgtatcgaacaatagaagcaaaagttcctggtattctattgatggtggcattgactaccaacgtatgtttcatgtaaaagatcgtatgttgaccttctcttataaaatcaataccagaccggaaagttcggattcatactccacttatgattatgatatggaggatgtagctccggattggcaggattttatgaaacgtatgaaaaatcagcataatgatggatcccagaatactactgaacatactttccaggctgattatacgacgcctatcggcaagatacatactcttgaagccggtgcgaaatatattctccgtgataattcttcggaagatgatcgttatgaacaagcgtcagcaactcaagctgattatgagtttgacaatgatcacagttcgcattataaacaccagaatgacattttggctgcataccttggatatggactgaaagtgaagaagatttccggaagacttggtgtgcgttatgagcatacgaagcaggaggtgaaatatctgctgggtaagggagataactttgataagaattttgatgatttagttccttctgcaagtattggctataagctgacagatatgtctaatcttcgttttggttataatatgcgtatttaccgtccggggatctggtatttgaatccttatctggacgatagtaatcctacaaatataagccagggtaactctcatctggatagtgagaagagtcattcgtttaacttgagttacagcaacttcacgcagaagtttaatatcaatctttcagcccgctatagctttaccaataatagtattgaacgggtaacagaacaggtgaaggatacagaaattttcggtctgcaaaatcctacaggtaaagaagtgctttattctacttatcagaatataggtaagagcaggaatgccagcctaagtggttatatcaactggaatgctacctccaatacacgtatctatgcaaacctttatggtaactatacttatttggaaggcgccaatggattgaagaatgacggttggaatttgtttgcttatggtggcgctcagcagtctttgcctcacgattggcgtatcagtctgaatatttatggtcagacgccttggatcatgttgcagggaaaggggagcagtttctttgactacggattgagtgtaaacaaatcattcttgaagaagcgtctgaccttgtcagcatttgctagcaatttctttaagaaatatcagcatccgacttcaagtatagaaggtgtaggctttatacaggatagttggaataaatatactcgtcagcgttttggcgtaagtattagctatcgcatcggtgagttgaaagccagtgtgaagaaagccgcgcgtaccatcagcaatgatgatgtgaagagtagcggtggtgaaggtggcggtggcggagaataatctgcccgtactttcctgaattatttttcatccgcagatggcgcggataacgcagatttacgattaatgaagtctgcattatccgtgacgtcggcggatgaactgttttctataagggatattccagacaagtcactgtaccatccattgtcatgactatgattttcccttttcctgcattctttagtgaagttattgccgaatgggagattttgtgtgaccaggcaatgccgcttccgtctgtccgcacggcatggagaacaccaaattcagtaggaatgaacaccagttgttcagttgtttccatacgggtggggatgaagttgctttcgtagggcattgatgtattccaaagactggtataggtgccgtgagatatatccgcagcggtgatgttgttcttgattcctttcacatacattgtttttccatccggtgagaagccgagggactcgcgtcctttcacttcatcggaagcccaaaagatttctcccgtcccgggatggaatgagcggacgaaatagtcggagctgagaactatgacttgttcattcgtctttccttgccgcgtatacggcagtactaccggccagcaggcacccggtgagaaatatctgcctcgtttggtgtcgaactcccatattttctccccactcctgcggtcgatggcatagaacatcgctccccaagtgcctatatatacgcgctccttatccacagccgggcgtgattcgatgtagccttgcagaccattacaagtccagttcagtgttccgtctgtcagctttaaagagtagaatttaccgttgctgctgccgatgtagactgtaccttcggttacgacagggcacgctacaatggggtaattagtattgtatttccatcgcactgtgccctgctttctgtcaagggcatagatgaaaccatcacaggaagagacaatgacaagttttggggtgataaatggggctgaaaatatcttgtttccggtggtataggtccacagggttttgccgttcttggcattaagggcatggacaacaccggctgtattggtgtaaacgtacaagttaccgtctatgcttccctgcgaagcgatatcggtcacatccttcaatttccaggtttcgcgtaccgaaggataagtagcattgatagcgaaatccggacgataataagtggtatcctttttctcctgcaaaggtgccagatgaatcgtattccatacagggcgggtttctgttttgatgatgcgttcatggaactctaatgtattgccgcgaagtgtgaccaggttatatccgcctatcggatcttttctgcgcagggacgaacggccgattacggcgggaataccttcggcatcataagcacggttcacgtgtaggtgtccgccgagtattgcctggatattgcgcgctttaaggatgtcgacaacttcgtaccagttactcagatcctgatcgatagggaagtgattgatgaaaataatgggttgttctgccggagtggcgcgaacgatagaatcgagccacagaatttcttcgcggggaatgtgaggtggtcccatacgcagacttgggccggcgccacagccgatgaaacgtactccctgccagtcgtaacagaaatgggaggcttggaaaatcttgtcgaacatagtgcatccgttttcactccagtttacatcatggttgccggggatgagaaaataaggtttccggaagttcttcagaatgtcttgcagcagataaaattccttggtgtcaccgaattcagtgacatcgccgctgaggatggtgaaggcaacgtcaggattggcattgatgtcttcaatggattgccgcaggtcgtcttcggcataggcgaaagaattgagatgtacatcactgagccatgcgaaagtgaaggctcgttcgttgctgccttgtccgtaggaaaggagagacagcgctatcacacagatagccaataaaattcttttcatgattctttgggggtattagtaagtgttatacccccaaagataaagagttttagtggaataaccagcgctcatagtccaccttttcgtaaagtggtgcaatggttacttctgtattcgcgtctttctttccaagcaggaacttgtcgacaaacgcttctacttcaggatactggctttcgggtagctggcagtgcccatgtccgcctacgatggagaagcccattctgtcggcaatgccgaaggtttcccatactttacgggcagcacggcaggagacataacccgattcatcagccagccatacatagtccgggtttccgagtaccagaagtgcacgcggtgctaccatggcacacagttcgtggtggtcatatggcaatttcgatacattatcttctttatactggaacatactttctttaaaccaggcatgactggttcttcccaaagtttccacttcacctagcgtttcggaaacacgccatgctgccgcaccgccaccacccggttcctgagcaatggtcagtgcaatacgctcatcgaatgctccggcaaaaagagccattttcccggcgaaggaacaaccggatatggccagtcgtttggtatctatcttgctctttttacctacgatttccaatccgtcaatgatacggctcactccccaggaccaggcgcaataggctcccatgtctgtacggtcaggataaagtttgttgataggctcgttgccgcgcttttgtgtgtgcgacatgacttgtgtgaagttgaatgcgatttgtgctatattgcggctcgtgaagatggcgggaggaagactacccgtgcctctgcctattccaatgatggctgggaaagggcctttacctgccggataagtaatttttgctttcagggtgagcgtctgtccgttcactgttacatttactctgagggtatcatccacgatatccgcggtaatgtcttttttcgacacgacgggtttctcgccgatttcgtagtgttctatttcgcgggctatctctgcacgccgtcggctccagtccttgaagttggttgaacggccactgccatcggaccattggaagggatcggtcagtgtttttaccaccggcagttcgttgatacccggcaacacgggtgcaggattctttattcccgtattttccacagtgtagactaaggggattttctgtgcaaatgtggaaatgcccatacccatgttcagcagaacaatcagtacccataaacgtgttttcctgtttttcatgtttctatcttttaagaggtttacatctgttggcaaagatagacgatgttttttttaaccggttagtaggatgttacagatacttttcatggtgttacataattagagaaatagatttcttttttattaatctatattcaaaaagtactcattcaggttctgtgtaggtctcagatcgagcttctttcgcaatcggtaccggttattctctactgcacgaaccgaaaggttcattaatgaggcaatatccttagtctccatattcagcttgaggcaggcacagagacgcaagtcattgttggtcagctgcggatgcgcctctttcaaccgtttgaagaagttgcggtgcttctgttcgaacttgataaggaacattttccagtcatcttccgtatcgaggttattggcaagcaacgtatttattttctgataaagaggtaataaggctttctgcgtattacgggagcaaatctcatctaccatctctttcagtttcaggataagttcgttcttgtggatgatgaaagaggtctgttcctgaattcactctatttgaccaaagtattttactttggtcgtatcattagtggggatctcatgagaatatttacgcttgtattctttgttatttaataatttttttataacttgctagtgtttattaattaattcaaatgcagagctaatctcattgttctttaatgtgatatgggtatggtgtttgagaatgtagaaacgatagaaaatgacctgttttattatagaattcatatattaataaactaaatgtcataaaggtgtgtaatagaggagcgatcgtaaaaaggattggtatggcgtatttgttacattgagaatatatttatgtagtataacctttaaatttttattattatgaaacatgtatctattttcttcgttgttttatctgtttttattaattattcatgtacagatgaaagtcaaagcaatttattgaatttagaaactgatgtgtcagtgactactaagtccttgaaccctttggattttgaacaagattgggaaaatcaaacatctattcaattgacggataataagatttatgatttgccttgggtagaatatgctcctacgagtatagtctataatacaagaatggatataaagaagcaagatggttggatgtttttaagtactcccagtaaagataatggtagtgattatctaatcttctataataaatacactggtattttaaaagtcttttattataataggagttctttcttaaataataatgctgtttgggagttctttgatgaaaagtattatggttacttcaaccagggaactacgtttacggcaccattggatcgaacttcaattcagcgtgtgggcgttaattgtttgagtaataacactactttgggtattgatcaaggttggaattgttttcaaataccgctaacatatacaggacaagctgatggaaacataaatgtttattcgaaagtgttaaacatatctgagctgacacttacggggaattataaggatacaacaacaggtactattgttgaagatcattactcttcttctccgaatcttctgcaaaaaggtgcaaattctatagtaaaggcgggtggagatgctgccgagaaatgggtgaaaggagaggctgagaaaagcctaaacaatattccttctggaatttttaggaatattggtaatatggttgctggtggattggctggattagctaaagggggtgttacaggtttgatatctggaggattgaatgctctttttggttcatttctcggttcgaaaaaagttaatgagcccactatacaaacagttgaattatctactaatggaactattgatttgaagggacaaatgattgaaaatagttcggttcctatcttgccgctgacagctataaaatgtgatgaagggtttggagcttggaatttagcatctgcaccaatattagatataacaggaacttatcatgaagtaattgctcggccagatatagcttctgcatataattgcaaatatgcaggaaaatattatacattatcgttccgcccaacatttaatgtagttattaatccatctatagcggatgaaataacttataaagtgcgttataatcttgttgagtttgagggaagtgaatgggatattcaatttaaaaaatattataatattactcctaataattcttatacagtgtattgtgcttatataccaagtaaaagatcaggatatgaatcttttccaacggttattcaaaatgaagagaaaggcacaaaagttgaattagcatactacgactacccaatcattttaaatgatgctaacatttatattggtggtagttcagcatatacagagagtttttcactatattataatacaatcttctcatatatggcatcttataatcgtactgagacaaatagcttcccattgtctataagtaatgcgtattttaatggtaagcctgtgttatatgtagcgaatctaggggttaatgtaactgttactatgactgtaaaaagtaccggtcaggaaataatatcaagtagaacgtatttaccggaatataatgtaaaatttcaatagtttgcttttatatcttgtgctttcggtatgcaaacgttgtcggaagtcaccacagattatacggattaacgcagatgaaaagtgaatagataattattcaaaactgataatctgtgagaatccgtgtaatctgtggtgaaaaaacttttgccgtataggcttttcttatttatttattctgttgagaatcccagtttctgccatccgttttgcacatccggatggctcataaatagtttccataacaggccagtacgatagttctctatcatgacggcaataggcccctgatcgatagcaagatatcgtttgggataccagttctctgtttcggagaaagcatcgtagaaaccataaggaccgaatagcttatcgcccatgtcgtagagatggcgcatcacagcgagcgaatagtccggggtatagacaatggacgaaagagcggctgtaggagagatgactccctggtcatcccgctcgtttggcatgtgggcggcgtatccgttgacggagtagctggcagtcactccccaacagtccggaccgaaacctttgtagtgcttcggatttcggatgcaataagcacggttcacgagagtcagattacgcatttcatcgaaatagctggcgcagtattcatcttttagatgcgtcggatctaatccgaggaaggaataatgtgcccagaagaggggaccagcttcacaaccctgatagcgcaaatgaagttcgatatcttctactttatggggttcgacgatggcgccgttctgtgcccatccctcatgatagacggaggcgggaacgccgtgcgtgggtgaggcagcggcaagcaggtacatgatgagacattcgttgtaaccatgtacggggaagtccattgcccaaccgtattcgggactccaatgccagtagagtacattctggttgccctggcgatagaaattccagtcgacatcacgccaaagggtatcgatgcgtttggcaagtgcctgttcttggggagaaccgttgacgtaatattggtgtacggcaagcagtccttgtataaggaaagctgtttctacgaggtcgccaccgttgtctttctgtccgaaaggctttaccttgccggtgtctccataccaccagtgaggataggcaccgtggaagcggtcggctttttcaaggaaagagactatcttttccatacgtgccagaccttcttcacgagtgatgtagttgcggtcgatacctgaaagtatcgccataatgccgaagccgctaccgccggaagtaatgacgttctggtctttttcggggtagataccatccatgtggatacgctcgggggcaagaccgctgttaggctccgcgccttcccagaagtaattgaaggttcgccgttgaacggtgtccatgagggcatcatcagtaagttgggcggcacttccggtcttggcattcttgcaggctccgaggagaagcaagaagaagaggggaagataggttgttaattgtttcataattaataaggggttagggataataagctgtgagttatttaagtgtcaacttcgccgtcttcacagcctggctgtttccaccgatcatgatgtcaaagtcacccggttcggctacgtagttcaggtcgtaatcatagaagcgaagcagatcacgcgtgatagtgaatgataccgttttgctttctccggcgcgaaggaagattttattgaaacctttcaactcgcgtacagggcgggtgatgcttcctacgaggtcgcggatatagagttgaactacttccgcaccgtcatgtttaccagtattggtgacggtgactacagctgtaacagaaccatcttttcccaatgttggtgtgctcaatgcaatgtcactgtactggaaagtggtatatgacaatccataaccgaagggatacagcggttcgttatccacatccagatagtttgaacggaacttttcgaaccatttgcctgccgccagtggccgaccggtattcttatgattgtagaacaaaggtatctggcccacattcttcgggaaagtcatggttagttttccactcggattgacgtcaccgaacagaacatcgccaatggcataagccgcttcactgcctccgaaccatacattcaggatggcaggtacatgctcctgttcccagttcagcgtcaacggccgaccggtaaagagggttagtactacgggtttacccgttttcagtaaggcttccaacaaggtatgttgtacatcgggcaagccgagttcggtgcggcttgaactttcaccgctcatttcagaggattctcccaaggcagctacgataacatcggcgccggctgcaactttcagtgcttcgtccagtaactcctggtccgtgcgattatcgcggttcaatgaacggccgaacatggtggcacgttcttcgtaagctgcatcgccgatgaggttactacctttggcataggtgatgttaaccttgcctgccatcatttctttcaagccttcgtataaagaaggataatcgttgaggcgtgcggctacgctccaggtgcccggcatgttgctgcgggtatttccgagagggccgatgacggcaactgtaccttgcttcttcaacggaagcacgggggaagcagttacgggtgacgagctatgagctgcgagtggctgtgcggtggcaggggcattcttcagaagaacaaaactttcgccggcaatcttgcgggcgacgtcacgatgctcttttgtgaagatatcccgcttcggacggttcacgtcacagtatttataaggattgtcgaacagtcccagcttgtatttcgcttccaatatccggcggcaggctgtattcaacgtacccattcttacttttccttctttaatggatttcatcagtgtaccgacgaagccctcacttaccatatccatgtccacccctgcattaagagcgagtgcactgacggtttgcaagtcgccgacaccatgctctatcatctctgaaatgcctgtgaagtctgttaccacaaacccttcgaagccccactgaccacgcagcaaatcgctcagcagccatttgtttccggtggcgggaataccgtctatttcattgaatgacgccatcacactacccactccggcctctacggcagcctcatacgggtacatgaattcattgaacatccggttgcggctcatgtctactgtattatagtcgcgtccggcttctccggctccatacagtgcaaagtgttttacgcaagccatgatttcatcgttgcggtgcaattggtcttgcagattggcaccctggtatccgtataccattgcttgtgcgatagctccacccaggaacggatcttctcctgagccttcgctgacacgtccccaacgtgggtcgcggctgatgtctaccatcggactgaatgtccaggaaatgccgtcggcacttgcttcgatggctgcaatacgggcggatttctcgatagccgccatatcccaggtgcaggacaatcccaatggaatggggaagatggtttcgtagccatgtatcacatccatgccgaacagcaggggaataccgaggcgtgatttctctactgccagcttttgcacttcaagaatacggtctacaccttttaggttgaagagtccgcccaccaatcctttttcaatcttttgtgccacgtcgctacttttggcctgtcccgtggtgatgtctcccgtgacgggtaggttcaattgtccgattttctcttccacggtcatcttcttcatcagtgcgtcgataaagcgatccatgtcttgcggtgacttttgagcctgtgccgccgctatgctcattaaagcgctgatcagcaacaggcttgttcttttgagtattttcttcatatctttttatttatataagttagagtccggtaaggagatactttgcgtttgtttgtttctccagttggaactaccagtttcaagcgatgaaactgccggtttctcggtgtgaaactgagagtttcaaggcatgaaaccaatggtttcacaccgagaaacttttagtcacctgccggcatctttctgatatcccctatttaattcctaattgattaataatcggggttttgtatcaatacaccgtttgatttatctatctctgtttgcggcaatggcagcagtgcgtttttaggctgatagttctttccggcagcctgaagcacttcttgtgcgataccccaacgtacgaggtcatagaaacggtcgggttctaatcccaactctacgcggcgttcgtgacggatagcttcacgcaatacactctgatccagagactctactttaggaagtacattggtcagtgtgccgcgggcatgtgcgcgtacttgttccagataaccgcttgcttcgcccatcaaacctttttcgttggcagactcggcagccatcaacagcacgtccgggtaacggatcaggcggatatttacccagaagcccatgcgggtatacttgcggcgcaaggctgggtcggtgtatgctttcttgttgaagtaagcgcccatggcggtagatacgggcgattcgccatagggtgtattagtgttttccggtgtgataggctcgtcatcgctgtggcggaagtaaagcagtgtagcattcttacgcggatcgctcggttcgtaagctttacccatcagggtggtggccatgtgccagccccatcccaaatcccaatcgcctgctccgcgcacaccctgtacttggcagaattggctgccgatactaccatcttctttcatggcatcggtggcttcacattgcagttcgaagatactttcaccacagttctcaccttctacggtgaagactttatctaccggagtattcaggttataaatgccggagttgattacttcggtagaggctgtatacatattgtcccaatcgttacgcatcatgtaggtgcgtgcgtgcagggaacgtgcggcaccccaggtgagtcgtcccgtgtagtcgctatcccatctcaagggcagacacttttcggcctcggtcaggtctttgtcaatctgttcgtatatcttttcggcagtggtcttggggacgttggcgtcggaggcttccactactttgatagtcaccaaaggtacttcgccaaaggcacgtaccaggttaaagtagcagtaggcacggaagaagagggcttcaccacggttgcggatggattcggtgtcgtccttatgatcgctgttggcgatgtcgtctaagatttcattacattggtagatgattttgtagttctgaccccagtaggcgcctagcggaccattggaggctgtgtactcgaaatcatcccacatggcagcttcattgccaccgtcaccggcatcactacctttctcggaatcctcgctgcgcaccatgtgcaccatgaaagcgggaatacctgcggtgatgtcatacgaacgcatcaggtagtaaacgttgaatatctttccgcctacaagggcgttaggattgtcgtcttccgtgaactgtcccagcgggtcgcggtccaggaagtcattacaagaactgaatgagagggcggttgcaccaatcaacagggataggatatatttctttatcttcatattctttggttattatggttattataatactatcttaattcccctcctcctcggaggaggagaattgggatactctgttgtatttatttcctttagaacgttaagttgaatccaaacgtataaatcgccggcatcggataacttccgtcgtctaccccgaaggcgatggccgagccacccagttcaggcgtatatccggtgttatgcttccatgttttcaggttttggatattcacataaagtttcaatgcctgcataccgatcttggaaatcagcgccttatcaaagttgtaagccagtgatacgttgcggatgcggaagaacgagccgtcttctatataatattcggaattcatattgttgatggtatgcttcgtgttcagcaacggctgggtattgctggtaccctctccatgccaacgatccatgcgttgtgccatgaagttgaactggctccagttgtagttatcccaggtacggtaaatctggttaccgccttgtcccatcatatctactgccaactcccagtttttataacctactccgagagtgatgccataagtaacattaggagtcgggtcaccaatcatggtacggtcggcggtggtgatttcaccgtcaccgttcacatctttaaacttcaagtcacccggagtgacggttgcaagcgtatttttcggtgaactgttaatctcttcctgagtctggtaaacaccttctactttgtaaccatagaagtagccgataggataacctgccattgtataactttggctcttatctccggcaatgatggagtatccatcctgtacaaggcttaataccttgttcttaattgtagtcaggttggccccgacgttataattccagtcgccgatctggtcgcgccagctcagtgcaagttccacacccaggttttcgatagatcccaggttaccgatgcccggcacggttcctgagataccgggaacttctgccagcaggtccttagttttcttcttgtaatatacaccttcaaagtgcagacggttgcggaagaagttggcttcggcacctacttcccatgcttctactttttcccaacgcaggttcgggttagggagataggcaagctgatagcccggataaatggcggacggagtaccgaatactgcggaataggcattgctcagcaaaggctctgccggataggctctatccaggttttggttacccagggtaccccatgatcctttcagtttcaacatatccagccattcgatacctttcatccattcctcttcgctcatcaaccaacccagacctacggagtagaaattctgccattggtttcctgtataagagaaagcggaagaaccgtcgcggcggtaggagccgttgaacaggtatttgcctttatagttatagagaatacgtgccagtacagatactgtagaacgttcccattgtgtactaccgttggttgcagtggcggcatcgccgatacttacataccatttgtccggattgtccggaatgaccagtcctacgccttgtgtgcgtccggcattcagattttcgagtttattataataggtggtaaaaccggcggtggctgtcagactatggtcgccccaggagttggtataagtcaacagatagtcgctctgcactttcatctcggtctctttagcctgagtcactccggtcttgccggtgcccaatgtagctatgtcatcctcggcactggcatcatacactttaataatcggtgtgtaagtccgtgtgctgttcgatgcataatccagcgagaacatggctttgaactgaaagtgttgcaggaagtcccattgcccgtatatgttgcccgaaccgcggtagttctctgcttttgtggtatttgccttcagttcaacgtccaccatcggattattcatctgcgctttctggaagccggggagggaggtatacaaaccaaattctttattatacacttctgctaccggagccgcccgcagggcagtggcaacactctttgaatcagccggcaacatacgtgcgccgttaaactggaaacctactttgaagttgtccgtcactttataatcattgctgatgtttaatgtgattttgctgtacttctcgtgcttgatgttcccttgttcgtaggcataacctgcgccgaggtagaagctgtgccggtcggaagcacccgtaatgctgatgttgttgttcgtaatgaatccggtctggaagatttcgtcctgccagttggtgttacctgtccagtccgagaaattatattccggattgccttcatttctcaactgttcgttatacagcagtttgaaaccatcggcatctaccattgcaattttattggtaatggctttgaagccgaacgaaccgttgatgtttacccgtgtctgtccctctttcgctttcttggtggtgatgatgattacaccattggcaccacgcacaccgaagatggcaagtgaggaagggtctttcaagatttccattgactcgatatcctgcgggttcaggaagttgatgttgtcattgaacagtccgtccactacatacaagggcttgtaaccattgatagagtttgtaccgcgtacgcggatttccgggtcggcacctgccttaccggagttgatgatttgtacaccggccactttaccttgcagggcagacagtgggttggcaacaggtttgttggcaatttcatcacctttaatgttggtgatagatcctgtcaggtcacgctttttggcgctaccgtaaccgatgaccactgtttcggcaagcatttgcgagtcttctttcatctgtacattgatgacgctttggttacctactttaatgctttgcttctccatgcctacgtatgagaagtcaagggtggcatttggcggaacttggattgaataatcaccatccagtccggtcactacaccggtattggtgccttgtaccacaatggatacaccaatcaacggttctttaaacgagtcggtaacgacaccggttatggtccgttcctgagaaaatgcggcagtgcctatcagcaggaaacataccgtcaagaatagatttttaagccttagggctctcttcataggagggttcaggtttctcttcattgcattaaatttttatgtgaatgatatattgcatcagaacaatgcaaatgaaaaaaagatttcgaggtcattcaaatcccggttttttaacacaattcctttagcctactatgaattaagcaggttagaaagatacctgcatttcttttgggtgtaagtacaaaaaataatatctttgtattatcgtaatggatgttaccgtaatgactgttgcgataatgatgatttatttattaaaagcatagtttattatgaaattctatgatcgtgaagaagaacaagaattattagagaatatccgtgaagcttccctgcaagagtcgcaaatgactgttctattcggtcggaggcgtattggaaaaacccaattggcgctacagtgtaccgcaggaaatctgactctttatttctttgttgcgcgtaaggcggaaactttgctttgccaggacttcgtagaggaagctgaaaataagttaggattgcctattggcagttatgtttcttttgccaagttattccgtcacttgcttattatctcccgggaacgtccctttaatcttattattgatgaatttcaagactttcagcgtactaacccctctattttcagtgaaatacaaagagagtgggacttgaataaggggacttcaagaatgaaccttattgttagtggttctatctattcgttgatgcaccagatttttgaagatcggaaagagcctcttttctcccgtgccgggcagatgatacatttgaaaccattcaaggtggaggtgttgaaggagatattggccgatcacaatccatcctaccatcccgatgatcttttggcgctttattcatttacaggaggggtagcgtggtacgtcaatctgtttatgacaaataaggcatataccaaggataaaatgattggtttgttggcacgtcccaactctccttttttgaatgaagggaagaatttgcttattgaagagtttggaccggattactccatttacttctctatcttagaatgtatagccggcggagactatactcgtggagaaattgaaaatcgtttgggaaaggcagagattggcggctatttggctaagttggagaaatattattctttgataagtaagaaacgccctattttctctaaggagaactctaaacaagtacgctattgcatagctgataacttccttactttttggtttcgctttatttatcgttatcaagggtatattgaatccggtgcattgaaactggtggaaaatataatccgtcgggattatgatgtcttttcaggaagtatgctggagcgctatttccgtgataaatttatgcaatctggtttatatactgatattggtatgtactggaatcgaaaaggagaaaatgaaatcgatcttattacattgaatgatttggataagacggctgccatttacgagataaaaagagatgaatctcggtatagcattaccaaactggaagagaaagtgacaagtctattggaggcggaaaaggaattgaaaaaatatagtcttgatttagggaagctctcattgcgggatatgtagaaaagttagttgccggaagaaaagatgtcaccgaatttgtcaccgaattaatatctgtatttcttgaagtattgaattgtaaacaaagaaaaagccttcggaaactaattccaaaggctttctcttcttacattttaaccgtattttaaatactgtgcgggtgataggactcgaacctacacgcctctcggcaccagatcctaagtctggcgcggctgccaattacgccacacccgcagtggctttcttgttaagcggtggcaaagatagaaagttttttctttctggcaaatagtttggcatagaaagtgtttattgaactacttttaagagttcccgtgcccgttctataatggcatcacttttggtatcatcctcatccatatctactttctcgtccggatcaatgccgaattcgatatgttgtttgtctgcatccaggtgggggctggcggagaaacgtacaccccaaccattcggaagctctgaagagaaaggtaatcccgaaccgccaccggttttgtcacctaccagagtaacgttaggaaaatagcgcatcgcatttacgaaatcatttgttgcgctataagagtgacggttgatgagaagcattactggtttttgccaacggatgctattggagggctccaaataaatgggtttgggatcagagaagtcactgtgtcccttcccggtcttatgctggatatatcccgtcaacactttctcattagtgaagcgggccgctatacgctctgaattggtcagatttccgccaccattgttgcgaacatccagaatcaggccactacatggagcaaggtaagaaagtacctcatccagattgccgttaccgacaccactggagaatgattcataatagatatatccgatattgtcatccagaatcttatatttcatgccggcagcgatgcggtacgtctttccgagatattgccgttcgataataccttcgttgaagtttcggggataatccagataccagtcccagtaacgggccacatttgaagaactgtacagattcacatgaccgtctttcagttccgccagcatactgtcaagcacttggaacaatccgtcattacccatgttggacgtaatgagaggttggtatttatcatggatggcatcccagtctatttgtttgtaatccaggaaacagtattgctcgtcaatgatcttccacaaagcttcgaagtttccctgtggtgaattgttgaactcttcctcccggatacagctggatagcaaaggcagtatcatgagtgctactcccagccatctaaacttactatgatatatttcttttattcccattattctatccccttatcacgatgttatcgctttatcactttattttttcttcttgtcacgaatgagaaacaattcttttacgaaacctaccataaacacatgcgaataggtatgcgtctttatatcatttaccttggactgttgcgcatcccagagataggctaaacgcattttggctcttcctaccgggaaatcaacagtcagcatctgccgcagggatggctggttgtgtagggaagtgaaattaatcaccccgttccagtttcccaacgtaaatatttcgtagtacgactgtccatagttgggtgagaacataatacctgcaaaaggcaagttaacctgatagcgcaggctaatcggatagttcttgattcttaaatcccatattgccattcccgatgcatccagattgatgtaagcgcgtgcctgtgccgggttgttgccattgcgcagattgtagacaaagccaccatttaagtcgataagtcctccggcaagtaatttgaagttagaagtaatcggaaaattataatgcaatccgtaattccagtttgccaaaccggagaacgtattgttgttgtccacccggttgtgtgtatagcctaagtctgcctggaagaaactttgcagagatacattaccgttcatccacttcgtcatgcgcatactttcgcgggaaatacggaagtcaacgcctttgtattcctgcggtgacaggtaggtgtcgaatacgttcgtgaagccgacaccgtacattgtggcgcgggttataaagcgtgtccttgcagaagagtccgccctcagctcttgcagcgccttgtcttcaacactttgcgcttttatacttccacctgccaaaagcaggcatcccactattacaccaatcttatataacttcattgatatagttgcttatcactaatcactaatcattaatcacttagaacagcttcatctgccccgttatttcatcccggatatcatcttcactctttccatgatcggggtctaaaatttccggctcttcttcctcctgatcttctgtgtcctgcgaaacctccggctgtcgtgtcggttccagttcgttgacagtttccattgtgaacgtagtgatacgtttaccttttgctttgaaaccttttacggcgataaattcatcagcctctataatcatgggttcacggaaactgtcgtgtccgccgaatatgatttccaggcggggataacattcgtccgtcagtaagatgaggcgattgttcttgttctctcccagatagttctgcttgcggttggttgcttccatacagaaacgtttgatatatgggaaattctgttgatccgcgtcataaagtacggctgtccataccttgttcgggtcaaacttctctaatatacgaatattggcttcatagtggttgctgagatcgaagttggtgatgtagaactctccgttatcatgcaccaccaagatactgtcgtcgctctggaattctcccaggtattcacctcgtccgtcataattaaggcgaagtatgtcacggtcgaaccaaacttttcgtccgcccagagtagaacctccacgctgcttcaaggcgatcttgtgcaccggaagcttggttagaatgtttccccttgcctggcgtcccttaatgccgatggcactaaagtcttcttcgaagataatgcgtcgtacccgtggattgggtttcaaggttactttgatgacttccgcttccccgttggggttggcagtgaagtacatgatgcgtgaatcgggtgtgccttgcgtcacatcatattcgcgatcacggataatgcttgtcactgcaaaacgcttgatataatgtgtaccctcttttccgtcacggtaaaccacattgtagatggtgcgcttatcgtttttcttgaatacattggcataaagaatattcttgcccacaaatttcttgtcggaaacaggagtaaccagatatcgtccgtcccggaagaagataatgacatcgtcgaggctggaacaatttgagaggaattcatctttcttcagacctgtgccgatgaagccttcttcgcgattgatgtataatttttcgttggcttccactaccttgcttgcctcgatggtatcgaagttgcgcaattctgtacggcgcgggaaattcttgccatatttgtttttcagcatcaaataccagtctaccgtatattccacgatattagccagatgatggtctatttcctctatgtccgctttcatgcgggcaatgagttcttccgctttgtcggagttgaacttgaggatgcgccccatctttatttccatcaatttgaggatatcttccttggttacttcgcgtacgaattgtggataataaggcgtcagacgttcgtcgatgtgttcgcaagcagcatccatatttttggcctgctcaaattccttgtctttataaatgcgttcttcaatgaagatcttttccagtgaggcaaagtgcaggctttccagtatttcgtctttgcgtatttccaactcctggcgcagcagggataaggtgttatctactgattttctcagtatattgctcacggtgaggaagtgaggtttctgatcgtcgatgacgcaacaattgggcgaaatgcttacttcgcaatcagtgaaagcatacaaggcatctatcgtcttgtccgaggaaacaccaggcgccaggtgaaccaatatctctacgttgccagatgtcaggtcttctaccttctttatcttgattttgcctttttcgcttgcctttacaatagagtcgcaaacactggctaccgttttcccgtaaggaatttctttgatagcaagtgtcttattatcaatcttttcaattttagcgcgtatgcgtaccgcaccgccacgttctccgtcattgtatttagaaacgtcgatgctgccgcctgtctggaaatccggatacagtttgaattcctcttcatgcagatagtggatggatgcatcgcaaagttcattgaagttatggggaagtattttggatgaaagacctaccgcaataccctctactccttgtgccagcagcaaaggaaatttaacaggcagggttaccggttctttgtttcgtccgtcataggaaagtttccattcggtagttttgggattgaacactacgtcgagggcgaatttcgacaggcgtgcttcaatgtaacggggagcagcagcgccgtcaccggtgagtatattaccccagtttccctgacagtctacgagtaaatccttctgtcccaattgtaccaatgcatcaccgatagaagcgtcaccgtgcgggtgaaactgcatggtatgtcctacgatgttcgctactttgttgtaacgtccatcttccaaacgcctcatggagtgcaggatgcgtctctgcacaggcttcaaaccatcattgatgtggggcacggcacgctccagaataacgtatgaagcataatccagaaaccagttctggtacataccgctaagttggtattttgcttttacgtctttcgtgtcagcgggtttataatccgaatgtccttcgctcccttccgggagtccgttttccaagtcgtcttttggtgcttcaaagtcttcgctcatatctgttccgggaatatctattctgaataatcactgaatttttcagtcgaacgcaaaattactaaatttctcgggaaaacctgcaaatgaaggttttttaattatttgtagtgatgactattaagaggaatgatgtcagtaacgggtgaacattcagttttttccactgcgtgtaaacttccttaacaccattataaatacttcccttagacaatcggctgactattagctttatattactttggcacagaattggatatataattggtggagaagaacaattatgttggggtgacttttcataatatagttcactttggagtgccctctcttgtgactgaccacaatttcttctcgtttttgggttttccgttgaaagaaggagatattgaaacggcattttccggaactaataatgcgattattacggagtcggttgccaggaaatattttccggatgaagatcctatcggacagattgtgacggaagtgcaaagtgagagtttgttacgataagataaattaataccccacctgcccgacttatgatataaatccctatctttgtggcgctttttaataaagaacaggattaaaattaatagatataacaaaaaaatggcacaagaagacgtttttaagaaactcgtatcacactgtaaggaatacggtttcgtattcccctccagcgacatctacgacggattgggagcagtgtatgactacggtcagatgggtgtggaactgaaaaacaacattaaacaatactggtggcagagcatggtgttgctgcacgaaaacattgtcggcatcgactccgctatctttatgcaccccaccatctggaaggcttccggacacgtagacgcattcaatgaccctttgattgacaaccgtgattccaagaaacgttatcgtgctgatgtgctgattgaagaccaacttgcaaagtacgacgataaaatcaataaagaagttgccaaagctgccaagcgtttcggagaggcttttgatgaagcgcagttccgtagcacaaatggtcgcgtattggaacaccaggctaaacgtgacgcattgcacgaacgttttgcaaaggctctgaatgataataaccttgacgagcttcgccagattattctggatgaagaaatcgtttgccccatcagcggtacaaagaactggacggaagttcgtcagttcaacctgatgttctctacagagatgggttctacttcggatggtgccatgaagatttacctgcgtcctgaaacagcccagggtatttttgtgaattacctgaatgtacagaagaccggtcgcatgaagatacctttcggtattgcacagattggtaaggcattccgtaacgagattgttgcccgtcagttcattttccgtatgcgtgaattcgaacagatggaaatgcagttcttcgtgaagccgggtactgagctggaatggttcaagaaatggaaagaaatccgtttgaaatggcataaggcattgggattcggtgatgaccactatcgttatcatgatcatgataagttggctcattatgcgaatgcagctacagatatcgagttcctgatgccgtttggcttcaaggaagtagaaggtatccatagccgtacgaattttgacttgtcgcagcatgagaagttctcaggtaagaatattaagtacttcgatcccgaaacgaatgaaagttatactccgtttgttgtggaaacttctattggtgtggaccgtatgttcctcagtatcatgtctgcttcttattgcgaagaacaactggagagcggagagagccgtgtagtactgagattgcctgccgcacttgctcctgtgaagttggctgtaatgccgttggtgaagaaagacggtctgcctgaaaaggctcgtgagatcatcgactcattgaagttccacttccactgccaatatgatgaaaaagatagtatcggtaaacgttatcgtcgtcaggatgccattggtactccgtactgcgtgactgttgaccaccaaactctggaagataactgcgtgacgctgcgtaatcgtgatacgatgcaacaggaacgcgtggctattgctgaactgaataacatcattgcagaccgtgttagcatcacttcattgctgaagggattgcaataagtaatacaataaattaatagaatgaataaaagactcttagtatttctacctttcctgttactcttggcaggtgtatttacttcttgtgaagaagtagaggaagtaggtaggtatgacaactggcgagaacggaatgaagcttatattgattcattgaatctgatcataggtggccgggctgatagaattatagaaggggcgaaatatgaaggtgataacggcgactctgttaagcttagtaagattcctgtaggtgaattatttgctattaaggataactacaagagtacaacagagaattctttgtatatttattgtaagaaaatatcgccagacaatcccgatggggagcgtccgctttatacgcagtcagttacgacatactattatggtacaataatactgggggatagattcgatggtaattttgttggttacagcgcaatagatcgaggcgtattatctctaaatgataaagataaaagtccgacaaaatttgattctccatcttcttttagtgtgacaggtgtcgtttctggatggactacagtattgcaatatatgcatacgaaagaacgctggatattgtatattccttaccaatgtggatatggagaaagcggatatagttcaattcttggttattcaactttgacatttgatatgcaattagaggcagtaaagtagaggctctttataaaatagatagagaggctgctcatttatgggcagcctcttgtgtttataggggagtctacatcttctttttcaacgctttcacccaaattttatatccttcttcattcaggtgtaagccgtcactggtcaattctttgcgaagcacattcgtgcctttctctgtaaataacgggaagaggttgatgaatgtaattttgtgatctttagctaaaacttccagttgtgcattgatttcgggaaccatgtcggttttcccggttagctttttgtaacgtccgaagctctcatcgaaaggcaggagactttgcaggtagagtttcgtatcaggagattcacgctgaatgcgctctacggtcatgcgtatcatactgacgatgctgtccgcagtgaggtcgtgtgagatgtcgttgacaccggcaaggaggaataatttctctgggtgtcccggaagtatctggtgtagacggtcgtaaatgcccataacttcgtcaccgatgataccacggttacggatgtttttcttgttgaggcgggtgttccagttgccgccaccttctgtaaggctgttgcccaccatgacgatgtctttggaggtaatggcaggttcatccatgaattggaggaagcgcttataataatgatccgtataaatatgtggggtgggatagatagaagctgcaacgacattggctatcagagagcgcagacgaaccatgctgtgaccgtcttcgggatgcacggcattgacgagcaggatgacggaagtatcgttgtccggatctatgatgatggaagtaccggtgtatccggtgtgcccgtaggtgttcggactaaaataatctccgttattggaagcgtaggcggtgaaattatcccatcctaaagtgcgtcctaatgtagcagtggcacgggggacggtacgcatagcttttactcccaatgggctgaggatgcggtgtccgttccattctccgccgttttgcagggcggcgcagaggacagctatgtcttcggcacaagagaatacgccggcattgccggaaataccaccattcatgacacgggcgagtggatcgtgtacttgtccgcagaggacgctgccgtcggattgcttctcggtaggagcgatgaggctatgccagtcaccttcggtagaggttgcccaatgggcatctgctgtattgatccatttcccatccttatcgcgcttgcaggggagatagtcggtatgggccatacctaatacatcaaatagattttcgcgggcgaagtcacgtaaggattgtccgctgacggtttcgatgatgcgttgcagggtgatgtagttaaggcaactgtattggaagtcggtctgcggcttgaagtcgcggcggcagttggctatgtactctatcattccgtcgggactgggggaaccatattgtttttccaattcactggttggggcataaggggggagaccggaagtatgtgtcaacaggtcggcgatgcggatgattttcttatcttttccgtcttcgctcacccaggacttaaattcaggtatgtagaggctgacgggatccaagagacggagcttaccacgttctgccaggatatgggtacagatggcagtggacatggatttactacatgaagccatatcgaaaatagtgtttacagtcataggctcggtgttagggtacacacgcttgttgccgtatgctttgaggtaggccatcttcccgttgcgtactacagcgagtacggcaccgggaatgtctttattggcgatggcggtttctatcgcttcgtcagcgtacaacaaatgacgggaatccatgccgacttgttcgggggcaacacgttgcaaggattgtgcattggcttgcagggcaagcaatacaatgaagaaaaaggaagagaggagtttcataatgttacccccctataagcatctactgcctttttcactgaaccatgcattagcaacagtgcctttgcctttccatagtccaatcccagttcttctacgatcatgcgggtaccacggtctaccaatttctggttactcagctgcatgttcaccatcttattacctttcacgcggcccagttgtatcatgacggaagtggtaatcatgttcagtatcattttctgtcccgtacccgatttcatgcgtgagcttcctgttacatattctggtcctacaatcatttcgatgggaacatctgcttcagccgccatcggagagtcggggttgctggtgatgcagcctgtaagaatgccgtgctcacgtgctttctgcatggcgccgataacgtaaggagtcgtgccggaagcagcaatgccgatgacggtatctttatccgtaatgttacgttcaactaactcttcccaaccgcgacgcatatcgtcctccgcattttccaccgggttacgcaaagctgtatcaccgcctgctatcagtccgatgacgagtgtaggaggcataccgaatgttggaggaatttctgatgcatccagcacacccaggcgaccactggtgccagctcccatataaaagatgcgtccgccttgcttcatgcgcggaacgatttgtgtcaccagtttctcaatctgtgggatggctttttgaacagccaatgctactttctggtcttctgtgttgatgtcctccaatatttcgcggacagatttcttttccaagtcgttgtagagcgaaggttgctctgatatttttacgaatgccatgatgatgatgagatttatgatttataatttatgatttatgggggctggagtgattagctatggtagctaatcaggccttccatggggctctggaggatggtgcctatttggacgcccatttcctgtgcggcctcggtaagtacctccttataatggaatgctacggagccgatgaaatgtaccttgctatgctgataatcgtattgcatgacgttccttttcaggaaagccttgaaactgttcagcaccagcgtgcgcacacaaggctcgttcagattctgagcgaggaatggagacaggcttgccaggaaccggttcgggaatggtttacggtatacacggtcgatgatgtctgccggttccagattgaactgcttgaggaacttctctttcagttccggagtcatctgatttttcagaatatcacctaccagtaacttacccaggcaagcaccgctaccttcgtcgccaagaatgaaacccaggggagagacgttggcaccaatgtgtttgccgtcgtagtaacacgagttggaacctgtgcccatgatgcaggctatgcccggttcgtgtccacaaagtccgcgggcggcggcaagcatgtccgtatttacttccacttcgtcgcccgaaacctggagatgttggataatggcacggtgtaccatggctattttgtcggggaagccacagccggcaccataaaagtacacagcgtcgaaggcattggtcgttaactggggcagcagcgctgtcgcaatttcattactgatctcctcttccgactgaaagaaggggttggtacctttcgtagaaatctgctggatgagtttacctttctctacaacacaccaatcggtttttgtagagccactgtctgctattaatatcatatcgttttaagtttaattatttacttgttgttttaaggagttagaggagttatcgcttcgctgggagttagtgccgatagtctttttattataagcagaagtatcggctttaacttctataactcctttatctcttatatcttgatatatatcttccgtttatacaattgatagccgatgcaccagttgatggctacaaagagcagtgcgtaggccagtgaaccgcctgtctcaccgaatatcggcataagaacgatcttgtataagaatccgtgtatgctgatgctgccatcgccccaagggaagctgatgctgccgaacaggatacttagtactccacccagaacgtacatgaacagggggttgacaccaaaagcctcgaagaaagtgcaccatttcttgtatccttttacgtcgatgatccagatgagcagtgccaggaaactggaggccagtccgcaagtggtgagaacgaaggtgggagaccagattttcttgttgataggacaaccgtagctcagcagaaagcctgcaaaagtaaggatggcaccaaccagaaataatttgatcaggtgagaattcagtaaggcttcgcggctctcggctctattgctgtccagcatcatgcgacccacgcagaagcccagcaatacatgggcaatggatgggatggtgcttaaaagaccttcgggatcaatgccgttgtccttgtacatgtgtgcgggggtgaggatggcacgatccactatggagaggatattggtttcgttgtaagcaaatccgttgccacacatcagcaggatgaagtagcctaccagcaatgtggcaatgagataagggatgtgacggtgtttcatggtcagcgcaataatagcggtagcaccgtagcaaagggccaggcgctgcatgacacccaggatacggatgcggtcgaaagtccagacggatgcccagagttgttcgccgaagctgagaccttcatgggagcctgcccagtagtaacagaatctggagaaccagccgatggcaagtccgatcaggaagatgataatagtacgcttcaatatcttcgtggcggctgcatgactgaactcgaaattgtacttcttcagggagatataggtagagatacccatgatgaacatgaagaaggggaagacgagatcggtgggggtgaggccattccactcagcgtggcgcaagggggcatatatatgtccccaagtgccggggttgttcaccataatcatgcccgcaatggtgacaccgcgaaggatgtcgagggcaagaatgcgcttgtttgtcttggtttgactgttcattgtaataagtgtgttaagttatttattcaattgtcaattcccttcgtacattggtctacgagataggcgatagagacgtaggggatacctgagttggtagtcagtcctatttcgcaagtacgactgttagagtagccgatagtgatgccggatgcttctatctgcggacggagtttgcgcaaggcataggaattcagttcgggataggtgaatccgcggtcaccggcaaaaccacagcagcctacttcttcgggtacgaagacatgcgtagaacagagttttgccagggaaacaattgtatctgccagtcccattttgcgcatggagcaggtgatgtgtactgctacggggcggtcggtctgcgtgaagaccagtttgtctcgcaggaaagtgtagatgaattctgcaggttcgtagagcttcatcttttgaatggtttcgcgcatgcgatgcaggcaggggctttgatcgcagaggacaggatatttgccttgctcgctggcttcccaaagggcggcttcgagttctgcggctttgcgatcggcaatgtcgagcatacctttactttcccagatggtgccacaacagagcttatccatgtccttggggaagatgacttcgtaaccgcctttttgcaggagggagatcatcttgtttaccaaaggttgctccacgggggattttttcgggagtcccatggtttggttgatgcagctggggaaataaactactttgtcagctgtggagttacgagctacagaactacaagctaccagtgttgcgctatcattctgcatagtactcgtagcttgtagctcgttacttgtagctgttgcaacttgtagcttgtagcttgtaactttatagctcttcggcatggcaggcgtccacaaaggtatgcccaatacattgtgcatccctttcgtaatgctgctcatggctttggttcctaatacggagtgtccgaaattggctaatgataaaacggggcgcagactactcttgacaccggcgaagtgattggctacgaaatctcctgctttatatccgaggctacctttcggtagcgtttcctggcggatgatatgggtcaggtcgcctgtattgatattcatcgggcaagacatggagcacagtccgtctcctgcgcaagtttgattgcccgggtagcggtattgtttttcgagtagagacagacgttccgggtctgtaccgctttgttttagacgtgatatttcccgttgcagtacaatgcgctggcgcgaagaaagggtaaagccgcacgacaggcagttcacttcgcagaagccacattcgatgcacttgtttactttttcggcaggactggcttcgtcgataggaatcaacggcaacggtttgaagttcttgatgtggcattgcgagtcatcattgaagataactcccggattgagcagccctttcgggtcgaacaactgcttgactgccttcatggcttcaaaagctgcctctccccattcatatttcacgaagggggccatgttacgtccggtgccatgttctgctttcagcgaaccgtcgtatttatcgactaccagagtctttacgtcattcatcaggtcctcgtagcgctttacatcggcgtcggtactgaaagattggttcaggataaagtggtagttgccttccagagcatgaccgtagatgcaggcatcatcgtagccgtggcgggcgatgagttgttgcaggtcggcagtggcttcgggcaggtcttcgatgtggaaggctacgtcctcgatgaggcaggtagtgccgggttggcgtgtaccgcctacggatgggaatatacctgagcggatagcccaatacttggaatattcttccggccggtcggtgaagtgcacggggatgtaggtactgaaaggtttcagacactcttcgatcactgagatattctgttccagttcctcgcgggtgcgggctttggtctcggtcagcacggctgtgaggccggaggcatcgacaacttcctgcttatattttaagtagatagggtcttctaccgaagagagactcttgtagtccagcagttcggcgccttttactattttttcatccgcagatgacacggatgacggggatgaagaattacgatttgtcaactccttcatcgccaccaccgcccggcaggcatccttgatattggtaaaatagagcatggcgcttgccttgtgcggatagtcgtactctgtgcgcatggtaatctgggaaaggaacgcaagcgtgccttccgagcctaccatcaggtgggcaataatatcgaacgggtcatcgaagcgaacgaatggcagaagattcaatccggttacgttcttgatggagtatttgtagcggatgcgtgcagcgagttcttcgttggcacgtatctggtcccgcagttcgcagatgcgattgtagaaatcggggtgggtggcttcgaaggaagcacgcgaaatatcatcccctgtatccagcacggtgccgtccgccaatacaatgcgggcggaaagaagcactttgtcactattggcatgtgtaccgcaattcatacccgaggcattgttcatgacgatgccgcctaccatagcacttttcacgcttgccgggtccggagcaaacttacgtccgtagggggcaagaatctcgttaacccgctgaccgatgatgcccggttgcaaggtaatctgttcatgatcgggagaaatgctgtacttctcccaatgttttccggctactatcaggatagagtcactaatggcttgtcccgacaaactggttcctgcggcacgaaacgttactggcagaccgtaacggtcggcaagtcttaacaggtcggagatttcctcttcgctattggaacgaatcacgatttgtgggataaggcggtagaaacccgcatctgttccccatgccaaccggcgcagttcgtcggtatatatcctatcttgcggaataagtccccttatttcctgcaaaaacgaagtgtagctactttttaccatagtgttttcgcctttcttttccttatcattcttttcttctttcaccggcacccccgtcagaatgtgctgtaggattgttttaatgacatcccggtctctcctgtgatgagaagcgtatctcacctctcatgatatgggcttctcatgacccatgacatacgtatctcatgaggggtgacatacatatgtctttatgactttttcagtgtaagaagcgtttattgttccttacttgtataggtagtacttcttagacaatcgtcggaagtcttcagcatccttataccaatagtcgcgcacgtcttcccagcggttgcgctgtgagaatcgcttgcgtatctcttccgagccgcttaccatgtcgaacatacgaaaacgtcccttgtcggcatgctcaaatacggcacggtcaggatagagcgctgcgatctcctgcatcaccaggaactggatgtcgctcagcggagctttctgcacatccatgatgtgtacctgtacgccttgcagcaattcacccttacctacggagtagaagggtttcagatacatcggcctgaatacaacacccggcacattcaatgcgttcaggtttcccgccagtttttctgcttctacccattgtgcggcaaacatctggaacggtatcgtatagcctaccccgatggacatatatcccagttcacccagaataccgcttaccggatagaatatagccgagtgcggatgggggatatgtggagaagagggtacccattgcaaccctgtctgtacatagtccatcttgcgtttccagcctttcatcttcacaacgtgcaggttacattgtgctgccatcatcttctctccgttcagcatcaatgccagctcaccgcaagtcagtccgtaaaggtacggaatcttgaactgactgacaaaagaaatgcaatcatcttctaccagattgccttctatcttgagtccgcctaccggattggggcgatccaatacaataaattctttaccgttttcggccgcagcttccatagccagccccattgtactgatataggtgaatgagcggcaaccgatatcctggatatcgtagaccaatacgtcaatgtctttcagcatctctggcgtagccttgcgggttttgccgtaaagagaatatacaggcaatccggtggtggcatctttaatgtccgtcacgtggtcgccggcatgtacgtcgccacgaaccccgtgctccggaccgaagagggcaaccagatttacgttcggtgcttcatgcagaatgtcaatggtggatttcatctgattatccactccggtggggttggtaatcagacctacgcgtttgccttccaggcacttgaaattctggtctttcaggacttcgatgcctgtctttattcttatcttttgtgcctgcgatgtaccacagagcacacagagcaggcaaaggagaatgtatttcttcatgatttataatttatgatttcttgcttatcacttaccgcttatcactttttatcactcttctttcttccttccgaagctcggatctatcttgatgaacgcacatactccgatggtagcggcacaacagataatggtccatacgaagaagtgtcggtaaccgatggtttcctgtaaccatccggcagccattccgggtaacatcattcccagtgccatgaatcctgtgcagatggcgtaatgggcagttttgtgctcgccttccgagaaataaatcagatacagcatataagctgtgaagccgaaaccatagccgaactgttcgatgaagatacagatgttgactgtcagcaacgagtgatcctgtgcataactcagatagatgaatgtcagacaggtgagggacatactccatgccattggccataaccacttcttcaatccgccccgtgcagcaacaagaccgccaatgataccgccaattgtcagtccgatgataccgatagtaccatagacgaaaccaacttgtccggtagtcagccccagtccgcctttgtctattgggtccagaaggaaaggattgatgagcttcacgagctgtgcttccggcagacggtagagcaacataaagaggatagcgactcctgcctgtggtttggtgaaaaagctcttgaaagtatcgaagaattccttcatcagattctgggcggtaacgtctttcgacggacggtcggatgcgggtttcggcaatatccagttgtggtaaatacttaccgcgaagaagaatccggacagtacgatgaatactatcaaccaggcaaacggaatgttaccggatgcaccttcgaaggtagcggaagtctcgttcttaatcttatgatctattctgaacagtaggtaagcaggcttgtcccagttctcggcagtgaattcgaaccgggtggaaaggctgttctgttccagtttgatactttggtcaccgtctttgaaggtgacattcaatatcttggtttcatcggcagatggttgcttggacagacgtacgcctactatggcaacgttatcaacagcaccttcggctacttcgcgcttctcgccgaaagtttcacgtacccatgcggtgaaagtgctctcctttttctctgcttttacggtggcatcgccttctttggctttctcggccggaacgaagtggttggctatgttggatgctttgaccgctttttccaattcggcaatccgtgtctttatatctaccgaatcattatcagcggtagcggtgacacccgcttgtactatcggagaggtatatacgaaataggcttctttttgtgtgtcgatattcgtatcctcaaagtcgggtaaggtcagggtgttagtgtaagagggtgaggcttgaacttgtagcatggcaggttcgagaccggttccggtttcaatcaatcccgcaatgatgaccagcaagccttgtccggctaccgtggcaatacggtaaaatgtacttcggatgcccacgtagagcgattgttcatgctccgtcagggcgtgcatatagaatccatccgccgcaatgtcatgagttgcggaggtgaagcccactatccagaatactgccagtgtcaattggaagaagaagggagtggggatggaaaatgcaatgcctgccaatgcaaaggcaaggatgtattgcatgacgacggtccaccaccgtttagttttgatcaagtcgacaaatggactccagaaaggcttgattacccatggcaggtagagccaaccggtgtagagagcgatatccgtgttggatattcccaaacgcttgtacatgatgacggaaatggtcatcacggctacgtagggcaaaccttgtgcaaagtacagggtaggtatccatgcccacggactggttttcttggtagattgtttcatggtattttcttatttctgtttactcatatagcttctcgatatttgcgcctatgtaatagtgcagcagtatcgcgtcatacttatagccttgttcgcccataacggcagcaccgatctggcatagtcctacaccgtgcccccagcctgctccggtgaggatgaaacgggcggggataccttcgggagagacgtcttccttatctactacgaatgcggaactgtacaggtgggaagtggacagcgtgcgacgtatttccagctctttaccgatggtgagcgtcttcttggttcctatgattttcagtttccagaggcgacctgaagttccacgggcaataggaacaaggtcaatgatttgcccgtaatcgatgccggaacgtttcagaatcagtgcagaaagttcttcctgggtgtaaactactttccagcgatagaagtcggtggtttcctggtcatagttattcaatacctgtgagaggactttcttgtctgtggtgttgcagaaagcgggtggagaagtacgtatccatgtctcggcttcttgctcgtcggtcagatctggtaatccgctaccggataaggtgttttcgaaactcaagtcattgaatttggaactgaagatacggaaatcccgttgtttcaggagatagggatacttcacatcttcccagcaatactggaattcttcgaatgcaccgccacagcatttagagaagcgggcatcgcatatcttaccgtcggatgtcaatacttgtccgcgggtggcagcgatggcttgctttacgatttcggtggaggcgcgggtaatgccttggtaacgctggcaatggtcgtctgcacagacatcgaaacgggtgtggtcttcacggtcgtaccaacggattaactcttcatctgtttgggtgaaagcggaatactctgtctgggtttccgtaatctccttgttcttatgaatctgagccaaaagccaacttcgtgaaattactgcatgtgcctccaacagctctaacgaagccgttgcgctcatctcactggagattacgctggtcaggtaatcttctacgtgaatgacgttgatgcctgtcagcttcttgttctccacaataatcttcagagaacccaggaagcgctggtcttctttacgctcccagtggaagttgatgccgatggtgacatcgagcagttcgaaagcgtcggtggcttcgtttacaggttcaaatagaagttcgtcataaaggcgtccgttccacagtatcctgccttcgttgtaggtcacaacctgcttaccactgatttccataccgttgatgcggtacggattcagcaggataaactctatttgtggctcgaacaatatgcctacgtgtactttgggctctttcatattatcttattaattataaggatactctgttttattatatcttctctttaatacgctgacgcacccgatggaagtcttcggcagagagtgatacctcactcaggatctgggctatatcttcggctgtgatcttgagaaagtctttttcgaccggtgtaataaacactccgccgagatctacggatgccggactgctcaataaattggcatctccttcggctgtatagcaagctgggcggtgcttctcacgtggaaatacgcatacgatccatttctcatcttcgtaccatgccaatacattcatcattggttcgtcatctcccggcttgatgtccagtgagtgataaatgatatcgaacagggcggcagcatgtttcttattggctgcttcgatgaccaatgtcgcacggggagcgtcattcaagtaccagagggtagcttcaccgtgatcggccactttgcctgctacctgtccgtgccagtccttttcaataggcatgaaacctttgttgcctgcctggaagtgagcatggtcgggggcggatgcaccgcatttgggaccattatagaatattgtgtaatccgtcaacgcctgtgccaatgccagcatatccttgaaacggacggctatgcgctggttcacgtgtgctacttccggtatcgtcaggtggcgaggaaagatagggaacggattgaccaggatattataatgtccttcgaacggaattcctttctgcaccggcggtaaattggccgggcagagaaaacatttgcgttccttgatggactgggcatctactttagctcccgaagaaacgatacgtgcaggattgaactgtaccttatacggaataccgtttacatcgagttccttcacctgcacacccgaaagggcggcgtagttgttacgagccgtttcccaggaggcaagttgctcggtaagcagattgtttatggcttggttcatattgaatgctgtaactggttacttattagtgtgttgcataacacttgcgtttcatgtgagggacacttgcgttacatttgtagcacacaagcatttcatctgagaaacacttgtgtggtacaagtgcggaaaacgcatggagtgttttatcttctcttattcttcgccacgcgtgcctggagttcccaggtacggatgcggtctttatacagattatgaccattcattttcacgatatccagtgaagcatccgagttgtcatcccatcggcggcacaagtaaactacgtcatacacacggccgatctggtattggcgggagaagtttaatcccagtgcatagtcttcaccatagctggtattcggaactttcacttcacgcagcaccggtgtatagaaagcacgaggagcccccaaaccattgatgcggagtgcattgttgcgtccgttttcgggtgtccattctttatggtcgataatacccggagcaatcatattcatattgaagtccgtcatcatataagtacctaccaccatggcgcaattctgttcatagaaagcacgaaccatagtggtcagtgtattttcatcgctgtacacgtcgtcactgtccaattgtacagcgaacttaccacacttgggatgatgcacacccatgttccagcaaccgccaatacccaggtcattgcgttcggggatgatatggatgaggcgttcgtcgttcttgaattcgtcaatagcttctgtggtcccatccgtagagtggttgtcgatgataatcaagttgaacttaaagtcggtcttctgcttcaataccgaatgaatagcatcacggatggtgcggatacggttgcgtacggggatgataaccgaagcttcatattcgaagttgcctgctgaaaattctatttgtttgaattctggtgccaaatagccaccgatttctttcagatgctcggtacaagcctgttccatttcaatctggcggtcacggtttctgggatccacgtaatcgaatatcttctcaccgctcttgcgggtatcgtcttcaatttcgctgtacagatactcattgatgtgtaccagactttcgttctggcttactttcaggcgaaggtcataaagcccggcaaatttatattcgtcttcattcatgcgggcagcagcctccttgaatgtatctgtgcggaataacagcacggaaccgaagtcgaaatcatcgcgcaatgagccgaattgataatcgatcaccggggcattggtttgcttgccttcctttacctggtagcggtcagcatacaccatgcctgcaccgctgtcttcagcaatgtgtatcatacgctccagggcgaataaacccagttcgagcgtcgtatattttgtatagatcagcgtatattctgcatcgctatgtccggctatgtctcttatggccgcactggactggatggattgcatgtgcagggtactacatccgggcaggttttctgtaacgtccggtagggcgagcagataaatgttattcactaagccggtttcttgcaggccttttactgtcttttccgcttgtgcagctcctgaaaaaggaacgaagcaattgattttattcataatgtcctatattgcttttaattattaattctttaattcttaactcgtagcagtcccacttcgccactggtagcagtgaacaatacctgtcgtccgttcagcggcactacggtactgatcagtgagttacctatcttatgtttccacaagattttaccggtttgggcttccaaagcaaagatcagtccttccttggtactgccgaacattacgcctcctttttccacttgcatggagggtgcatgttcgtatccgaagccgacgttgcttgcccataattcgcgggggtgatctccctgtgtggcatagcagacaatactgtcgttcatggtcttgctgaatacacgcgttccatcttccgacaggccaatcgtttcacgtaccatagactggaaagtgcgccacactgtttctccgttttctatattgatagccgtcatggcacgttgtgggtcggtgataaatactttgccttctgcggctaccggccatacggctgcgggtgagaagtgcatgcgcgttaaaccgcctgtccacttccataattctttgccgtctgccttattcaatgcatagagggtattgtcccaggcaccgaagatcaccttgtcggctgttaccagtggtttggtttcagtgtatcctttcacaccggtatatgcccagagcactttacctgtgtggatatcaatagcacggaaagtagaatcgctggcaccaatgtaggcaattccattttcaatggttaccgcacccagtaccggggcttttgcttttacagtccacagcagttttccgtctttactgttcagaccgtagatgttacggtcggcagaaccgaatacgactataccatctaccgcagccggagtgcctacaatgcgcttaccggactggaaattccacagtttctttccattcttcaaggcatagcaagtcaggtaccccatatcgtctccgatgaacactttgtctttttctattgcaggcgaacaatagatacctgcaccggtttgcactacccactgttctttcacattcgggtattctgtgttgactgaaaagtcggggtatttctctgcttttccattacgatcataatagggctgagtcagcgagaaagcagcccattgctttttcggttcgccgatgcgttgcgtgtagacgaggatcgaatctttcgttatatcatagatgccatatcccggttttccatctttatcacgcaggttgctgcgcatcaaaatacccggaatgccatcataacgcaaatcccggttacggtgatagtgcccgccgatgaacaaacgaatgttataggggcgcactgcatctgttacttcataccagttatcgacatctccatccagtaacggatagtgtgtgacaagtataaccggtttatcttttccaaacttatccatttcttccgtcatccaacggatgtcctgcggaacgacatgtccgtaagccatacgcatcaacggtccggagttgaaacccagaaacaggatgcctttatgctcgaattcaaagcgttcgccgccgaaaatctcaccgaaggcagtacaaccggagtcgctccatttagtttcatggttaccgaggatcacgtaatacttcgctttcagtaaatccaatgtctctttgactttcagcatagtggtacggtcgccctcttcggtgatgtcgcccgtaaccaaaacaaagtcgatactgtctatcgcatttatttgcgcgacggaacgtagtaagtcttccgtcgggttggggttgttggggctgaaatggatgtccgtaatttgcgcaaaacggaatgtgccatgttgtgcttgtaccgcgaacggtagcaggcaccccaacaggaacattattaaaagtcttcgcttcatagatgatgattggtttaattaaaaaatgtcaagatagcgcgcatcaacgcttctctttcagaggcggtgcgcaatgcttcgaacgggaagcccagtatgcaggttttgtagtcacctttgtaagctactccggcgctcagattgttttccgaatagcgcattatggtgtatgcatcttttgttgccggttcgatggcatccggtgattctaccacataactgtctgcattcagttcattatggtatgtatagttgcctgaaagggcggggaacggtgaagctacacatttcaccttaccctctgtagctgcctgccccacgcgccatttatatttcaggacttctgttgcaaatttcttatcggattcctgagccggggcaaggcgattgtcccaaaggtcggttcctacataagcacccgagacgaagatgtttccgccttgtccgcaatatgcggtgatagcttcctgcatgggttggctgaatgttttgaactctaacggcttcacaccgccacgtcccattttggtctgacattctttacctaatatcaggtctacatacttatagtcgttcaggttcattgttttattttctacactttcatcgctgcaagatatgaaagaatatccggctttcaaaatggcggctccatgaatagcgggataatcgaatgtgtttccggcgattactttatcttcgtaattgccatagctgtcgccgaagccggaagcatcgtcgtccatccatggaatggaacggcggtattctttcatcttaccaatgtagctgatatctttcagataaggtacgccgtggtccagatcatctaagaaaccggcaagtaaagtatctccgggaacaggtgcgacaaaatctgccggagcactgatgcggtcgaagccgtttactatcagcacgatatctgagtgattagcgtttgtctgcttatcactcatcgctaatcgcttataactattaaacgcacgtcctgctgagagtatttcggacgggaaactttctccgcccttgttgacggcagttactttataactgcataccatgccggcagggagggcagtgcgataggtattcttatctaccaacacgccattatcgaaatcgccatctccgatacgggtataaactatatatttttctgcatttgccgttggctccagtgggtcggctacgggttgccaggtcagttctatttcattctcgcctaccattttcaatgccatattgtcgacaggtaacggctgaacaatataatccatgtggtattgcgagcaaatgaattgcagcatacctttatagattgcacggcttaccgtaaaacggaagcgtggatctaaaccataacgcatgtctgcaaagttctggtgagaaagtaattccagtaacatagtggggacacggggtacacgtgcttcgtagtaggattggttccacataccgcggcgtgtccaatccggttcgtataggctgcggatatcccgtacgatatttgactgaatcaggtctgtcatgtcgtgtgccagatagcgggatgctccgttggcgtattcttcattgtaaacgttggtatagtagatacccagtgttccgatgatggaatcgtttagcgtagttcctgcatctgaatggaaggcgaaagccatatctaccgggatattcagtccttgttctgtcgggttaaccgtagaaccaccggcaaggtaattcacccagataccacgacatttgtaatcatccgtatagtcattcttaccctggctgtcggaataaacactgtccgggatacctgcccattgaagccagtagcgtgctgcctcgcagaaacggggataaccgcttatctcatacgggtaatctatcttcggcatttctttatgcactatggcagcattgccatccgaacttttaatattctctgtggcacctgcatcagagatacggcgggccatatttcccataccacctccgatttttacggcatcagcggtaacgatacgtccggctttctcagaacgattgcttaaaacaactttgccggcattgctttttccggcatcaaaaccaaatgtacctagataaatccaagtgccgccacccatctgttggttcactttgaattgggagactcctcctttgtgataaacggtgtaaagggcatcatccgtactgtttggcaatgatttataggatacataaacggcgtactgtccggttgacgggagttcaggaatccattcggcagtactttctttctccttcttacctttcaccgtctcgacagtacggaaagttccttcacggaatgggttttcaaaattgatatattgatcgcgcagatgggcgaaaccttcaccggtaccttgcatccagttcttatcgcctatcttttctgtataaacggaacgggagtgaaggcaaccgtcattgtctacgacaacttctgctatttggctatcccgttcacggggcatcagcacattagctcctgcattctccaacatgggaaccaggaaaggcagtacataactttgcgtatataaatcctccaccgtctggaagatgcgggcgcgttgccattcccagcgtgtcagtttgggctcataatagaagccatgactctgccacaaagcaatgtgacggttctttagtccatttgtaggggtatagggggtggaaaggcccgttactaaaggttttgtcccggccggattgaatgttttggcttttttgtcctttttgctgcgtagtgcttgggggattaattcttcaatgctacgcttattcgtgcggatttgcaggttgtattttgaaaactctgccggaagcagtgcctgcacaccttgataaatctctgtcacattatcttcccggaaaggaatatatgcacagttcatgttagcgaataattgcaacgtattttcttcaatggcgacagagtcaatccggatgcgccctacggaaacctctttccgtgcggttgcgtccagaaacttaccgatttcctggcggacatccgtcggaagctcttgcgcgcctcccgtttgggggatcagggaggcggtgagcaaagtgaacaaaaaatgaagtcttacattcatggatgatgtattaagttaattattagttcttatcttttctgatcaacaggcagagtccgataaacgtgaacagagcgttgaatatcagcagttcgtagctaaactgatacccattgaaccaggcttccgaattcttttgcaggatgaagcaaaggataggggagaggatggctaccaatgggatatatttgtcgcgaacctgttgtttcatgaatataccgaatgcgaataatccgagaatggggccgtatgtgtaacttgccagtatatatacggcatcgattacacttgtgttattcaataggttgaatacgaatatcgtgatacccataattacagccataccgatatgtacccgcttgcgtatctttacgatttcttcttccgtcctgccttttgtcccgaggatatccactgtaaaggaagttgttaaagctgtcagtgctgagccggcagcggaataagccgaagaaataagtccaatgataaacaagatacctacaattgcaggaaagtagttaccggtggctatcaatgggaagagttcatcgctcttttctacctgaatgccttggttaccagcgaagatgtaaagcaatactcccaacatcaggaacaacaaaataacgaagaactgtgatataacactcgtaatcatatttttctgtgaatctttgaagttcttgcagctgaggttacgttgcatcatatcctgatccagccctgtcatggcaatcatagtgaatgccccggcaaagaattgtttgaagaaatattgtttactgtttacatcgtcaaagaagaaaatgcgtgacatgtcactatcggctattgtactgatcatgctgctaagcgacagattgagatcggaagcaatataactgatgcagagaactacggataccaccaggcagaatgttttgagtgaatctgtccagatcagagattttactccaccccggaacgtatagagccatactaatgctacggtaatggccacattcaaaataaatggtaatccaaacggttcgaataccagcagttgaagtgtcagacatacgaggaacaaacgtaccgcggctcccagcatcttagagatgaagaagaaccatgcgcctgtccgataggaagacataccaaaacgattttccagatattcatagatggatatcaggttcatccggtagaacagtggcgtcaatacgaatgctatgatgaactgtcccgcaacaaatcccaataccatttgcaggtaaccgaaactactggcagccaccatacccggtactgatacatacgtcactccggagatgctggacccaatcatggcaaatgccacaacataccaggccgatttacggttaccgacgaagaaaccttcattgtcggcttttctgccggctatataagatatagtgaacaagatcacgaaataagcggcaatagtaatgatgacagatatcgggctcatagggttgatttatgatttataatagtacatgaacttattcttcgtaaagcagatatggtttacgttgtaccttgaatttctcaacgtcatctttccacatagctttaatttcatcggcactttttccttcttttatcattttccgtacataatcccttcctaccagcaattcaaagaatggacggaagaaatgatcatccagattcagattacgatatgcatcgatgacataagataaatctacacctcgtttccagatttcttcatcactcatattgcttagatctactccatggcacagtttattcagctgcggcggattctttgctccgggaatacttcttggggtgaaactgtagctatatccggtcatattgggatgtccataaacctgaaatgggagtgaagttcctctacccaagctgacgggagttgcctcaaaaaagcatgtagccggatatagatatatcgacttcatgttcggtaagttaggagatgggggaattggcagctgatatttagtctgatgtgtataattcttgcatttgatcactgccagatcacatttgcgtgaaccaggcaaccaaccttctccattaatcattaatgcaagttcccctaatgtcattccgtgtacaataggaatcggcaaccatcccacacctgatttatatttcatatccagaatcggtccatctacataatgcccattcggattaggacggtctaataacaaaactttcttgttatattccgcacagacatccattagccggcacatcgttatgtaataggtgtaaaaacgtaatcctacgtcctgtatatctactatcagaatatcaaatttttgcattgaagccttacttggctttttgtccttcccttcataaagagaaagaattggcacccctgttttagagtctactgaactggatacgtgctcgcctgcatctgcatttccacggaaaccatgttcgggcgagaagatggcaactacattgaatttgttttctaaaagaacatccaatagatgtttatcccctatcattcctgtatgattagagaaaatggcaatccgtttatcctttaggatgggaaaatactcggaagtttgttcgtcacccaaaataatccggtctgtttgtgcctgacaccagaaggtactacacaataaaaagatcagtagcagaagtttcttcataatagtattattgttaagggggatattcgtagcaacaaagatagattttattttaatatcaaaaacacttattttattatttttggcattataattaataatttgcaaataatcagatattcaccttatttatatagaagatatattatctttgctgtgaaccaaaaaaaatcatcatcatgaaatttacttatttatgtgcagcatttgcgtgcattttcagtttggctgttcagccgttatcagccggtaaaaaaaagaaagttcaaaaccaggaacaaaaggttgctttgggagtctgggacgatgtggataaaggtgccacggtggagtctctgattctctggatgaagcctttcgatgaggccggtatcaagaattattatatgtgtggctcaccggaagaagtggcgcgttatattgaggctgccaagtcctatcagggtgcaaaagtgcatgcgtggatgttcactgtgaatgctcccggggattctgcggcgttggtgcatcccgaatggtttgatgtgaaccggataggttataacagtcatgaatatgacccttatgtaaagcattataaatggctgagtccttctgtgcctgaggcccgacagtatatgaaagataaagcggcttcttatgcagctttggaaggactgacttctgtacatctggattttattcgctataatgatgcggtactggggcgacgtctgcaacagcataagtttaagattcagcaagatacctatcgtgctgaatatgattttggctatcatccggtggcaatagaaaaatttaagaaactgttcggttactccccgttagatttgcaggctccgtggatgagtccggaatggttgcagttccgtttgaatgaggtcacttctttagtgaatgagattgtagaagcgactcattctgaaggcaaactggtttcagcggctgttttcccttatcctacccgtgcccgcatgacagtttatcaggactggcctacctggaaaatagatattgtatgcccgatgaattatcagtcgttttattcggaaagccttgaatggataccgtttagtatagaaaacggtttgcgcgaaactttccataagaataagtatgtatccggtttatttgttcccgatattacggctgaagagctatatacagctgcaaaactatctatcgaagcaggagcggacggcgtgaatttctttaatgcacgttctttgctgaaggatggaaagttgcaagtggtcagcaggattaatcaggaatataacttgtaattaccattggaactgatttatcactaaacaattttatagtacggggtcctgtagtaaggcgttcaaagaatatagtttactgtctaccaggaccctgaattttgccgatacatgtcataaacctttctacccatgaactgatatcccattccctcgtatttcgtaccggagaatactgactggatatagccatttcgctctaccagtattgtatggtaaatcttctgctccggattctttcgggaataaaactgaatccgacggttgtctgccgtgaaataaataatactgtcattttcggttttattccatgacagacgtttcattttctttttcagatatcgttgcattaaataggttctgtgccaggtccctcctgtctttgagacaaatggctttccatccagcagagcattagcatcatcataacaagctacaaataagcgattgtcggaagaagcttccagccatttttgtaatttatctccgtaacgttcattatcccagttgtaattgctgtcaatgaaagagattcttttcacataatccggaatttcagaaactgcatccataaaaccgaaaatgaagttgcctcctccactgtggctgttcagttcgatatgtggattatacttggaaaaaagagaaagaatatactctactgtttctttaatcttttgatcccgtgtaggttcagcttttctccaacttccccagcttttggtgtctgcttccaggtaaaccgtaataaagttacattccggatcagaagctctgatataccgtgtttgagctcctatgtgttgtatatgataatgccagtcatcaccttctgccggcattttcccgatggtccagtctgtactgttgccattcggtagtgcatatagtacaagttttgtgggtttatcctttccgaatttagtttctgcgggagcatttatatgaactttgattcctggagtatggataaagctgataacttgttcctcaaaataaggactggttacaaatccgggtaatttgattgctttaccggatattcttgatgaaggattcatctgttcttgtgcccgattggacagagaaagacaacatataagaattaagagaagaatatttttcatattgtttcagataagaggttatatgtataacaaaatgcgtagctgaattactcaactacgcatttcataagaatcaatttttagttaacatcccaccataggttattttgtatgctgttgcttccacccatgcgcttttcggcttctttcacgttagcttcgttaactgtgtattccgaagaaggataatagatacgcttgatataagcgtttggagtattattagcctgatcagaaggattcatgttgaagacacttgaacttacgtttgcgaatggcataagcgtaggtttgtggaactggcgatgatcagcccaagtttcaaaagaacattcctggaactgagcaatgtatttctgggtaagaatcttatccatgggtgtattgttggttcctgtaacatcgtcatacttggctgtggttccataatagtttggagaagttgaagccagataatttgcgattttgctttccggaactcccagttctgtcatacttgagcgtacgccggcttcgtattctgttttggcatctccatttgtaagaccaagttggatggcaatagctttcaggaagcacagttcgctgtacttgaacaaaggatactttctgtcaatggtttcataataccagggaccgatttttgagaagtcgctaacaaactgtccattgtccattgcagcacctacacccgaagctacatgtcccggatctgtgccgtcccaattgccgttcatgcttggagttgcagggctttcgatgatacctgcgggttcaaagtggatcggagcgcgaggatcgacaactgcaggagcattcttggcagtaagaataacttcggtgatattcttattggcttcgcggtcggctgcggtaggccatgcttgtccaccgataccttctacaagacgtttgtaagccgttgacatatgcaacaccgaagaacctttatgataataaatcgggttctgggcaaatttatcttctccttgcgtcaggaaggcggcatcagcgtcactgctgaatacacctgctgaaatggcagctgcggcttctgttttagccttggcggcatctacgtcggagatacggacagccatgcgcaggcggatagagttggcgaatttcttccatttggtggcatcacccccataaataaggtcataagaaccgacattattggctgccgactcatccagtttacttacggcatcttttaattcttcgaatatggtataatatatgtccttctgagtgtcatacttaggctgatcaatgtcgttggcagcttcagagtaaggtacatctcccatacaattcgttaaacgcaacatagcatacgctttccagatacgtgccatctgaacgacgttattgtgaacagggttgctctcattggcacggattaatgaattggcattggtaagcacggtgtaagtcaactcccaaatgttgtccacatagcgtgcgtctatgttatagtcggaagccgagagttggtcgttagccgaatattcacagaaagtactgatcatcagctggtctatctgttgccactgattggcatacggaataccacgtccctgtatgaatatcagctggaacttaggatctactgaacccggtgtcgggttgttgggatcggtattcatatcgtcaaaatcgcctacacagcccgcgaaggccattgaaagaccaataatgcttataatggatttaaataacttattcattttatcttcatttttagaatgtaacattaagattgaaaccaaatgaacgggtagacggtagagcagcggtttctacaccctgtccgttgccagtagagtatgtacattcagggtcgaatcccggaaggttattgtacaggaagcatacgttgttggctacagcactgactttaataccactgatgattgtcttgttgaaccatttgtccggcaatatccaagagaaattaagttcgcgaaggcgtacgttggtagcatcataaacgtagtttccgatgttgccatagaactgtccccaataagcggtaggattcagttcaacggtgttgggagctcctgtgtttacattaacaccctgagaaatcaagcccttaccggttgaatagaattcttcacgtccggcaactgtttctttggtctgaccattagattgcagacgcatcatagattgcagatatacatcgccaccatagcggacatcaatcaggaatccgaaagagaagtttttccatcttaatgaagaaccgatacctgctgtccaatccgggttcatattaccggaaacgcggagggtaggatctactatgtatttgccgtcatcacccacaaggcggtttcctttctcatcatatttgaaaccattcgtgtaaatctgcccgtaaggttcgcctgttttagccatgacataacagttttgtcccatcgggcgagctaatgtaatggattccactccttcgtagagttctacgacttcagaagagtttttggcgaagttcacccaaagattccagttccagtcgcgtgtgcgaaccggcgtggcattcatctgaagttcccatccccagttgtctacacgtcctgcattgatatatttggcgctatatcccgaagtgatagatgaaggcatggatatgatctggttgtatgcacgcttgttgtagtatgtaacgtcgaatcctaaacggttatcaaagaagcggatatcagcaccgaactcggtagatttgataatctccggtttaaggttagagtttgctttcgtagaaggttctgctacgcccatctgaccacctgccatgttagaaactgtagataatacagacaacagctgatatggatcggtgtcatttcctgcttcagcataagatgcgcgtactttagcgaaagaaagccagctgggaacatctactttgaacttggtcaacatatccgtcactacccaacccagagagaatgagggatagaagaatgaacggttatccttcggtaatgtggaagaccagtcattacgtacagttatatcgaggaacaggtagttatcccatgacaattgtcccagtgcatagagggattggacttctttttctgatttggaagtcgaagtagtcttggattgaccattctgaatggtatacagttcaggaatgttcaaaccttcggctgtggcatagaaactattgtactggcggttcatcaggttaccaccaacagaaagcattccggagattttggagtctgcaatcttatccttttgtgctgtaaccaggaaatctgcattgtattcagccatattgtattgaccggttgagaaacgaccatccttataacctgcacttgaaatcaagtcatggcgtatccacttttcggtcttcttgccataagtgtcaccgccgaagcgaaccatagctttcagccagctgctaacctcgtatgtcaatgaagcgaaaccattgatacgattggttacgtccttgttaccgctgagagaagtcagtgcatacgggttatttaccaccgtaagcatactgggataccagtcgataatctttccgtctttatcaaaaacatctttcatttcgtgcaggttgatgctgcgcggagtataaataagagcgaatatcgggttgaaacctgaagcagagaattcaggacgtccctgacctttctgataagtatagttcaatttggcatcgagagtcaggttcttgatgatttcgccgcctgcgcgaatagagaagtttgtcttgttcaactcattcttcgggataacacccttacgcattgtgtttgacatacctacacggtagttcatcttaccggcggaacttgtgatatcaagagaattggtccatgatgtaccggtgtccatgaaatcggaaaaatcattattttttgcttccaaaggacgggtctgtcctgtccagtctgtaacaaccgtacccattttaggaccccaggagttacgcgaggtagccacaaatgctccgtctgtaccctgaccgtattcattctggaattccggttgaatcattacattttcaaaagtaaagttgctattgtatgacactttggttctgccaccctggccttgtttggttgtaaccagaatcacaccgttaccaccgcgtgaaccgtaaagagctgtagccgaaggacccttcagtacagaaattgattcaacatcatcaggattcagcatggatagtccgtcaccggtatccgaataacctgcaccccaagagtttgtatttacgtcgtcaacgccttgagagttgtcgaacggaaccccgtccactactaccaacggcatattattaccggatatagagttgttaccgcggatgacgatacggtttgaaccaccgggaatagaagttgaagaaatattcataccggcaatcttaccattcagtgatgtggcaatgtttgcagtccggttttcaataagagcgtccccttttacgtcttgcactgaatagccgagcgccttcttttcacgcttcatacctaaagccgtcaccactacctcatccagagcatagtctgttccgcttaactgtattttgtacgtagcattatttgtaacaggaatttcctgtgcgtcgaatccaatgaaagatactaccaaggtttttccattggatggaatatccagagagaacttgccgtcgatatctgttgctgtaccgatgcctgttccttttacaagtacagttgctccgataatcggttcgccctgagtgtctgtcactactccggaaatccttcttgagttctgtgtactagacgaagtggtattttgtgcacttacactcattccagggatgtaaccgccacatataagcattaggccggttactgatagaattaaaagtttttgcattaacatagatttaataaacaataatggttaatagtccagaattatatcatcatatatgattggcttgctttgaatatttgtaacttaacttgaaaataatgttgttattttctcatactcaaagaattaccagaggctgttgggcagctgtcacattaccaatgtctatgaacagtacacttatagttactgctgagaggagtttgctgtttgcgaatccttttcttttgcgatcttcattcataaaaagttgatgattttgttgttaactaaaatagtcttctctgaaagagtaagaatgggcaattgagaatagctttgaggctatttctgctgtcaggtggggtcttgttccataggctcttttttatttttaggtttaacttatattttatctctcttattttaattatacattagctaagttccaagagaacattgccgagttttttatggtaaaaagaatacaataacacctgttggcagaattaatatctttctttcagattatgaattaaatggagtatcatcttatacctattatttaatctgaaaatactctttcaggtccttcagttttccccgagcaccctgttcatcggtgttacagctgaaacttccaaccttatgactgtttcaggtatctttcagccggaatgccgatgaacagggcgttcggggaaaactgaaacctgaaagaagaaagattgacctgaaagcaagtaatgttgtgatctggaacaagtaatgttgagaatgattacattgcttgttcttattcacaacaagcaatgtaatttcaggcaagtctgatttcatcctgttcttttagcgtctatatatcggtgacgttggatatatagatactgcgcatccgatatatagatgtgacgcgtccgatatatagatgccgcatgtccgatatacttatctttcatgccttgtttttgtattaaatagaggattatttaattaaagcccatttaattagctaacgccaaattattctttgtgtttttcttattagaaatgttatttagctctttattatttgttcatattccgatttatggtatatttgccaataaacggaacctgttttgtgatattttgccaataatcggaacataaaagtagttattatggaattatatcgtaatataatcgaagaattgaaaacgtggaaacgcaatccagggagaaaacctcttattttaaaaggggctcgtcaaactggcaagacatggattcttgagtattttggacgaacagaattcaaatacaccgtcaaattcaattttgataaggatcattctatccatgaaatctttaaaatgaccaaagagccttcgcggattatctcgcaattgtccttactgaccgattaccctatcttaccgaatgagacattgctcatttttgatgaaattcaagaatgtaattctgccttaaactcattaaagtatttttacgaagattcacccgaatatgttgtagtagctgccggttcattattaggcgtagctttgactaaaggggagtcatttccggtaggcaaagttgattttctcgatttatatcccctcacattcaaagagtttctgaaaacagccaatgagaaactatataattacgtggaagaattgtccgagatatcagctttacctcaatttattacagaccgccttagcgagttgtaccagcagtatttggtaataggtggcatgcctgctgtcatcaacagtttccttgaaaacaaaggcatggaaaaagtcaaaaaggaacaacaggcaatacttaacgcctatattttagatttttcaaagcatgctgaaaacaaggatattccccgtattatccatatatggaattctatcccaagccagttagccaaagagaaccggaagtttgtttacaaaatggtcaaacccggcgctcgtgcccgtgattatgaagacgctctgctttggttggaaagcgcaggtttgatttatcgggtgttttgtaccaccaagccctttcttcctttaaaagcttacgatgatttgtctgcatttaaagtttatttatctgatgtcggattattacgtgaattgtcaggtcttccgccggaagctatctttttaggaaatgaaacttatacagaatttaaaggtgctgttgccgaaaactacgttttgcaaagtttagcgcctcaatatgacatccttccacgctattggacttctttaggaaaagcggaagtcgattttatcattcaatccgatagtgacattatccctgttgaagtaaaagctcaaacccgtttgggaggtaaaagcttatctgtttatgatgcaacctatcatccggtatgcaagttgcgctattcattaaacaatctgaagcaagacgggacactgattaatatccctttatatttagcggattggacaaaaaagattgtatctttcatctcataatcatccgctcattatcccttgatctttatcgttgcattattaaatggccattaatttaatgaccatttaataatgtaactttagtcggtaatgttataaatagactcagcgtgcatacacaaaatagagatttgctgtacattattgaaatctacattgttttctttgataaacctctttagttcttctttttgtttaggatatagtttcaaaaactggttgaaattcttgaaaggctttttctttcctttttgctctatccaataaatgttatatcggctcccgagtattaacttctccggatcgaaatcataacgttctccgcgtcctgcatatgttcctccgtatgtttttacagaagttgtttctgtaggttggccgaacgcaccttttgaggcttctttgcgcatattccctttgtattgtacatacagtacaggattcgtcggcaaaatctcgataccattattcccttccgtatagaacacccggttaccgaattttataacctgtatatcttgcgggttacttaatgctttcaccttattatcaacacgatcaacaaaataaaatttatttgccagtatgttgtaattcattttttcgcgaaattgcgaaccgttcttgaaatagacaaccgcttcttgaaaatcatcaaaaagaaaagaagaagtattcttgtcttgtgcatatagcatacatacagtgcatgcccaatagaataaaagcaaacattttttcatatttacattatattataaatgaataaacaataatgcccgactcatttatgctgaaaacacaaatgggcgggcattatattcttaaccagaatgattcagaaactattatacaaagttaccaccctgttgtctgcgtcagtttgaaacctttctccgcataagcattgatttcttgctctcctacaggagaacaataactccggtcactgaaagtattacgcggctgaacattagtaggcatataataacctaccatttcggaggcattgctcccatcgaaagtaatgactgtaccgtcttccttcttgacctgtctcttgccaatatactgttcatccaagtaagccggaacttcttttaccatatctacccaagggcctatcattgtatccgggtacttgttgttgtccatatactccaatttcttccaacgcttgatgtcatgcaaacggcagtgctcataaaacaactccatgcggcgttcacggcggatttcccaaatcaatggggtgacatccttatccctggcaggatcaaaattttctgttatatcggctaataccatatcggcagtgtttttcagtcctttagcctgtgcagtagcatccagcggacggcgtcttaactgattaatagacgcgttgatatcttcttgagttaccccacccaattcagctttagcttcaatccaatttaacagcacttccgcataacggattaccggagcatcatttgtattggtattagaatcataaataggattgttcttgggattatccatcgtcaatgcttcacgatcgatgaatttggaagcatacagcagtgtaacagaattgatattcacatgatcaataaatgttgcctcaaaacgcggatcgcgagtttttgccaagtttgctacactcaataactttgcattctcaagatcagaatgctgataaactttaccatcctggcaaatgaaagactttgctagcgcaagattgggggctggcgcctggctttctacaccattagaataagatgcaatatggtgtttaagcatttcgaatgtataatgacgatacataatagcctctttattacctttcaagtcctgcgaaccgaacacatcacggaatggagtgtcgatagcatatttaccgctattgattactatttcggcagcttcctttgccaactgcaaatatttgtttgccgcagtctggtctccgccatgatacttctgccatgtcccctcaaaaagcatccagcgagaggcaaacgctgctgcaacataccggttcaaagtgttatcgccatcgttggtgcgtatattgaccaacacttcattctttaacatatcatgaactttatccattacaaatacacggctgtcgcggtctttatacatggcttccaggtcgctattggcaaatgaggtttcatagtagggtacgtcaccaaatacagctaccaaccgggagtaagagaagcatttaaagaaagctgctacagcatgccagtgattatacgcttcttccgttacattccctttcatattagcttccaaacgttccataaaaacgttcgctttacgaatccaggtaaaattccaagtcggaccaacgtactgggtctgataggtagccaaatcacctgtatttgaactgccaagggtactgggaatcgaattgctaaacgatgactgctgacctgtagaagctaaatcatccgaaaaggagtaaccacgcaaaggagcataattagttgtccatccatcagcatagcctacaaaatagttcctataaaacccgttggcatacagacgggcatccatctcggttttccaaaaggtgccatcagtcggagtgtttagttgcgggcggtccaaaatgtcatcacaagatgtagtagctagaactaccgcagagagtatgattaatatatattttttcatattgatatatttttagaagtttaactgaatacctacagacatattcttcatggttggcgtaccaacacctgtacggccggagttatagtttgtagagttgaacatagagaaacctgagatttcttccgcatcaatcggcaaacctcccagtttgtcaaacgtaaagaaattttcgcaggccacataaatacgagccttgttaatcagtactttcttagtccatacggcaggcagtgtataacctagcgtgatgtttttgatacggaaataagacatattgagcaagtatcgatcctgtgtttgcatgttgaaaccagtattggaacctgccagattataagcggccggataaaaagcatctgtacgatcttctctccaataattacctgcaatagcctgcggcatagcaccgtcacctgtattaaagccagggatagcaagaaaacctgcaccccaaatatcgcgtttacctacaccctgcataaagatagagaagtcaaagcctttatagtcggcacccaaacggataccatattcgtaacgcggtgtagagttaccaataacttccaagtcccccgtatcacgtttaccgtaattcggatcattttcatcggttaccgtacctactgatcgggaaccgccatcaattttcccatcaccattcacatctttatatttcacatcgccggggccaaactttattgttcccgtttggaaataatcttgatataccccattcggatctttcagtttgttcatttctttagcgccgggagtgttagcgggcacttctttaccattcaaggcccaaacggtaactaatttaccatcggcatatacgaaatcgtctttttgataaaggcgatctgtgcgatagccccatatttcaccatattttttccctatataccaactgtcaatgctctttgtatcaccataagcagtgatttcagtctgggcatccgacaaagaaaccatagcgttgatccctaatccgttttcaaatcgatgattatagtcgatagaaagttcccagcctcgtgttcttaaagagccgaaattccctttcggagaaccggcaccaaaagtccatgtaacaccttcacccggaacaatcatgttcttggtgtcgcgttgataccagtcgaatgttacccctaattcaccgttaaagaatcgcgcatcgaaaccaaaatccaatgtggctatatcttgccaagtgattctaggatctactgccgctggagttccggcataaataatcttattaccactcggatcaagccaacttgcctgtccctggctgatagtgggcacatacaatgaactggatacagtctgatcaccaatcataccccaagaacctcggagtttcaaagaagagaggaacgttttggaccagtccatgaatttctcttcactgaggcgccagcctaaagagaaagaagggaatgcgcgccattgcagattgctgggaaatttagaagaaccatcatagcggatgttcgcttccagcaaatatttgtccatcagattgtaattgacacgtccgaagaaaccgagctgaccatcccagtagaggttaccgctggaagtctgcgtgccgatggttttatcccaactgaggttattaatatctgtaaggttagtgatctgcgaccagttatcttcagattcccagtcagtccggttcattccaaccaataccttcaaattgtttttttcgttgatctgccaattataatcagttgtaatattgagcgtatgtcttttagcgttagtcacttcacgacgaatatggtcaggattagcaccgtctgcagtatactgccgatagctcaagccgtatgcaggcatagcaccttcagtacctgctgataccacttctcccatattattaacgtatatttggttaccgttatcatccaatctcttgacgggagacgtccatgtatcagcggctgtaaatttagtaccgttttttttccatatctggtcttcgcctgcataagtataatcgatgtcaaacttccaatccttcgttatttgcagagttgcgcctacattgaaactcaagtaattattctctttgtttgcagtgttcgcctgatgaatttcagaagccggactgcgcatttcatttccgttctcatcatatcctatcggataagtactatcccaacgatagagatagagccatgggtcagccgttgtagagtttgtcgcgtaagcatagcgtttgttacgtttcgaataattagctccggcacgggctgtaatatacttgttgatttcggtacttaaacgtatagaaccgttccatctgcggaaatcatcatgtttagccaatttcatcaaaccattttggtccaaataacctaaaccgacattgaacacagtcttaccactcctgccgctcaacgagatattatgtgtttgcgaaggagcccattcacgaatcatgtaatcataaggatcgaaagtacgtatggaaaacttacgattggaagcatctacgtaccagtcgcggccgtatacgaacggatcattgactcctaacttaccaccccaggttttgtcccattccttagctctttcaagactggtttcatctacataccagaatgctccatatagagtgcctttggcacgtttcagcgcatcaatgcgatactgaataccatcaactcttgccatttccatctttttggaaatattttgccaagagaaattaccggaatagcttacttctactttctcacttttagcacccttttttgaagtgatcaatactacaccaaaagccgcctttgcaccataaatagaagcagaagctgcatctttcaatacggtgatagattcaacatcatcagggttcaccatctgaatagaaggaatctccacgttgtctaacaaaatcagcggtgtagagctaccatcgatggagccgatttgtccacgtacttttatagtcggatccgaacctatttcgccacttggaataacgacagacaaccccggcgtagtgccttgtaacccccggccgatatcaggaatctggcgtccctctaaagtcttgcttacatctaccgtcgcaattgctcctgtcaggttctctctcttttgagagccataacctactactaccacctctgatagaatttcactatcttccaccaaaactattttcatagttcgggtagcttttacttcttgaggttggtaaccgacataagagattttcaatatagcccctggctttacattcaatgtaaaccttccattaatatctgtaataccaccgttggtagtgcctttttcgaccacgctggcgccaataatcggttcatcagaagcatccaagactacacctgtaacagcgatagtttgtagctgctcttttatatccggaacattgcctgaaacagtttgggtagccatcacattatcgctgcctaatagcagtgcactgattgctactgccgtgaggaatttgctatatgccaatcctcgttttttgcgttcttcattcataaatgattgatgattttgttgttaattaaaatagttttctctaaaataattagggtaaggatagtctgtatagaaatagctttgactatttctcctgtcagatagatttcttctccataggcgttcttctattttataggtttaacttatatattatctctccttatttatattacagtccaacggttccaagagaacttggtaaata

SEQ ID NO: 6304 - DNA, 84324 bp, Unknown
  gut microbiota DNA sequence
actgatactttcgtaccgatactttcaaacatttctttcagtatggcatacttctcttccttacactcatacggcaaggaattgtatttcagcaacaactcatgcgtttgtttcttaaactccataaatacgggagcatggcaatcgtaccattcgcccgacaagcatttttccagttcatttttcatacctaataaaagttactgcttcatttcgtttttggcaaagttatgcatatctaagcgtaaatacatgtattatttttctttttatttgtatctttacacccaaataacaaaaatcataagatgaaaagggaaaatctacaccagccgtttgaaatctgttttagtgaactagacgaatcgcaattaaaggaacacgaccatactttttttgagctggtctatattctatcgggaacaggtattcagtggataaacaacaacaaatttccataccatgacggacatcttttcatgattactcccggtgacatacattctttcgacattcacactaccactaagtttgtttatataaaattcaatgacatctatattcattcggctgtctttggagcggagaatattcaacggttggaatttatactgcaacacgccaaccaccgtcccggctgtatattgcgcaatcaaaccgataaattgctggtaaaaccgatgatagaagcgattatccgtgaatatgtgaataggaacatatacagcagtgaaattattacgcagttaatcaacacgattgttattgttgtcgcccgcaacattgccatgttcctgcctgaacagataaatgaaaactcggaagaaaagtcgctgaacattttgcaatatatccaatctaacatttgttatcccgaaaagataaaagccaaagcgataagccagcattttggtatttcacccaattatcttgggagatacttcaaaaagcagaccaacgaaaccatgcagcagtatatcttaaactataagatgaaaatggtggaaagtcggcttttgcacagcgaaatgagaattagggagatagtagaggaattgggatttacagatgaaagccacttgaataggctattcaagaaatacaaagattgtaatcctactgattttaggaagaagcatagggggcaataaagttcttttagtgcaaggtgcaagtatatatataaatatagcttgcaccttgcactaaccgcagaatatttatattcaatgatttgcgtatttcaaaaacaggttgtatctttgaaccggagttttaggcagacaacgaaaagccaaagacagacaaaattcggtcttttttgtaacctaagttgtacccccccccctaaggcattaacatattgataaagagttgaattaaagcgatataaggagataggttcattgccctgtctctccgcgatgaatttaataaatcccctataaacaatttgtttatagggggatttttattttagttgcacgtaactaaagcaaagaatgatgtactattcggtgttcttttttatcgactttttgcattactcttttcgatttccttcgttgatccgctaatattacaatgataacagacgtttgaacagactcagcgttaatcaaagtgtttctaacagtttgatcagttttctagcatgttctacagattttaccttttgttgttctatcaattccggggttgtacgcgtgccgtaacttacgccaccggtatagatatatcccgcaaattccatttggcaaagattacatgtggctttgtagcaaggtaagaactcttcaatcgtataccccattgcccctttgtgagaatacatttcttgcggagcaccggtggtaaatgagagtatcatctttttgcctttcagtttgttgccggtactgccatgagagaagccgtgccggaatgtttcttccatccagcgttccagtatggagggtgcgctgtaccagaagattggaaattgcaacacgataatgtcggctttcagcaggcgttgttgctctgcgtcaacatcaattttaaagtcgggataaagggtatcaagctttacaatttcagtttcgggaaggtattgcccgattgtatcaagaatcgttttgttagctaccgaagtagcaaggtctgtatgaccggatattacaagtacttttttcatgcttcaatagatcatttaaaatattctatacttcaatttgtaaccttaatctttttctgatgcaaagatacggcagttgactgtatatgtaattagatacattacggattaaaataccatttttacagatttttatttagacgttcaaatggctgatgcttactaaaaagaatgttgattcacagagaaaaaagggtaattcatctattttagtttctattattttttcaaatttatatatttgcaataagcaaacaagcaatagcatcatcaaaagcagggatataaaaaattatttggaatagctttttatagaaactgattatgaagaaaattagtcttataacaggattagcatccgtgtttttgtgccttcttttcatggggctccgggatataggtcgttatccggagaaaatatggcttcatcgttgcaattctttggaaaaattgtacgagaaacagagtcgatatccgaatgtagaggttgatctcgtctttcggaaagaccgtgtatttgatgtaacgcatgatgtagatacaagttttaatctgagtttgggttcctatttttcttatatgaaagatcatgaaggaaaaatgtggctggatataaagaacctgaccgctggaaataaacatgtagcactagagagaatgaatgagatgacggaatatttccagattgcaaaagaccgtttgattatagaaggcaaagattggaaagctttggaggctttcactcaagacggttattatacttcgtattatgtgacttatgatgaaccggatgatttgagtgaagaagaagtggatgattgcatcgaagaattacaggaaattgcggataaagaggtggttagcgctctctcatttccgggatattggtatactgagataaaagaaggtttgaaccgttccatagatttactgacctggaaacacaggagtagtcagttgcagttcttgttgtcttctgtcggacgtgagatgttggccgatccacaactgaaagtagtattggtaaaagaaaaagggcggtttcatagatgatcattcggatactgacttgctctgagagaagcaatcgtttttcagcttcgcgatgaaacaatcgacaaggaaaactgtttatttagtatgattctaaattaaaaaacgaatatattatgagtaaaacagttgatttgttgggacaacaggcagaatattacctgaaccatacgtgtaagacaatagataagaaattaattcatgttcctggacctgatgtgattgataaaatctgggtggactccgacagaaatgtacgtacccttaatagcttgcaagctttgtacggacatggacgccttgcgaataccgggtatgtatccattctgccggtcgaccaggatatagaacatacagccggagcatcattcgctcctaatccgatctattttgatcctgaaaatatagtgaaactggcaatcgaaggaggttgtaatgcagttgcgtccacatttggcatattaggggctgttgcccgtaaatatgcccataagatacctttcgttgtaaaactgaaccataatgaactgcttacttatccaaactcttacgatcaggtgatgtttggaaccgtaaaagaagcatggaatatgggtgcggtagctgttggcgctactatctatttcggttcggagcaaagtcgtcgtcagattattgagatatcacaagcttttgaatatgctcatgagttaggtatggcaactattctctggtgttatctcagaaataatgattttaagaaggacggcacagattaccatgcggcagccgaccttaccggacaggccaaccacatcggagtgaccatcaaggctgatattgtaaagcaaaaacttccgtccaataatggcggattcacagctattcactttggtaaaacggatgaaagaatgtattctgaactcgcaacttcacatcctatcgacctttgccgttaccaggttgctaatggctatatggggcgtgtcggtttgattaattccggtggtgaatctcatggagaatcggatttgcgtgatgctgttgttacggcggttatcaataagcgtgccggtggaatggggttgatcagcggccggaaagcattccaaaaaccaatggaagagggcgttcaattattgaataccattcaggatgtttatttggattcttcaataacgattgcataaagtatttaatcagtatagaagataaaagtcttctatactgattatttaaatgtaaaagtgaacttttgaactgtcatcagaaccggagtttatctccagttaaccttgagtatattttccatccatggtaaccgtacaagtttgtatgaccagggaatgctatccaataatatatcgcatgcacgttcctctacagttagagtacattcccattcagttttttctataaaacccgctctattcaaaaatgattcttggagggctctgattgaagtgttccttatttctgaccagtttgtctttgctgtttccaatagagaatctattgtgttaagttcatcttgatttagttccactcttttggggagtggctcgttggagggataatttattaacaaacggttgaggaacagatctttttcatcatactccctgtcttcatttgctataaggcgttgtaaaatgaatatagctcgtacttttgattcgttactattgaaactcctgcgatcttggcttaacatattaagcctcataaaaagcattggtagaaaaggggagagaatggccaatcctgcattgggtataggtatatgtttcaaatctccatattgttctgtaccaaaatgaggagtaggctcagggttaggagtaggaattggagtatgagttggttctgaagtagcgaagccatacacacacatatcgggagctattgcattcttatttacttttacattgccacaagttccttcatcccctgggccaatatcccagtttcctttgtcgcgtttggctatgatttttcctcctaaaataattatgtttccacatttactttttcgacctgcgtattgaccggtacctcctattccagcagatcctgcacgccaggaagtctcgtgctgataacccgcataggcttctatagttccactttcgataataatgtcgccacattcggtagcatatccgcatcctataccggctgcaccttctccaccgtatgcaattaattttccattgcctttaatgtttaaaactgattgctttctcaactgaattgcagccatttcacgaccactgtgcagtatgttgtttccttcaagaattaccgtgatatggcagttttccgcaatatgaaatgcaacacccatgtctcccagatcacataagttaacatcttgcagaaatattgttgcacgtactccggcagatactgttattccatgtcttgaattggtacctgtgatagtgtacactccatcttgggagacgtggaaagtatccgattccctactcatgtctattttttcatttttcataagaataaaaattaatattaatattgtatttgttgattatcatatattgattttcagcctgcttttaattgtttctgccttgagtgaccgttagtgcttcataacgattatccggcagtttatattatttgtaatttgaagagaaactgcaaatgaacacaggcaaaaatagtaggaagcggggaaatctaaatactaaaatcagtaaactaaaataataattataagtgcttgaaatacagtggaacagcttggaattaatattcctgtttttacgatttcagcctttttttgatgatatgaagtgtgtgctaaacaggattcagcccatgtgttttgcggtaaaagcttcaatagtgattagaaagcaaacaggggaccgtttgtttttaccctgcgtgtgttgtattttccaataagctttattgggtgttgaccttggctaacgagcctgtcaaccaaggttaatcggctcgttaaccaaggttgataggtctgttaaccttggtcaacacccgactattcctaaggataaagagatatatctctggttctcagtaaaataatgcctaatatgaaatgaataaatgcctcgtccggatatgggttgactgcgaaagtgagagtaagccacttaccctcacactggattttttactaccaccacacttaatatcctagctatcaacgattcacattaaaagtgagggtagtgagagtaacttgaaccaactttttattgaacgcgctgcattcaacttttaagtgagacatcttcttctccattccgagggagagtaaccatatcggtttttaaaagctttgtgaaatgcagaagggctgttgaaacctgtattataacagatgtcttctatttctgcattcgagtctcttagaagcatttctgcttgttcgatgcgaagtgacgtaaggtattgaagaaaactacatccatattcttgattgaaatatctatttaaataggtggaattaacggctactctttgagcaaactgctccaattttattttttgatcatagatgaattccggtgtttgtaatagttggtttatttcatcgatcttttgaggagtcaagtatactttggagttcttcttgccatttatgagcacctctttttctacaacatctttttctgatttgctttctagttgttgatttaggttattcactgggaacggggacaatgtttcccgataaatatgtgacttgaacttttgttttacgaattggtgtaagagagaattataaaagatatatccacttaatacgccaatacaaaggttgtataaaagattgcagatgtatgaagaagtgaacatattcaataagaacatgaagaagaaccctgatattaggatgctttttctttgaatatcggaagctgattttaggaatatacagtctgtttcattcatatttcgcaagagtaatacgtaaatgaaagtctgtgtgatccctgttattatacacgttaaacggaaaagtgtccaccaagccgggaacgatgatagaatttcagcccaactgtaagttaagcgatctgccaccggacttaaaactgacatcaatatgtaacaacacgataagaccatcgaaggtaacatatgtttccaccattgtgactttaggggaaatattccggtaatacggaagcggataaagaaatagagtaaaggcgggaggaaagtcagtccccaacagtatagggtgggtaaaagggatgttctttgaagcaggaagaaattttcgtataatgtgctatatgacgttaacccccagtatattagtaggattggcgctaataatatgaccaaatcctttttatgcttgtttctccaaatcagagagatagaagcaagacctagtacagcccaagtcagcagaaaagtacaaataagtaatgtctttaatatgaaaaatggcatgatattgttgttctgttgcttgcaaatgtacacacaaaagtccgaaaagagtgattttattctgcatttttttaaagtttggtaatgaaatgttggtagaaaattgtttcctttgcccccctaatctgagggttactatataacgctcgttaggtatgtaaattaccatcttgggttgtacaaatgaataattgttacaggggttatatattaattgctttttgggtttgttcgctggcggtatatggacagactgaaatgcaggctatagatactcttcgcaacatccggttacaggaggtgattgttactgctactcaatcagatgctccgggaacccgttctgtcattgggcaggatgctattcgtcatatacaggctactgacctttctgtcttatctcaattactacccggtgtccttgtacgcaatccggatctgaatgctccggccgcctttaccatccgcagtgcaacttatgaaaatacgactaatgctttagggacagccatagtggtggatggactccgcatgaataataatgccaatatgcagcaaatgggacttgaaggtaggggaagcctctttaatagcacggtattatccggtttcgatgtgcgttctttgtctccatcttctgtggagtcggtcgaggtgatacgtggtgttccttcggcacgttatggagatacgaccagtggtgttgttctggttaagtcgaaagccggaatacaaccttttactatcggcattcgtctgacagctacggagaaacttgcttctgtggggaagggtattgcgatcagtaataatgggggaactctctatttaggagcagattatgcactttcaaatcaatcgcctcaagtctttgaagaatcttatcaaagatttggaatccaggcggcttatgcgaaggatttccggtcggctactttgcgtcttaatatgcgtggttattggatgaaggacaatgataaaagagggcagaatacagtggatggtgaatttcggaaataccaggatcaaaacatatccttttctgctaacggacagtggaaattgaatcgttcctggatttccaatcttgaatatcagctagggtttacgtatgggagccagaagaatgaatccagtacatattattcgggaacacagcaagtcactacctataccgcacaggcaggtgaacatgtcggagtgttcttgcctccccattatttctctcagttatccgttgacggcaagccattgagcggagatgtatcgttgactgccaatcacagaaaaacgatgggtgagagcatcagtaaccattttcaactggggcttcatgctgaggtggaagggaatcgtggaaaaggaatcagtttcgatcctcttcgtcctcccttggaaatgctcagagtgcgaacaaggtcttatcgggatatacctttattatataagtattctgcttttgctgaaaatcactttattctccgttatgggaagatgcggaccgaagtgcaggcgggagtacgttttactcagttgccgactcagcgtatacaacggaactcttctgttgatccgcgtatcaatctttcccagatatttattgataggacggatgatgtttttctaagtcgtttcagtgtacgtctggggtggggagtgatgcataagatgcctgtacttgcttatttgtatctcgataaatcgtatacggatatgaattgctttacgtacaatgatgctgagaataatcagcgtctgaccgtcatgcatacatttgtaactgaccgtaattttaactccgacttgcgtttgcctgttaatcagaagtttgaaataggggtgaatttccggataggaggtgttactgcggatgtggtatggtttaaggaacatctcaaaaatggttattgcacctcccaacttgccgaacctttttcttatcgccgctattcccctttgatcagtaaaggagaacaaccggaattgacggatgagggtgtcatgaatgatggtgaacttcttccatatactttgaatactacgtttgctacctatttatcaccccagaatggtatagaacaggagaaacaaggtgttgagtataccattggtccgattcactcaaaggcattgcgttcttcattttacataagtggcggatatctggatgtatgcgaaaagaatacggcactttctgccttgcatccccagatagaagtgaatggaaaagcttacccttatgtaggtatttatgaaacagggccttctgttgcgaatactcaaatctggcaacaattgaatagccggtttcagtgtgttactcaaattcccagaatcggtttgatcacgagcttaacgcttcaggctgtgtggatggataaacaacagcggggaatggagagccggtttaataaccctgtgtacacggacagtaataatcagaagtgcctgaatccggtttattatatagacggagagggaaaccaacatcctttcacgtcggatatggcgacggatgaacgttttgctgacttagtgatcaaggcgaatacaactaccgcttttctgaaggactcgtataaaccttatttcttattgaatcttcgggttactaaagagatcggacgtcatgtttcggttgctttttgtgctaataacctgctgcaatccaatccgaaacgatacaggcggagcatacagaaatatgcagttgtgaatccggatttatattatggtgcggaaattagtatccgtttttaaagttagtattggtattaaattttagatattgaaagagcatgaaatattatgtattgtttttctttgtgttattcctatgtgcttgtaccggggatgagaatagttcctcatgctctgtgagtgtccaactgctttctcctacggatgaagtgaccttgccttttgaagagatggaggtggtattgacaaataaggatcaaggcacggtttatacctcttcatgtgcttctgatggagtagctttgtttaatgtggaatatggatattatacagttgccgtacattatcaatctgcttccggaattattttcagtggaagattggaatctttgtcgttattgcccgaacagggtgaagaagtgatgaaagttcagttgcaactggcgcgctctaaaataaatgcattggtcattaaagagatttattatgtgggctgtaaaggagagttgggagcagattatcaggcagaccaatatgttacactctataataactctgatgagactgtatatctggatggattgtgtctggctttggtggatccgatgccgggtattgtatctccctgggtgaaatatacggatatgaaacggattccgattgctgatatgacctggcaatttccgggtagtggtaaggagtatcctttattgcccggagcagaaactaccattgcaacgaatgctgtagatcataccggaggcgaatatcagcatgctaattcagttgatttatctaaagttgactggggattctggcatgtaagtttgagcaaacagaacatagcacccggtgtgaaaccattgaacctgcttttaaatcttaactcgaccgcatggatgtattcatttccggtagttggccccacattcatgatatttggatttgaaggcattagtgcagaggaatatgtaaataatccattgaacagggaaaacaggccccaagcttcgaataagactaaattctatttgatgattccgaaagagtgggtgattgattgtgtggagtgtgtggaaaatgaagctaagcttgccaataagcgtgtgcctgatgaactgaaccatggacctgtgtatattccggaaggagattattccgggaaatcgttgatacgtaaaagtgcagcatcaaccaacgggcatttcatttatcaggatacgaacaatgcggcagaggactttatcgtatccgaaccgtctttgaaaaaataagcaagcaactatgcggagtacattatttattttatggcttctgtcggcgattcccgtatatgcgcagtctgattcattgcatatctattctatgcaagaggtttatcagcagaataattggctgacaggagctaatccggtaggaatgtcattcaaccgtttccgctcgttctctgtggcggaagtggggtataggtttgaagatggaaactttggtaatgtcagtttgcccgcttcatccaataagtatgcggtgtttggtgaatcttaccagactataggtaatgtctctttatatggaaaaataggatatgtgaataaccggaagcaagaggtgaattggaatgggatgaccggtgactgctggcgtggaataaatctttgtgactcagtgagtggcgatcagcgttcggaacaataccaactgtccggtgcattttcattacccgtttcttcgcattggctgattggttcgaggttcgattatttagttgacctgaatgccaaggatacagatccccggaatgaaaaccagtggatggagtggaaaataactcccggagttggttatgagtgtggaagtcatcgtttgggtgcttccatattttatggcaatcgtaaagaaacggtggactatcagaatataggtactcatacggcatatcctttctttgtttcttatccgttagggtactttaaaactttgcctaaaggagaaaatataaaatggtattattctgcacaggagttcggaggattcttacaagaagagggagtttatggatgcttccggctatttcaacagataggagggaaccttgtcagacaaaatatagtaagtgaccgtatacaaaacaagaaagaaggtgaaacagatggctggaaactggattataaaggtataggttcattagtttctccattgaatcgccatgaatggagttggaaagttttgtttgacaagtcggatagttatgatcttttgcagcagcaggaagagaacatgggtacatggcattctttggggaaggttcttcgttctacttcccgtattaatgaatatgggttgacttatggttactatcgactttataatgagtggaatagtcgttattctatcgtttcgggaattgactttaagcagacaaaaagtcaattgcttttttatccggctgaatatacgcaaactgtgcaccgttttactgcatattctacatttactcggaatttcttattatctaatgcccgaattgatttagctattggggcagagtacggtaaaggaggtggaactatgatagctgaaaaacagttgcaatcaggacagaatacgcccgcaatcaaattatggcagaatatggatcggttggagcaggagtacaattacttaacagagctcagatgggcattatatttgtctctaacttatactcataccgtttcttttacttggtttgcccaattgacggcggggtatgaaaatgcttctaaaaatctttttaattcaaataaggaaaatatttctgtacaaataggattgtttttctaaatagattccgtagttttgaagcgactaactaaaaaacaatagagttatggaaaaaaaagaaattttggataatcagaaatcagatccgagacctgttggtagatggattatttacattgacaagtgtacgggatgtggtgagtgtgtggatgcatgcagtttggaacttctttacattgaaaatgaaaaagttaaaatgacagaagagagatactgtactcaatgtgaagattgtgccagtgcttgcgcattcagagcaataacctttagatagttatttcaaatgaaaagtttctatctatttctttttctgtttttatgcagtgcttgttctaattttggcaaaaaagaaattttggatgaagaattatcaaaaatgccgatattatcagttccttttgattctttattatctgaagtaagaaatttgccatctcgggataggatagcatctatgattaaaatatcgtatagaaatgaggaagaaatagatggaatactaaagcagagacaacttttaatggaggttttacctttaagttcagggaagaatagaaagacaattttatttcaattagtgacgatttataataagttggatagatttggaatttcagatgcttattttgagggacttaaatggatagaaatgctagaaacagatcattcactttcacaaaaggaagagtggcaattgaatgagatgaaagcgttattgcttaatggagtgggaaatcaagaagaatttcttcctatttggtataaattactaaaacagtatcgtgaggctgatagagctgaagatgtaggcaagtgccttctaactatagcgagtcattttgtaatgttagaagactatgataatgcattaccattatacaaagaggcatatcagctggctttagactacgattttgcagacttacagaaagcttctggcatttctttgataaaatatttatgtgtgacaggctattattctgatgtattggagtattataataagatcaaggacaatcaggaaatagcttctaatacttcaatgcagaatgaagttgtaaaaagctatatggagcttaataagcctgatagtgcacgtatttacttagctgcaaggctattatcagaaagaggtgataagattgttttaaactgtatgatggctgaaacctatattactgaagagctggaagattctgcttttgtgtttttggatagggccatgaaatcttataaagagagagcgaagaattatcaaaaaaagggtaaagaagccatcttgcctaattgttttttatctccttgttactcgtttgccgatttattgtggaaaaaaggtaagattcaacaagcaagtcaatattatatgattgttgaacctttaatgaaagagattgttaaaactcccgttcggatggagcttcaaatgaaagcccttaccaattttagttctttctgtcgtgaaactaaacaatatgaaaaagctttgagtttattagctcgacgagattcagttctgcaaacgtatttggaatttaaagcgaagaacgataaaaagaattatgcagagcgtttaaagattcaggaattgaagcatgagcttaatgagagtgaagatgtaaatagaataaatacacatgtggctgcaatctgtatttttctattagtaatttctgtagcagccacattcaagtccatatctatgtaccgtaagttgaagaaacaaggcgctgtaaattatagacttcaaggaatgattaagaaatgcgatgaaggagatgtgcctgaatcacattctgcatctatggatcaatatgaacttttattttggcaagccttacataaagttcgtgacgaacaatacttccttaaaagtgaccttacgatagagacattggctgatgtactgaatacgaatcgttcttatttatcggttagcatcaatagattctgtgataaaggcttcagtgtttggctgaataatttccgtattcagcatgccgaacaactgatgagagaaaatccttcaattgcccttaaagacttgccagaacagtgtggctatgcaaccactggtacttttgttcgaaactttaagcggtgtcataacatgagtccaagtgaatttatgaataaacttctcattgaacaaacacttcctaaagtagagaaaacttttcagtaaattgattatctttgagcacactaaatgattcataacttaattatcctatatcaatgaaaacaactattttattaccggtaatcagtcttttcttattccttgcatcttgtacgaatcccaatgataagaaagtaaatgatcaaacttccgaatcctccgaaagtggtataacctctactgattggcgatctcgttacgataaacttgaagcctccgatttgcccgacaatgtgattcaactgattggtaaagagtggatgcttgtaacggcaggtgatgaaagctccttcaatacaatgactgccagttggggtggtatgggatacatttgggaacgtccttctacctttatttttatacgcgatacccgctatacttatcaattcctccaacagcatgagagttttaccctcagcttctttaatgaaaaatatcgcgatgccctgcgtatatgcggtacaatgtcaggaaggaatacggataaggtgaaagaggccggacttactcctctggaaactccttcagaattaatgagctttgaagaagcacgaatgattattgagtgcaagaagatgtttattcaggagttggactatgccaacctgatcgaaccttataaatcaaaaatcatggaagaagcttataaaaacgaactttccaaacatcaaatgtttatctcagaaatcgtcaatatttggattaagaaataatattcaacgaaattttggtcaattattccttttcattggtaaaagaccaaagtgtttttggccaattcttggaattcatagtcttttctgtatatttgcgcccgcattttcttaattatcacttatatataattgtccctataatcagaatttactaaactaggtagagtttatggagaaaataaacgcagtaattacaggagtcggaggatatgtacccgattatatcctgaccaatgatgagatttccaaaatggtcgataccaccgatgaatggattatgggacgtataggcataaaggaaagacgtattttgcatgaagagggactgggaacttcgtatatggcccgcaaggctgccaaacaattaatgcaacgtacgaattctcaaccggatgaaattgatctggtgattattgctactaccactcctgactatcgtttaccttctacagcctccattctgtgtgagcgactgggattgaaacgtgcttttgctttcgatgtacaggcagtttgcagcggtttcctgtatgcactggagacgggagcaaactttattcgctcgggaaactacaagaagattattgtggtaggggctgagaaaatgtcttcaatcatagattatacggatcgtgccacttgtcccattttcggtgatggtgcggcagccttcatgctggaacctactacggaagatttgggtgtaatggattcagtgctgagaacagatggtaagggactgcctttcctacatattaaagcaggtggttctgtatgtactccttcgtattatacgctggaaaatcacatgcattacatttatcaggaagggcgtacggttttcaaatacgctgtggccaatatggctaatgcttgtgaagctgtcattgaaagaaaccatttaagtaaagacgatattgactgggtaattccacaccaggccaaccagcgcattatcactgctgtaacgcaacgtctggagattccaaccgagaaagtgatggttaatattgagcgttatggtaatacgagtgccgccacacttccgctttgtatctgggattttgaagataagctaaagaaaggtgataacctcatctttacagcatttggggcagggtttgcctggggtgctatttatgtaaagtggggatatgacggaaaaaaggaatagtagcccgggttactattccctataacttttcttattataacaacccggatatacaaatagtttatctcatcaccttttgccaaaccttcattctatttctttttttgagtatcatatatattgaagttattataaaatattatctttgtggggaatcattgcatgacaacacattgttaaccatacaataacttaaaaaacaaccaacgtatgaatcatgaactatcgatgagtgccaaccaactggtggctgctcttcaaaaaccggcttccgaatttacgaaagcagacattatttcttatatcaaggagaacgatatccgcatggtgaacttcatgtatccagcagcagacgggcgactgaaaacattgaattttgtcattaacgacgctgcttaccttgatgccatactgacttgtggtgagcgtgtagacggatcaagccttttcccatttattgaagcgggcagtagcgacttgtatgtagtgccgcgtttttgcacagcctttatcgatccttttgctgaaactacaacactttccatgctttgctcttacttcaataaagatggtgaacttctggaaagttcaccggaatatacgttgcgtaaagcttgtaaagcctttactgacgtaaccggaatggaatttcaggctatgggtgaattggaatattatgtgatatcagaagatagtggactgttccctgctacggatcaacgtggctatcatgaatctgctccttatgctaagttcaatgacttccgtaccgactgtatgctgcatattgcaaaggcgggcggacagatcaaatacgggcattctgaggtaggtaacttcacgcttgatggtaaaatctatgagcagaatgaaattgaattcctgccggtacgtgccgacctggctgccgatcagttgatgattgcgaaatgggttatccgtaatctggcctatcaatatgggtatgacattacgtttgctccgaaaattacagccggaaaggccggttcaggattgcatatccatatgcgtattatgaaagacggccaaaaccagatgttgaaagacggtgtactttctgaaactgcccgtaaggctattgcgggaatgatggaacttgcaccttccattacagctttcggtaatacgaatcctacttcttatttccgtttggtgccgcatcaggaagctccgacaaatatttgctggggtgaccgtaaccgttccgtattggtacgtgttccgcttggatggtcggcaaagacagatatgtgtatgctggctaatccgttggaagctcccagccactatgatactacacagaaacaaactgtggaaatgcgctctccggacggttctgccgatttgtaccaactgatagcgggactggccgtagcatgtcgtcatggttttgaaattgaaaatgctttggagattgcagaaaagacctatgtgaatgtgaatattcataagaaggaaaatgaggataagctgaaacaattggctcaactccctgatagctgtgccgcttctgccgattgcctggaaaaacagcgtgctattttcgaacagtatcatgtatttagtcctgcaatggtcgatggaattatcagtaaattgcgttcctatgaagatcgtactttacgtagtgaagtacacgacaatcaggaggaaatgctgaaactggttaataagtatttccattgcggataaagtgttgatatcaaaactgctacaaattgtggcagtttttttatttatagatgtctctacagcaaaatccatttgtcttcatagcaaagcccaagtcatttctatcgcataactttgcactcgggaaatatatatcttaattatataatttgtaaatgagaagtttgttatgaagaaaagaaaaattggtgcggcaggtctggaagtctctgctattggttatggatgtatgggtctatctcatggctatggtacaacgccggagagaagtgaagcagttgctttaatacgaaaagtttatgaactgggatgtaacttctttgatacagcagaaggttatagtgccggtgagaatgagaaattggttgccgaaggtatcgctcctattcgtcaggatatcattttagcaacgaagttccgaattaatcctgatgaagacgtttctactatgcctcggttgatggaggcggtggaatcgcatttggatgcgtcattaaaacgtttaaatacggattatattgatctctattatcaacatcgtgtcagtaagcagattccggtggaagctattgcctggtgtatgggcgagcttataaaaaaagggaagatacgaggttggggacaatcgcaatccacggcagaacaaattcgtttggcgcatgctatcacaccgctgagtgctgtacagagcgaatactctatgatggaacgcatgtttgaaaaagaggtaatacctgtatgtggtgagttaggtattggttttgtaccgttcagcccgttagcaagtggctttctgagtggcagatatactgccggacaggaatataaaggcgatgatgtgcgtcgcgtaatcactcgttttgaagaacagaatgtagtagcgaatcaaccgttgcttgatttactgaatttgtttgcccgggaaaaggaggcaactcctgcccagatttctttggcatggatgctacacaaatacgattttctggttcctatacccggctcgcgaaagatagagagaattgctgaaaatcaaggggcggctgatgtagaactaactccggatgagtttggaaagattgaagaagaactgtctaaaatctccattcacggcaacagaacggatgaagacatagccagactctatcaataaaaatcggtagccgagtgtcttaatcacggataaagtagtatttttgtctttgaaacagctatggatatggaagataaacatttcaccaactattccaatatctttcttaatatgaaagtaatggaagatacggtatgcgattatggtatacctgaacattgtctgatttatgttttctccggtcgggtggattttaatgaacccaaccacgctgctaccataaaggctggtgaatgtgcctttatccgtaagggacatcggataaagatgactaaatatagtgatgagaatacccatatttatcagtcagctcttcttaggtttccccgtaagtttctattggaatattatcgccatcatggagatgagaagtttcccgggatagccaggcgaagtaaaaatagtactttgagaataccatcgcgtccggatgtcacaagcctttttgaatcgatctttccttattttaattcgtctgtcgtgcccgatgaagaatggctggagatgaaattgaaggaaggattgtatgtggtattgaaatctgatacagatgtttatgcatctttgtttgattttgctgagccctggaagatagatatgctgggttttatggaagaaaactacatgtatgacctttccattgaagaattggcggcatataccggacgaagcctgactggatttaaaaatgatttcaggaaagtgagtgagcttactccgcagaaatggattataaagcggaggttggaggctgctcatgagttgattgtcaatcagcactgtaaagttaatgaagcaatgatgaatgtcggctttaaaaatctgtcacatttctccagaatttataaagaaacttatgggatagcacccagctttaatagatagagtgatacttttgatagcaaataaataatagagcggggatccatccttttggacatatccccgcttctgtttttatatagagtttttgtgtttctgtttttacttaatatacacttgtcgattgaataactatcttttctaacagctcctgcattttccctacaaccggttttttatcaagaccgtattctgcacccatcactctcatttgcgggaaagtagtccatacactaccgttcttgtcttcccagacagatatcttcaatggtaattcaatggagatgctgggattatcctgcattaattgggttcctaccttgggtgaaccaaaaacgataacttggttcggacgaagttcaagacctacctcttcggcattttttccatggtcgaatttagcaaatacaggtatccccatagccttcagagtctgttcgatgcggaccattgtttctgctacgctgaactggctttcgtaggtatagagcaggttatcattggcacctgttcccatcttgttgctatcgaaggcagcagcaattttgcgtcccaggtttgtcaggtcaatcccttctttgttggcaagcagagttacgcataccagttccgatgcatccgtaaagcggcttaggaaagctgaatgtcccgatacgcttccttttatatccatcagacctttgtgattgtagaactgccaaccggctatcgcagggacaacctttccatttgccagttttgtaggcttatagatcatattccggttttccggtttagctatcagtacacctccggcaaggccgatgtcccaatggctgacattttcggcagatgcccatatatcagaaaaacctttcattgaagtggggctaataacaggggcggcaactaattttccatccttttctatatatcctgtagtcgtctctgacgggttgatgtagtctttatctttcttgaaagtctggtgtacgttagcagtcgttgtaacatcttcttgctttactctggctaaatcctctccgaaataggtctgttgcagaccgaggtaatctatctgatacttcttcacgaagttgtgatacgacattttgcttattttctcaataatagaagtcagcaacaggaagtttgtagcactctgctttacgtctgtacccggttcaaaagccagtggaatagtttctaccgtttttatcagttgttcaggttggtaatcggcagatacgttgaagcccttttgcgaacggtagtcggcaatgcccgaactatgttgcatcagctggaggatactgatatttttccagttctccggaatatccttaaaatacttgccaatagtatcgtccaggtccagttttcctttctcatataactgcatgatggctactgccgtgaaaccttgcgaaataggaccgatgggccagagtgtttttgcagctgccagattccctttttcgaaatctgttactccgtagcccactacacgcgggatgtaaggtgcctgtacaatggcgagggtcatacccggtatgccctgttcttccatgaactcgtaaatcatttggtcgatagcttttccctgataggctacatgcacattgcctctgccttcttgcggcagttgattttcatacttcttcataattgttcctccgtcttgtgctaaaatcgttcccgaaatcagcaaacttgctaatgttattaatttctgtttcatattatttttcgttagagttttattcttgttttctgatgttgcaaaggtaggcggttccgttggggtgggggataacgatatcacacgtatagtttgcaattattcccgattgcagggtattcctgctttttcatgaaagaatagtgacccgggtgaaacaatatctccaaaaggattggcttttccagttgattttaatagatttgctgtttactcaataaagaatacaccatgtccgaaattgcgaactatttcctttatagaaatgccgaaggcgaaaccggtttatccgctaacagcattgacgacctgaatctggatgacctgtttgccgaaatagattattgtcattccagtataggcaggcagtatttgtattatcttctgctatcggataaaacctccggcatggaaaagcaggaagcacttctgtcttcattggcaactcatacggagttgcgtactcttttaagcaattcactgaaagaactggataaaccggatgcttattccatcgtatccattctggaaaatgataatacagggattggtgccaaggagatggttcttattaatatctgccggtttctgcctttgctgtttctggctctgatgctgctcactcattcgggagtgtttcttactttatttgtcttttcattcgtggcaaatgcagtgttgcactatcgtaataaggcgaaaatccagagatactttttctccatacctcagcttctgaagatgataaggcaggcgggaaagctggcgcagaataaggagtttatctctgtagatccttctatcacgactgacttgaaagctgtggaaggtctgaagaagtatatctcttatttccgtttcaacctcagtctggataacgacatggctattatgttttatatggtagcggaattaatccgggtattctttctccacgaggcgtatgcggtaggcagaacttttcatctgttgaaggagaaggcgacggctatccacaatgtttaccgcttcatcggttttctggattctattttgtctgttgccatcttgagggaggagctaccttattactgtctgccgggagataacagggtaggggagcgattgcgtacacaggcagtgtatcatcctctgatagaaaactgtattccgaacgatatggtgcttcatgagaaatcggcattgataaccggttcgaatatggcaggtaagacctgtttcatgcgtacgataggagtgaatctgttggcagcgaaaacacttcatacttgtttcgcagaagtctttgagataaatactggaatttctcttctgtcctccattcaccagggagataacctaatggaaaataagagttactttatgcaggaagtgacgactatcaaagatttcgtagatgaaagcggtcgtggaaatcatctcttcctgctcgatgaattgttcagaggaaccaataccaaggagcggatagcgatttcgaaagctgtgctttcctggctggtgaaaagtgataatctggtatttgtatctacgcacgatctggaactggccgatatgctggaagatgaatacgaattatactatttcagcgagtcggtgaaagatggtatcctgtctttcgattacaagctgaaacgtggagttgcgaccgaacataatgcaattaagatattggagatttgcgattatccggcttcgttggtgagtgaggcccattcaatcacaagtatataatgaaaaacagagagagtgtaggtatgataccccgcctccctctgtttttacggtaatgaacagattgattacttcttagcttcatcagccatagagtgcactttgcctttgatatcattggctttttcagcaatgacagacgtttcattggctactctgtcagcaactttttctccggcatacaatgccttttctttagcagattcgatcaggcattcggtatgtccttcaattctgtgcagggcatcgaatacttctgctttcattttttttgctcttgcactgcgggcaaagccataagccagtgctccgaagattgaacctattccaaggccaatcaaaaagtgagaatctttacatgtcataattaaacaggtttaatggttaaaaactaaattaatgttctattttggtcagagaacagagtgcacaaggcattagttcaacggggagggaaagaattactactatttcacaatttatgagaatcaggagttgaattaactctttcttttcgggttatgaattaaatgggtacgcggacgacacggataaggcggacgaacgcggatttaaaaagctgcgctatactattataaatgataaattaaaatccgcgttcgtccgccttatccgtgtcgtccgcgtatctattcatttattactataccgttataaatcaaattcaataccagatttgtataatttataaatattctcttgccggattcctttagctttatctttggcgcccataaacattactactgcacgtacgttctgtggtacaagcagttttttgaatcatgtaattaaaatcaatgctttatgaatgtagaaagaaaaaatgcgaaagatgacttacggctctacataccggaagtcatcgggatgctgaagcgggaaggaaagttcccagcaatgcatgtttatgcttgcacgctgcgttcctatgagaagttttgtgcagaggaaaggcatccgaaaaacaccactgcttccctgtccatgcaggagattttcacccctgagaggctgaaagagtatgaggactggttggctggacaacagtccagtccgaacacgatctccacttatatgcgtacattgcaggcggtgtacaatcgctggatgtcaccgggtatagaggggtacaatccggtgctgttcaaggatgtttatacgaaagtggagtcgcgcaccaagcgggcgctgacggcagagcagatggagcaactcaggaatacggactttagtgtgctgacactgcgtcaacagcaagtgctcacctacttcctgctgatgttcatgttgcgcggtatgccgttcattgacctggcacacttgcggaagtcggatttgagaaataggcgcatcacttaccgtcggcacaagacggggaaactgatggtggtggatgtgccgcccgatgcgatgaggctgttgcagaagtacagggataagacggattcggaatatttgttcccgttgctgcatggtggcttgttcatggaggaacatcaccaccgttatcaagaaacattacggcatttcaaccgggagttggcgcggttgatgaaacagttattgcctggtgtttccgtaagttcgtacaccgcacgccatacatgggctacacttgcttatcatagtggtgtacctgtgggactgataagccagtcgttggggcactcgtccattcgggtgacgatgacttatctgaagccgtttgatgcggaggtgatagacagaataaacaggcaagtgatttccttagtgaagaaaagtaaaaagaagaaagatggcagatttaatatgctgtatggcacttcgttgaggtgaaattacttgcatagtaacggcaaatagcagctacaaagttgcgtcttttttgacagaaaagcaaacaaaccctaacaaaatatgaataaatcttatatcggacagcaaaaacaatattaaaattagtccctaatacatacagctttcgattttttatcccagcaggcaaaaggaatcgtgtttccgctttatcctttgaaagtggaatgcttctttacgtaccttattatcaggaaaacttctttttaccataaaatgataccgtctgaaaacgcctttccggtctgcatcaaatggtagtttgccgttactatgcaagtaattccaacaaacgcattaattatactgtttatgaagactatagaacttcccatcaaaagaggagaccgtgtgtgggtgaaggtttataatgaacgaaatggctcattcacttcgcgtatggcggaggttatatctatattgcaaatgtatgtttccggggcagatgtaccgtatgtagcattgcgttatctggacgaccgcagctatggatgtattccttatgaacaagtcaccgaagtatgcgacgaatctttttctgaataacagaccatttgatagaatctgaataatagtactgtagttttgttgatactaatagccctgctttcttcatccgccagtatcgtctgacaaagaagaaaagcagggctttcttttataaccaacccgaaaactttctgatataccagttctttatcaattgagtcagtacgcaataggagagcagaatacccaccagccacgggaagtaactcaatggaagtgcctgcaaacctatggatgctccgaaagatgtgaatggtatcacaattcctataaccatcaccaaagtagtcataccgattacgggccaagtggcacggctctgtatgaacggaattttccgtgtacgtatcatgtgtacaatcagagtttgcgaaagcagtccctcaataaaccatcctgattgaaacaaggactgatgttccggactattacagccaaacacatgccacatcaccagatacgtgacgatatcaaatatggaactgatgggcccgatgtaaatcataaaacgtttcaggtctgatgcatcccatctgcgtggttttctcagaaactccggatccatgcggtcgaatggaatcgtagtttgcgagatatcatatagtaaattctggatgagcagatgaatcggcatcatcggcaggaacggcagaaacgcacttgcaaacatgacactgaacatattaccgaagtttgaacttgccgtcatcttgatgtacttattgatattcccgaaagtcttccggccttccagtactccgtcttccagtaccatcaggtctttttccagcaggatgatgtcggcactttccttggcgatgtccacagcggaatctaccgaaatgccgatatccgattgccgtaaggcggcagcatcattgatgccgtctcccagaaaccctacggtattctcctgttcctgtaagatggaaataatctgtgttttttgtagaggcgtcaatttggaaaagcaggtagtggtctttacacgctctttcaaaatagcctcatccatattctcaatatccggtccggtcagtgaataacttgtgtcgataccgacttgcctacctatggctttcactataatatcattatcccccgataaaattttaacttccacaccatactcatgcagttgcttaatagcttctgccgcagatggtttcgggggatcaagaaaagccaggaagccaatcagaaccatttccttttcatcactcacggagaaattacccaccttctctatatagcttttctgagcaacggccagcactctcattcctttccggttcatttcttcgctgatcttttgggctttaaccttcagtttatccgtcagaggttgtacttccccattgaactctgtgtgcgaacagatactgagcatctcttccacggcgcctttggtgatgatctggcgtttcccttgtttgtcttctatcactacggacattctccggcggatgaaatcgaacggtatttcgtccactttggtgtaggcatccttcagatgttccagcttcagttcctttacgtgcgagaggatggctttatccatcagattctttagcccggtctgaaaatagctgttgaagtaggcgtgacgcaatattcgtttgctttcgtcattgctgccatcggcattgatgtacttttccagaacaatcttgtcgcacgtcagcgtacccgttttgtcggtgcaaagaatattcatcgcaccgaagttctggatggcattcaggttcttaacaatcgttttcttcttcgacatggacagagcacctttagagaggttggcggttacaatcatcggaagcatctcgggcgtgagtcccacggctaccgaaatggcgaagatgaaagcctcgaaccaatcccccttcgtaaacccgttgatgaagaagacgaacggaaccatgaccagcataaaacggatgagcagcaggcttactttgctgattcccctgtcgaaagcagtagtggcacggtgtcccgtgaggttgcgggcgatagtaccgaggaaggtcctgttgccggtttcaaacacaatacctttggctgcgccactgataacggtggaacccatgtagcagatgttatctagttccacgatgctgcctttccggtattgcttttcctttacttccggaaacttctctatcggttccgactctccggtcagggaagcctggctgatgaacaagtccttggattcgatgatgcgcaggtctgccggaatcatgtctccggctgccaggaagacgatgtctcccggaaccagttccgtgatatccagttcttcctcaccacttccggcacgcttcacgagacaggtattctttaccattttcattagtgaatctgtggcttcattggctttccattcctgccagaaacgcaggatggcactacacaccaccatgacggcgatgatgacgactcccgtccattcctgttctcccggttctgccatgagtacgtcgatgacgagtgatatgactgccaatccggtcagcactcctatgaacggattgatgaaagttttgatgaatacgatgaacggatttttcttttgttcgtgaaccacttcgttctttccatacgtaagttggcggtcttcaacttctgctcttgtcaacccgagccttgtcgtttgcaggtatgagtaaacggattttgccggttgtgtggcagtcagaaatactttctcggagttgagcgcatactgaggctgctgtaactttttcttccacttcataatctctttccttttttttgaagttactaattgcgtttctatttcacgtcgcaaaagtaagaatggcttcgtggaaaagccgttagagatttattagagtggtattagaaaaccattagagaaatcagatatgcgggagtttaacgacgtaagtggttccttcacccggatgcgagaagacggatatttcccctttgtgcaggctcagtatcttttgtgccaaagtcatgccaatgccgtagccggatgccacatctttgttttcgccacggtagaagagttggaacaagtgctctttgtccttgtccgacatgcccacaccgtcgtccgaaaggcggatgatggaccattcttcccagaaagaaatctggataaaagaagtttggttccgggagtacttgcaattgttttcgatgaggtttacgaacgctgttgtaagcaggtaactattaccgatcactgtgagtaccttgtcgtcttcggcttcctgctcgaatacgagttccacatggaaatcggggtacgccctcaagacaagttcccttgcatcgagcaacagttcgtccagacggatttcttctcttttgatctgttccggttcataatccgctttggcaaggttcagtaatccgtcgatgagtttaatcactctttgcgaatcctgcaacgcgttgtggatggcgttttggtattgttcgggacttcgttctttctgcacggcaagatcaagttcggcagaaagtgcagccataggggtacgcagttcgtgcgacacgttgctgacaaacatcttctgcgaattgaatgacttttccagtctgtcgagcaaggcattgaaggtaaggctcagttcgcctaattcgtctttctcattcttgacgggcaggcgtttgttgattcgtgaggcggttatgttctccgcttcttttacaatgcttctgatgggggccaatgcgctccgggcaaggaggtagcctacaataatcagcgcggtcagtccgctgaatagtaatagggcgagtgtttctttcaggatttcccgtttggcatatccgtagccgtcataagcggcggcggtaacgatgtaatccttaccttcgaaagtatagatgatacctactccctggtaatcttcgatgtagaagtctatttctttcttctggaggatgcgctctatcatttccggagtttcttttatgatgtcgttttgcaaggcatcgtggtataacatccggaaatcggtgtcgtagacggctacttctacttcgtcgataaactttttattgttcaggtaaatggattgcatggtttcggcatccacctggttgttcagaaacagatgtgccttggtgatggcttcgcttttcagattccggaaaaaggcattgctgcgcgagtgctcactgacgtagtagatggtagtgataaataccaggaacacggcggctgtgatacaagtgtaccgcagggttaaggctgttctgatcttcatagtttatccgtcagtataaagcccataccggctttggtatggatcagtttggtgtcgaaatccttgtctatctttttgcggagatagttgatgtatacgtcgataaagttggttccggtatcaaagtgggtattccaaaccttttcggctatctctatgcggctgagaacccgctctgcattctcggccatgtagagcaacaggttgtattctttgggtgaaagtttgatgggagtgccgtttcgggttacattttttccttgtaggtcaatgtacaggtcggaatatctgatctcccggggttgcggtgcggctgcttcattattacgtttcagcagtaccctgattcttgcgtagagttcgcggaaatcgaaaggtttcaccatgtagtcatcggctcctgcatcgaatccgtccagtttatcatccgtagagcctaaggctgtcagcatcaggatagggatgcctggattcgttttacggatttctttacatagctcaaaaccatccatcttgggcaggataatatcagaaatcaccaggtcgaacgtatggacacggaagagacgcagtcccatgacaccatcgtaagctaccatggtttgataaccattctcttccagtccattcttgagcaggctggctactcttggttcgtcttcaataatcaatatcgtatgcatggtctgtattttttgtagattccagttgtttttgtttgagaccatacaaatatagagattatttgtgagtttctcttttcttactcttttaataaaggcaactggttcagcatattcctgattttaatagcgatacgtggcattggttcggctacggtcagccctaccaggtcatattcggagacaatgtcgttaatcacgcggactacttcctcggtcttcataccgtccggttcaacgccgacgcctgctatcatgtcggcaggatctatcacgtccaagtcaaagtggacgacaaccttggaagctccggtacttttcagccattccataatggcggaactgttgtccgctgtttctttcggtgccagaccttttatgcccaattccttttgccgttcctgcatgcctttatcccatgaacgcagtcctactattaatgctttggaagcgtcaaacttaccgggcagtaagttcataatctcttcgtcacccattcccaagcaagcggtgagggccatggcatgataccctttgtaatcatcataaggcaggttgatgtccggatgagcatctatccagattatggctacatcgttcgggtatcgggcagccagataagtgaacggaacaacgctgaccgaacattctccgcctagggtgatgatccggtccggtttgttttcgttaagtatatcgagcgcagccttgctttgtttgacaatcacgctacgggagttgatacctttttccgttgctctgtcgtttatatcgagagataccggaacttccacggttttctgattgctgtccggagccagcaggttcagtaactgggcacctaaataataacctctggaagagtcttctgccggaatatccggcatccagtgatctacaattccgccttgccattgcggataaatcaggcggagaggggtggtttctttcttcatatctttactttttacgggtgttttttttagtcgaatggtaccttccagttttcatcctgataggcggcgaaacacatggctatctgttctttattgttcttttcttcggccaatgcaggtatctcgtccaaagaaaaatatctactttcagtagtctctatattactctgaaaacttccgcctgttacttcgcaaaaaacaaaggctttgcagacattgtatgcataaggaggcacgttgtgcaggtttctatcctgcaaagcaatcaggcgtacggcttttacgtccagtccggcttcttctttgacttctttctccgtattggttttgatgctttggttgacgtctacccagccaccgggcatagaccatacaccggctttttcttttaccaggagtattttcccgtcattaaagatggcggcacgggtatccagtttaggtgtttggaaaccggtttcattgcagaataattcttttactttctctatcggcagatcgctttgatggctcatgatctctgccgatatttcccggatacgttcaaaacgttcgatgtcgaagggatcgcgggagtaggtcagccctgcctgagctatgaattgtaattccttggcccattcgagccagcggggatcagtgttcttgttcattggatatctgagtttaaagtatcatatacaattttggatatactggcgatgatagctgcattatctgcatcattttcctgcgactccatgacgaagacagctatataatatttctgtccgttgggcaggataacaaagcctgcatcgttatcagcaatctttatcccttccggagtccggtcggaagagcctgtcttatggcctacgattacgtcggcaggtaactggcctttcagcttatctttgccggtagaagtttcctgcatgattgcttgaaggaagtctttgtattgagttccaaatagggggtgcttgtcggctatattcagtaatctgactacttcttccggagtactccagttcagataggcatctccggaggtatgcatgaggtcttctgttgccgcaagattacaatcttttattcctaacgatttcacatactcgtttacttgatctataccaccggcatattctataaggatatcacatgcgttgttatcactctgtgagatactgtactttagtaattctccgagagaaattgtaatatcctgatcggggaatttatctcttaacggactgtatgtattggacttcagttgtgaagatttcacttcaataagactatctaaagcaatatgtcctttatccatcttatccagaacagccagtcccacatgaaacttgaagacgcttaacagggggaaatggatttgattattataaacagctacagtctcatcattggcgagtacggcaacgcctaccgtagcttttttatctttcagaagggaatctatttgttgttctatcttctgtttcggggtgcggttggtggtattgcatgcactgaacaagattgccagcgccatacagcttaaaaagaattttgctttcataaatgtactttagtgagttaatattaattccggccttacttctcttatcataacaagtgcaattctttagcaatccggcaagcttcaatagaattgtttacctgaagtttctccaagatattttgccggtgccggtttacggtgtttatactaatggataatgtctgggcaatgtccttactcatttttcccttatttatcaattgcaggatttctttttcccggtctgacaacaggtcgttgcaattctgcttttccagttcgagggtttgcccgtctgccgagttaagaatggtgcaacttaacgacgtatccattgaaaagttgtaaaggcataaggataaccatacacttccgtttgagtggctcgctatataaaacatcctgtgcaagatgtgtacatacctgcccgaatgatcgcgcatgcgcatattgtgtataaggtagtagtccgggcgtttcttttccgggacacttttcaggaagtggaagaagcggagctcctgcaaatgcttctcctgtaagtcgtccggatgaatgcggctgaatatttcttcttcccatatcgactgaatggtcttggcggtatttcgttctgccagtcccagtttctcggctactccgccgtaataaatataactaatattggctttcatatcacttaacactgctatggcattttcagtctgtgcatatatggaagctatatgtttgcactcattcaggcgttccgtttgtttctgttcctcggtgaacgcttgtttcagtagctctttcttcagtttatttacgatgtccatacggtatggagatggaaaaatggttattaatcagtattgccgacttatctgtaagcctttacctttgcaaaggtaatgaaaactaatggttatttattttaagtgcaataaattatggagagtgaaaaagcaaaagcgaaagccgggaaattgtatgatgccaataatgatatagagcttgtgtcggagagggaagcttgcaaagaagtatgttatgaactgaatagcttgcgcccttcacaaaagaaggagcgggagagcattatccgccgactgttcggtaagaccggaaaatcgttcttgatagaacaaccattttattgtgattacggatataatatcgaaataggggagaacttctattcaaatgtgaattgcgtcattctggatggagctaaagttacatttggtgataatgtctttgtggctccgaattgtggtttctatactgccgggcatgccttggatgcggaacagagaatccaggggcttgaatatgcctatcctatcactatcggaaataatgtgtggattggtgcccaggtctgtgtgttgccgggagtgacgattggtgacaatacgattattggtgccggaagtgtggttacaaaaagtattcctgccaatgtgctggccgtcggtaatccttgccgggtgctacgtacgatcatcgaagcggacagggctaaatatatgtcagaataataattcattaaaataacacgagaaatgaaaaagttactttttagtctgttgatgatgattgggatacaagcctcttttgctcagacattggaaaaaatgcagtggttcaacgaacctgaacagtgggaaataaaggataaaagtctttcgatgtttgtcactccgcagagtgattattggcgtatctctcattatggctttactgtggatgacgcccctttctattatgcaacgtatggcggcgaatttgaagctaaagtgaaagtgacgggcgattataaggcacgctttgaccaggcgggactgatgttgcgcatcgatcatgaaaactacatcaaagcaggcattgagtttgtagacggaaaattcaatctgagtacagtggtgactcacaagaccagtgactggagtgtaatcacgttggataaacctgttccttatatttggattaaagctgtccgcaggctggatgccgttgaaatcttctattcgttcgatgacaagacttatacgatgatgcggaatgcatggttgcaggataatattccagtgaaggtcggattcatggctgcctgtcccgatggaggcgggtttaatgttaaatttgagaacttcaaggtaaagcacctgcctgatatgcgcaggttggaatggctgaaaaagaatgcagaataaatagggttagttcaattaagtttggtaaaaagacaaatgccggtaaaaagaagagtgattctttatttgccggcatttattctgttttgaaatttaaagaaatccttttctgaaatagccttgtttaatatcctatggtgaagcgctccttgtggtggtgcttctgttccaattcgtctaccattgccacggcatagtcttcaacggagatattgctgtctccatttacatctaccactaagtcgtcttttccgatacggaactttccggtacgttctcccggtgtcatgttggcggcaggggagaggaatatccagtcaatatcgttttctttacgaagtgtattcagatagaattctccgagggatttgattccgggcaacagtttggctggaacatcgtcagcatccatcaccatctttccgggagcatagaacagggttccggcaccgcccacgataagtagacgctcaacaccggccttcttcacactatctactatcagcggatagtttttcagcgtttcttcgtatatattgggattcttccagccggggttataagcgctgatgacggcgtctttacctttactggcctcaatcagaacatcggtatcggtcacatctgcctgaacgactttcaggttcggattgctggcggtcactttggccgggtcgcgtacaatggcagttactttatggcctctgttcagcaattcattcaggatggcggttcctacaaaaccgctggctcctatgagtactacatttttcatattggttcgttgtttatatttatatattaaactatttatcttcaataaaagtttgacagtgattgctctttttgagaatgtttaataacttatcctcttttcaatccgtttaatctccgggatacaagaaattattcttgaaagtgctaaaaaataatcttacaacagttgtgcttcttttttacaacatctattgtaagaaagaagcacaactgttgtaagaaataataatatttgttgtaagaataataatgtgtataaacagagttagtttcttgcgaataggattttagttctatgcaattacagaaataatttataataagttgtcaatggcccctttgcaacccagttgcatttcctattccttacctttgtaccaactaaaaaaataaaaagattatggaaagtaaatgtcagtgttgttgttcacatactcattcgcagagcaaagaaaaagagaaatctatcattaagaagtggtgggctccggtgttgtctggtgtcttccttctgttgggtattatcttccagcatcaggaatggacgtggttcgttaatccggttatcgagttcctttggtttcttataggcttcctgcctgtcggactgcccgtgatgcgcgaagcttgggagagtattttgcaaaaagactggttcaatgagttttcgctgatggcattggcttcccttggagctttctatatcggagaatatccggaagcactggcagtaatgctactctattccatcggagagatgttgcaggataaggctgtgaaccaggcatcccgtaatatcaaggatttgctggatgtacgtcccgaacaggtagatgtgtaccgaaaggggatactaagtactgtttccccccgtgaggtaaatgtaggagaagtgatcgaagtgaagcccggcgaacgggttcccttggatggtagcttgcaaaatccttatgccgtcttcgatacttcggcactgacgggggagagtatgccgcgcaatgtctccgaaggaggcgaggtgcttgccggtatgattgtcagcggacaggcagtgcgcatacaagtgacgaaaccttatgatcatagcactctggcacgtattcttactttagttcaggatgcggcggagcggaaagcaccggcggaactttttatccggaagtttgcccgtatctatacaccgattgtagtcctgttggcttttcttatcgttgctgttcctgcacttgttgcggctgtgcatccgggatttgactatgtgttcaatgactggctctatcggggactggtgtttctggtaatatcctgcccttgtgcattggttatcagcatcccattgggctattttggcggaataggagcggcttcgcgtacaggtatcctgtttaaaggaagtaattatctggatgccataacccgtatcaatgcagttgtattcgataaaacaggtacgttgactaccggtagtttccgtgtgacgtccatacaggctacagatatccccgaagatgaattactgagtttagtggcatctgtagaaaagaaaagtacccatcctgtggcacaagccattgttcactatgcttccggacgtggtgtgaaacctgcggttgtgacttctctgaatgaattggccggatacggtctggaagctgaggtggaacaccatcaggtacttgtcggtaatatccgtttattgactgaccgtcagatagctgtacccgaagaacttgcggattgtgtagctacggtagtggtctgtgccgtggatgggaagtatgccggacaactgctactttcagacactttgaaagaggatgcggtagatgctattaaaaaattaaaggctttaaaaatagataatattcaaatgttatccggggataaacaagagattgttaatatctttgcaaaggaattgggaattgacaaagcctacggtgacttattgccggaagataaggccgttcatttggaacaactcaattctgttccgggtatgtctgtcgcatttgtcggagatggcatgaacgatgctcctgtattggctctcagtcatgtgggtattgccatgggagggttaggttcggacgctgccatcgaaagcgcggatgtcgttattcagactgatcagccatccaaagttgcaaccgctatctctatagggcgggcaacacgacggatagtgatgcaaaatatagtaggtgctattacggtgaaggtgttggtgttgctggcgggtgcctgcggatttgccactctttgggcggcagtgtttgctgacgtcggcgtagctttgttggtggtgctgaattcagtccgtatattgagaaagaagttttaagaaatatggaagaaatatatttgcataaattgtccctgcgggatataaagcctacggccatgcggctgctgattctccgtaccatgatggagatgaagcgggcagtgtccgtgactgacctggaggataaactcgacacggttgataaatctactatcttccggacattaaccctgtttctttcccatcacctgatacatggagtggacgatggaagcggttcgctgaaatatgcggtttgtgaagattgttgtatgtgcacggtggaagaccagcacatgcatttctattgtgagcagtgccacaagacgtactgcatccgaagtgtgcatgctccaacggtcaaccttccggaagggtttatgcagaccggtataaattacgttatcaagggcatttgcgcagactgtgcagtccatcagaaaatagacacagaagaataagaaagatattatgagacatttctactacttgtgcttccttttattgggattcctatctctgcctgtccgggcaggggaggataaccgtgcgtcggaacaatataccagggagtatattatgaagaattacatgacggagcccgaccgcgccttgcagttgctggatgaagccgaagcaaacagtgcaatgcctctgaatatcgttgacgaactgcgtggtgtggtctatcgcaatatgtacagaaataaatctgctcttcattatacccgcagggcgtatgttcgtgactctctatttcataatgacccttcgcatctgctggagatgacggtatctatggctgaactgtctcatctgttaagtgactacaaggagagcatgcgctatgccattcaaggtgtggaattggcgcgtgagcttaaagatatacagtctgaatgtaagttattgttttgtatgggagagaacaaaaggatgcttacattcaaagaagagggataccagctatttgatgaggccattgatttgctcgataattctaaaagtaaagactatgaaactatgctttcctatttttatggggtgaaaatgggttatctgattgctgataagcggctggatgatgccatagaaataggtttgcagcgcgaaaaactgcttgacaaaacaagtaggcaagcggaagtccgtgctgacatactggaccagcaatttgcgtatgtatattccaagctggcttatcttttccatagaacgggagacaaggagcgtgcagcagcgtattataagaagtatcagtcgacggatgcctctgccactgttgatggcaggttcgacattgctccttatttactggcattgggacaatatcaggctgtattggataattgccttgattttaagaaaatgatgcgccagcaggatacactgaataaccagtatctcagtatcctgaatctggaaatattggccaatactaaattagagaactataaaacggccataaatcttcaaagggtgatcgctgcaataaaagatagcatttatcagcgggagaaacagaatgccgcactggaactggatacactctacgaggtaaatgagaaagaagcccgcatctcggaacaggcgtttcagttgaagatacgaaccattacgctgatatgtattctgagtggcgcattactggctttattctttttgtggagactatggcatcaaaattgtgtaatcagaaacaaaaataaagcgctggtaaaacgcattaacgagcaattttccatgcaggaagaaatggaccgttcgcaactgggtgtagagaaagatctctcttttccagagaaagtggaagacgaatccggtgataacgaggagcaggataagcagatgaataagatgattttcgaaaagctggattatattataaaacgggataaaatgtatctttctcccgacttatcgagagaagagctgactagaattgtccgcatgaataatactcgttttgccaagatgataaaggagaatacggacactaacctgaacggatatatcaataacctgcgcctgaattatgcgatacatttaatgaaggaacaacccgattacactttgcgtgcaattgctgaatcatcaggcatcaacagcatgcctacattccatcagttgtttaagggaagaacgggaatgactccttcggaatttaagaatgctcagaaggatatggattcttaaaatcctgtatattagttgtatagtactttttttaatatcatttgatactatttttaataatcaattgaaaatataacttaggggttatcttataattgagtttctttgtaattcaatatataaggataacttgaatcatgacgtatatattatatttaataactctgtttgctttcattgtttcactgatagcggcagtctattatttccgaaaatataataaaattcgcaaccgtcttcctgatattgatggtgaggaggaactaatgaagccttataatcttttgatgcaggagttggagcagaagcaacagcaactgaaacagcaaagtcttcaacaccacttgctggtgaaagcaattaagctgaaactatggaagtgggatttgaagcgtaaagagattatttgggaaggaaacctggagaaaggggagcagggaactgtagtagtagatgtggatgagcacctgtcgcatgtattaccggaatacagaaaaagaatctatgaagcgatagatggattggagaaaggttgttccaagcttattgatgaagagttcttataccagaatgcggacaatactttatcttggagaaatatctatggtatcatatatgagtatgatgagggtggaaaacctgctattctgattggaggcacccagattattgacgagaggaaaaagctggaaagcgatttgcggaaagcgaaagacaaagcagaggaagccaatcgactgaagacggctttcctggcaaatatgagtcacgaaatccgtactcctttgaatgctattgttggtttctccagcatattggcggatactgaggatatagtggaaaagaaagaattttgtaatctgatcaatcacaacaatgcgcttctactgaaaatagtggatgatattcttgatatttcgaagatagaggcggggtatatagatctgcatcccacgtggttctgtctgtccgacttgataatggaaagtgctaccgagtacaggatgaaagcagccggaagactggatatccgtattcataaaccgagacagggctatatggctgaactggatacaaagcgtgtgaaacagatattgaataacttcttgtccaatgctttgaagcatactcaggaagggtatattgatattacttatggcgttacagaacaaggtattgagataaaggtaacggataccggatgtggtattccgcaggataaattgcctgttatttttgaacgttttgaaaaagtggactcttttacacaaggagttgggttagggttgcctatatgtaagtccattgcggaatgtatgggtggatctattgggttgacttcggaagcaggtgtaggcacaactgtttgggttacattaccttgtagtactgcacctactcccaagttatacaaggagaagttaatcgacaacttctattcctaatcctgtaagcaacccttccagtccgtagcgggagaacttcgcttttttcagacggttggcagcaggatttaaagcataattgcgtgcagtagtgaaatctgctttctccaggttggtatgatggaaagaagcataacaaaggtcgcaatctttaaatactgcattggaaaggtcggtttccataaagtctgtgttttgcaaatcacaccctataaaacgggttcctttcagtttcatctcagtaaaaagggcgtaggacaacagacaattatggaattccacagacaagccgaagcggttgctgaggctgaagttgatgcctgtcattttgcaatcggtgaacaggacatccaaccaagaggtattactggtttttactaatgaaaggttgcactctttgaatgtacatttttcgaatataactcttccgataggcttatctgaaaagttacatttgtcaaatgtacattcataataattggtttccagttcctcgatggagaaatctactttttctatggtcttgtcttccatttatcttttcagttaattcattgctttgaatacgggttccggcttctgtatctccgattcgaaaccaaaccaatagccttgattggtttcctcattgacaggcaggaaacaaaggcggagattctctttgtattggccatacagtacttgccagttctccgggggaacctgccgtttggtctttaccttttctgccggaagttttttcagtgacatgccggcctctatccaagcaatgctggcttctaactgatattccggatagttgtgcttacagaattcatacagaataagtcctcgtttttccagacttatcggttggtctatcaaacctatttgtatcaggtgttccagaaaccgatacaggaatttttcttctttcagaatgagtttacgggtgatggattgccaggctggagtattataaaatccatccagcaggcgggagagttgacgggctgtttgtaattcacttacattgatctcgcgggtttgaagcacttcatagggtggtaagggagaatattggatgcccaattcttccgctcttctacgcatttccgtaccggggagtaatttgagagactccagttgtatttctcctgcaccgtatgctgccagaacacggatatcttcgaatatttctgaaagatggtagagtgggagtcctgctattaaatcggcatgtgtttccatattggggagagaacacaggaatttcagaccttccaatgcgtctgtcagctttcccatcctccggcttttttcgagtacaggttcacgcaggctttgtatgcctgcttccaggtgtaacagaccttcgggcaagtgtttcaattcttctttcagttcttcggaaagaagtgcagggtgtatttccagatggaagcgtatatcagggtggtattcaagaaaaagctcaagcagttcttttgcccggcgggtattgtaattgaaagtacggtcgagtacacgcacgtttttaataccatgttgatgaatgatttggagtcgttcgcgaatagcttctatggaaagtgtacgtacaggcttttcacctccgctgacgcagaatgcacaggtgttgaaacagcctcgtgtcgtttccaactgtacgaatggtttgctccaattaaagaaacggcttttttcgggaggtatgagatcagagaatttcagtacacgtgctatgccgttgtctctgtactgcccgttggagtcgagataacagagtccgggaatggtattccacttttcctgttcgttccggcatgcgagccattgcgggaacacttcttctccttctcctctgaatacacagctgacataagggttcttatgtaggaagtattcattgtctcccagatactcagggccgcctaatacaatgcagcattgtggcagtagtgcttttactcttgaaaggatgtggagcaattgctcatggttgaagagccaggttgtagcggcaagtatgtcaggttggcgatggtagacttcattgacagtcagacctacattctcattgatagtggctgatacgatatcccattctatggatgtatcatcagcaatctgggcatgcagtgccggaaatgccagggaagaatgtgcgtatgaactgttgaggtcgagccagagtaacttcattttatatagggttgggtttacaaaaacagttgcaaagataatgaatgtattcctatctgcctcttttctgcctgcccaatcctttgctttatcggtttatggtatgctcttttagcctgctttaggtccgacaacggatattctgacgcattcgctgggaactaatgttagtaattcatccaggaactcacgactgcactccaacaaggtttcctgcatcatttcttctttagaagtagcgaagaagtgaaacaggttatcagaatcaggaagtttctttactgaatagactatatccgttgatttctcattgtatgcttgcgccaaatcatcagctcttgcccagaattgagttgctttgtcaccaccgatttctacgactgcaattaatttttcgtttgtttccataatcatttatttttagttatacatgttgtcatactaatatcaggagtatattggttaatactctgtaataatatccgcaaatcgagtgccagcaaacagaaaataagcgtaggattatctactttcaacttttttaaactaaaagactgtttgttgtacacctgataattccgaatatttagataacaattgagccttttttatggttttggacatttactttttttacagaaacatgggcatacaggtgcctgaatttatactaactttgcagtgcttttaacgagttaataataaaatcatttttaagatgagaacacttcaagaagaattaaagtgtatgcgcgaagggcttcattacgatgctcatactcctgaaatgtatgcctatcgggctgaagtaaaaaagaagctgcatcagttgaatgtgactgaatatcatacctctaaaatgccggaggttacccgttcacttttcccgaattccgctccggatttttttgtagaaccacccttttattgcgattatggggatggtatatatgcagctgaaggagtttttatcaatttcggtgctgttattttggatggtgctaaagttactattggccggaaaacgctgattgctccgggagtacatatttatacggcgcaacatccgcttgatgctgacgaaagggatgcctatgagaattgtctgccggtaaccattggtgaacgttgctggattggcggtcatgcgacaatttgtccgggagtgactattggcgaccgttgtgtaatcggtgcgggttcagtggttacgcatgatattccggcagactcgttggctgtgggaaatcctgctaaagtgatacgtaaattgaatcagaaataatcctgttattggggttgttgtttgaaatatctgaaaagtaaatccattaattctcgttttttgacgggcttggtcatgaaatgattgcatcctgcggctaatgcattctctctgtcggagtcgaatgcattggcagtaagggcgataataggggtagtctggttgaattcccggatgagggaagttgcttccagtccattcattaccggcatccgcatatccataaagacgatgtcaaaggtctgggctttgattttctcgatagcttctactccggttatggtgcgggttagttgattgtctttaagaagtttcttgattaacaggtaattgctgtcattatcttccgctatcagaatattcagatctttaatctttactgaggaatctgcggaaaggtgttctgtacttttgttatttaaatcctcgtctgcaacctctgatttttcgacatattcgacatcggtatatccgatgtaccagaactcagaacctatgttggctttggatttaaagcctacttctccgcctgtagcatcggcaatggctttacagatagaaagtcctaagccggttccttgggcaaaagtatctaatttctcgaaacgactgaagatacggttttttttctcctccggtatgccgatgccgctatcctttacatagattcttacctgtccgggcatacattcgtatcccattacaatttcaccttgtggcgtatacttaatggcatttgtagcaaagtttgtgaatatctgcataaagcgatatttgtcgaaattcgccacacatttggtatatggattgatgagtttgaggataactttgggatttttaatccgttgctggaaggatcggtacaattcatcgcaaagctggcacaaattcagtttctgacgattgatatcaatggagccaacttcaatttttgacagatcgagaatgtccccgattaatttcaggagtatctcactgttggtttcaatcagttgtttatattcaaatttttcttccgcatcatccgtttcggtcagcaattcggagaatccaacaattgcattgagtggagtacggatttcatgactcatgttagcgaggaatgtggacttcaatttgtccgcttcttctgctttgtttttggctgtaatcagattttgctggtatataatgtcttcggtaatatcccgttgaataaatgtgatgaccactacattgcctgcttcatcttctactgcactgtaggtaaagctggagtaactataatctgttgcattgttttccagaactcttaatataatcctgttttccgggagtttctgtttatgagcaacagcttccagtaatgccatgaatttatttctgtcatcgggatgaatgctctcatatatggattgcaatgatcttttctcaatattttcgatatgaacatcgaatttgcaaaacagaccttcttttatattgtagttccatgaggatagcttcccagcattcaaggctagtgataattccttttgtgttgcttttattttcttgtagctttcaataatttcccgctcttgtgctttctttacggtgatatcttcacaggctaataaatagccttgacgatttcctttgggatcgcgcatgatagttactttggtgacaaagtattttctgattcctttgatgggtgtttcgtagaagttttcacaaagatcgaaatcataatcggtttcaaaagagacattccacccttgctttaggagagttttatcttctgccgtgatgttagggtcatcgaagatattaatattataaatatccttcatagttacaccgaacatttttagtgtagtgtcattggcgtatttcagatatccatctttatcatatacgccgagccctaaaggtatatattcaggaatgagcgacagaagttcattttccatgtttattattgcacctatgatgtttttataagtgtggtgcaaatgtatgcaaattcccggaactttatgattatcgtggttaatatttgttgggggctggtcggaatagtaaactttaacatagaggatagtaaagtgttatgaacaaaaaatcctgtaagtcataaacttacaggatttctttgggtgactgatgggactcgaacccacgacattcagaaccacaatctgacgctctaaccaactgaactacagtcaccatgtttgcgtcatttctcaaacgcggtgcaaagataggtattatctttgatactgcaaatatttggcgaaatattttattgaaatctgcattattttttattcttcttaattcctacattgtgctgttggaggagctttcgggagtttttgacgaagatattcaaatggttacgtgcagcttccgggagctttgaaatagatgtggaatctgtgggataaagcacatagtttttttctttggtgaaattgggacgtgctgtccatacgaaattatatccgcaacgttgtactcgaacttgtgtggaggtagatgttgtggtgtctctttctaattctaatgtgaaaataagtcctccgtcagtatttactttactcatattggagatgaaattccctaaagaatatactacagtgtgttgtgttccggtaatgctatccgtgcgtagttccatgggttgtataacatgaggatggctaccgatgatatgggtaacgccctgtttcaataaccaatcagccaattgttgctgttcgcgactgggtagtgattggtattcgtttccccaatgcatacaggcaatgataacatcaggttgccatgttcgtgctgtatcgatatcctgtaacatgattttcttatcaatatagttcactatgttgggagaggatggcttaactccattggtatcataggtatagttaagaagggcaattcgaaaaccgtttttgtgaatgagtaatgggtatcgttgacggcgttcttcttcatttctataagttccggtgtaggggatacgtaaggaatctaacattaggattgtacgttccaaaccttttttaccgcggtcgagacagtgattgttagcagttaatagaacattgaaaccggcctctttaatggcatataaatattcatcaggtgcacagaaagccggataaccactataaggttttccaccgataggtacttctaaattgccgatagcgatgtccgctccactgatttgctcttttactagagagaagcagggagagtagtcataggtccctttatctgtacgcgcggcgtcaagctgggcttggtgttgcatcagatcacctacaaataatagagtgatttttgcaggggggattgtatcagtggattccggtactacttgttcctgtgctgtgctacaacacgatataaagaagaaaagtaatgcaagagggattgtctgtctcatgactttgagcggattaaggttccactggataaaataaataccgaaaggagtcaagttgtcacaagaggttccttccggtattcggtatttttattattgatatattgctttcttaccagccagcaatgtattcttcatcaaagaaacgatggtcatcggtcctacaccacccggcacaggagtgataaatgaacatttcggagcaacctcgtcaaacttaacatctccagtcagtttgaagcctgatttttttgtagaatccggtacacgtgtagtacctacatcaataactacggcaccttcttttaccatttcagctttcacaaagttgggttgtcccaatgcagcgatgatgatatcggcttcctgacattcttttacaagatctttgctccggctatggcatacggttacagtagcatctcctggataggctttctgcatcatcagtgcagccattggtttaccgacgatattactacgtcccaatactacacacttcttacccgaagtttctatttgatagcgtttcagtagttcaagaataccgttaggggttgctgatacatagcaaggcaatcctatggacatgcgacctacattgatgggatgaaatccgtctacatctttacgataatcgatagtttcaatcactttttgctcagagatatgcttgggtaatgggagttgtacgataaatccgtcaacatctgcatcttcatttaattcacgtactttagcaaggagctcttcttccgtaacatccgcttcataacggatgaggctggatttgaatccacaaacttcgcatgctttcactttggcagcaacatacgtttcgctgccaccatcgtggcctacaagaattgcagcaaggtgagggcatttgccaccttttgctacaatttctgctacttctgcagcaatctcctgttttacttgttcagagattgcttttccatcaattaatgtcatataaatatttttgttttgattataatttatcttgtattaggggtctaaaagagtatcgcaaatatagagcaaataaccgaatataacaacaatcccgctgacttcatttaaaatatgaaattagcgggattggtatgcttgcagtttatctttattatttcatcttcggcatcattttgcccatcttgctacccgttaccattttcatcatcttgcgggtttggtcaaattgtttcaacagacggtttacttcttgaatattcgtaccactacctttggcaatgcgttgacgacgcgaaccgttcagaagagccggattactgcgttctgccggagtcatcgaatagatgatagcctcaatacttttaaatgcattatcatcaatatcaatgtccttaatagctttacctacacccggtatcatagaagccaagtctttcaggttgcccatctttttgatctgtgcaatctgactcaagaaatcgttgaaatcgaattgattcttggcaatcttcttttgcaggcgttttgcttcttcttcatcgtactgctcctgggcacgttccaccaatgaaacgatgtcacccataccaaggatacggtctgacatacgtgagggatggaattgatcaatagcatccagtttttcacctgtacccacaaacttgatcggcttgttcaccaccgaacgaatggaaagagcggcaccaccacgggtgtcaccatctaatttagttagtacaacaccgttgaagtcaagtcgttcgttaaactcttttgctgtgtttacagcgtcttggccggtcatggagtctactacgaataggatttcgtttggattgattgcttttttaatagcggcaatctcgttcatcatctcttcgtctactgccagacgtccggctgtatcgacaataactacatcgtatcctttggctttagcctcttgaatggcgttttcagcaattttcaccggattcttgctgtcaggttcagagtatattggaactccaatttgttcagctagtacgcgcaactgttcaatagcggcagggcggtatacatcacaagccaccaacaatggcttcttgttctttttcgttttcagcattcgtgccagcttacctgagaaagttgtcttaccggaaccttgcagaccggacatcaaaataactgccggctttccttccaaatcaatctctgctgtttcgccacccatcaattgagtcagttcatcgtgcacgatttttaccatcaactgactgggctttacagctgtcagcacgttttgtcctaatgctttttccttaacagtatcagtgaaagttttggctactttgtagtttacgtcagcgtccaacagtgctttacgcacatctttcagggtttccgcaacattgatttcggtgatctttccttcacctttcagaattttaaacgacctttccagtctttcgcttaaattatcgaacatgatgatataattctatttataaattacaaattactcttattgaggcgcaaaagtacaaaaaatccacgtatctaccttcatttaaggcaataatattattcaaccgaggtagcgggataagtgaaaagaatagttggaccttctttgctatcggggattacttgatatgtaccgccaaagtgttttataaacagacggttgacatcattacgcaaagcggagtcttgattggcatatttgaggtctgcgagggggcagttggtgattttaaaacgtaatatttctccgttcttgttcagagtgaagttgagatcgcgttcttctttgaaagaagcgaatggacaagttagaatactgacaacgaattgcatgaaccggtttgtgtctgtatggatgatatattcgtcaatgttactgatgaaatgagtatgcaaggtagaattctgcatatgtgccattcctacagcatcgttgcagagctgtacgatgtcataattactcatttggaatttcatcataccggcttccaggcgcgacaaatcaaggacattgttgactaaacgcattagctgatccgtgttttgctgaataatttccgcatattctttacgggtttgatcgtctatttccgcttcgtttgctatgatttgtgagaaccccaatactccgtttaggggaacacggatggcgtgactcatattggagaggaaacgattcttcatttcattggcttcttctgtctgtcgtgtggctttatgagtctctttttctgatatctttagtgcttttcgtatcagattgatgcggaacatatagccgatacataagatcaaaatgattccgagactcaaaagaatactggtttgtacacgatttcttagttttccacgctcccataccaattggttcagatgatgtatttctttgatttcctccagctgtttagctgatatggcggcagtcagtgaatcctgaatatgattggaactttcgtacagtggcagggcttctgcatatttacccatttcttgcagaatgtcagctttccgcgataattgtttggcatactccatttgggcagattcaaattgtttcatctttatcagagcagaatctatatagagaagtgcagcctgataatcttttgtatgccggtaatactccgcacttgcatcataatacagggccatatagggaatataactctgcggagttatgaagtcttgagcttcttctatatgatatttagccgagtctatctttcctatccctgtataatagtaagtttgaaaaatttctgagaatagataaagattgaaatatgattcatacatatccggatctaaactaagcattttttgcaatagctgtttgttttctttcagatacgtcttcaggcttgaatagtctttctggtctttactgaatacaattaattgattcagaacattaaactgtgtactgctggttgtttgttccgaaacatatttgtgagcttttcgaagcgcttctccttcttcttttgtacggttggtttcatggtatgcacttgccagacatgaataagcagctatacggccgtctgtgttattcagttcttctgctttctcaagcatttttaatgattcattgatggcatattcatatttctccttatatgtataagtataaataagcaatttttgtgcattgaagtacaacctgaaaaactccatgcgttcagcaatgggtttcacgtagttcaccagtttactgacactatcgacttcattcttattataatagtacaatattttgaaatatgtactgctgcatatatatttaggattcttttggtactgtgcttcgttgaacatttcttcagcatattctatataatgcggagagttttgttcggtaagcacgagtttctcaagtaattttaatcttgtggtgtcatgcggaagtgcacgcagttcgattaacagactgtctgccacagatgatttttctgttatattttctgcaaatgcgaggaaactttgtaggaaaagagcgagtattaacaaggtttgtttcattgcgctgcctcctttctgttggtagagtgaattggatgagtaaacaagaagcgggaaccatccttatattcaggatctatccatattcttccgccgaaacgttctacaattaattgacagatagagagtcccaatccgctgccttgggcattttcattcagcttttcaaaacggttaaatatctgtccctgtttttccggggcgatcccacaaccggtatctgtaaccgaaaacacagtcatttcttctgattctttctccaataataaggttatgctaccttctgtggtaaatttggttgcattaatcaacagattgataagtaactgctggaggcgtgcttcatccgtatagatttccattttttcctgagacgtttggaataggactgtggcggatgtttgctttatcttctctaccgtatccactacattgcgacaaatagctactgcatcgctgtttccaaactggaattgcattttcccgatttccaaactggaaaggtcaacaacatcgtctatcagcttcaaaagtaagtctgaattttgctgaatgatttcattgcattgttgtcgggttccgatgtcaatattagcatcggtcagaatagatgagaaaccggacaaggcatttagtggagtacgtatttcatgactcatattcgacagaaaaagacttttggtacgaatggagttctcagcactttgccgggctttttccaatttatgttgagatgcaatcaagcgtgcattgattttacgaatataaagtacggatacaatagatatgcctagaatgaggatacaacctataattgaataaaaaagcagacggcttcgctcgctttgattatccatctcgagacggtccacctgatatatggttcgcaacagatttatctgggtggaatagttacgggcattgatagaatctcgtgcaatattgatgtcttgaaaaatggcacatgcctctctaggcctgttttgtttggtatacagttgtgccagtgaattcttcatttttagatatctgttatagacattggcactgctggtatttatggtcagctcattatataatttgatagctagttcgtcatctccaattcttttggcatattcagcttgtatatatttcaagatagaactatgaaaataaaacggatagtattcataccattcttctgcttcctgaatatatttccggactttatccatatcattattatggaggtaataatatgcttggaagatattttctatgaaacggctgtgctggtaatcattcatttgttccatttgatccaaatgggctttagcttcatccatcctccccattctgatgagggttggaattagttgaatcaagactttttcctgtaatttttcggagtcggatactttatgcaatttctgcatggctatttcgtattcttcgatagcctcattattcatgttggcattaagataagtatctcctattgcataatgggctatggctatgccgatatcgtatttcatttgagtggcctgtttcagcataacatttgctttttccaacgcttcgttgatgtggccgtctgaaacgagggcatatacagccatctgctgcataaggaacatgtatttatagtcctttctgctacggaatacttctacaagttcattttcccattgggcgatatctcttaatctgacttcctgagaataacctaagttattatccatcaggtattccataagatgtatacgctcatcttccgaatccttgcttgcagacaggatataggaagtaccgtaaaataacatcaacaataatagtatgatcgttttactgagcttcaccttattaactaatacgtttatacaatgatatgtgattaattgcgacaaaaataactaaaaaggacgagatatccgaaaatgtctcgtcctttttgtatatttaatcctatttcttgttgattatatcctttggcttcagttttagctgttcatactcattaggaattcgtcgttgtctttggttttttccatacgatcttttacgaaatccatagcttctatcgggttcatatcagccagatatttgcggagtatccacatgcgatccaatgtttgcttatcctgcaacagatcatcacgacgagtgctggaagcaacaatgttgactgcagggaaaatacgtttgttggacaggttgcggtcgagttgcaactccatgttacctgtacctttgaattcttcgaagataacttcgtccattttagaaccggtatcaatcaatgcagtagccaggatagtgagtgaaccaccattttcaatattacgggcggcaccgaagaaacgtttgggcttgtgtagtgcattggcgtccacaccacctgaaaggactttgccggaagccggggataccgtattgtaagcacgtgccagacgagtgatagaatccaggaagataacgacatcatggccacattctacaagtctctttgctttctccagtacgatacctgcaatctttacgtgacgttcggctggttcatcgaaagttgaagcaatcacttcggcatttacggtacgagccatgtcggttacttcttcggggcgttcgtcgataagcaacatgatcatgtaaacttccggatgatttgctgcaattgcattggctatatctttcatcaggatggtcttaccggttttaggctgtgccacgatcaatgcacgctgacctttaccgataggagcaaagagatctactacacgggcagacatggagtcggagtagccacctttgcataatctgaatttttcatcggggaataacggagtaagatgctcaaatggcacacgatcacgtacgaaagccggatcacgtccattgatttttcctacctttaccaatgggaaatatttttctccttctttcggcggacgaattacaccttccacaacgtcacctgttttcagtccgaacaatttaatttgggattgtgatacgtaaatatcatccggtgaagaaagataattgtaatcggaagaacgaaggaatccgtaaccatcctgcataatttccagtacaccggtaccggtcaagatatcatcgaattcgtatactttttcgcgctcaattaccggtctgcgttcttgcacaggagcatagttatcaccagcattttgctgcgcgggacgttgttgctgaacaggacgcgggttgttgttacgattattattgttgttattattataaggagtattattattgtcgcgaggacgaaggcgtgggcgttgtgcggttgcaggcgtgggttctgctacgggtgctataggagtctcggctttggtagcttcgaatttgcccagcagttctgaagggagctctattttctcagtcgggagatcttcgatgggaatgaagtcatcttcgggttctgataagataggactgtcctctattacgactttcttaactactttaggtgcttcggtttcaaagttcaattcaggttcagcttttttaggctcttccttctttgcaacaggcataggtgcgggtatgggagctttttcttccgtcttggttttgcgcggacgccccggtttacgtttcggagtagcgtcttcggctttttcgggagcggatgcagtggttacaactgcttcaggagctttctcagctaccggtgcttttgttgcctcagctactggttgtaccttggcagctgcaactgtggtttcagcttttgccttagtgaggtcgccatttttgttggcggtgaagactttgtcagtactctctttttttacggttacgcgggtacgtttttgttgtctatccactttacgctcttctttcagcttttcagcagcaacctttttggtagcacctgcgatggcttgttcatcaagtatcttgtaaacaagttcttctttttttagtgagtctgtctttttaatacccagctcttgggcaatagattgaagttccgacaaatttttgtcgttcaattgaatgatattatacatacagtatatatgtgaatggtttaaaatttcttttgttattggacagatatgttcacacggctgcggttgtcgtcacaagcaacgtggcaaatatacctttatttaatataatgattatgggatatttattattgaaccggaaaactgttagctacccgcacttaggagtttacagaatgtttcaacggtgcaaaggtaataaatatttttggtttcataaacaattcgtcttttttttaattttaaaactttatctttgcttgataaaccaagaaaaagcgcatatatttatggatataaacgaagttcatttcatctatttttcgcctactcgtacatctaaacaagttggcgaggcaattgttcgcggaacaggattaacaaatgttgttactacgaatttaacactgcatactgctgaggtagatattccggagaatacactgactgttattgctgtgccagtgtatggtggcaaggtagctcctttggctatggagcggttgcagggcattcgtgcatcaggatctccggttgtgctagtagtagtttatggtaaccgcgcgtatgaaaaggctttgatagaattggacgcatttgcttctgctcagggcttcaaagttattgccggggctacttttgtgggagaacattcgtatagtacggaacaaaatccaatagccccagggcgtccggatgcaaatgatttgcaatatgcggaggaatttggtgcaaagatacggacgaaaataaatgccgccattgatatggaacacttgtatccggtggatgtgaaccgtatccagcgcccgcgccagccttttctgcctttgttcaagtttctgcgccgggtgataaagttgcgtaaaagtggtgttcctttgccgcgtgtaccggaagtgaatgcggaactttgcacgcattgtggcgtttgcgctgtacattgtccttcaggagctatcctgaaaggtgacgaatgtaatacgattgccgaaaagtgcataaagtgttgtgcatgtgtcaaaggatgttcgttcaaggcgcggacgtatgatactccgtttgcttcattgctttcagactgctttgtgcggcagaaagaggaccggattattttatagctttaatcctacatgcaataaactcctttcattcagaatttctacagaattctccgatacatttgtgtctgtatttaaaattaggaactatgaaattattgatagtagaggatgaacgtgaattgtccgacagcattgtgagctttctgtgtcgggaagattatctgtgcgaacaagccttttcttttgctgaggctgtcatgaaggtagaactctacgaatatgattgtatcttgctggatttaatgcttcccggaggaaatggattggatgtgctgcgaaaaataaaaagtacatcgcctcagacgggagttatcatcgtgtcggcaaaggattctttagacgataaagtggcgggactgaagatcggtgcggacgattatttagccaagccttttcatctgccggaattgagtatgcgtatttttgctttgttgaggaggaaatgttttacgaacagcaacactttacagaatggtccgataagtattgatttgcttggtaaggtggttagtgtcggaactgtcacgcttgatttgaccaaaacagaatatgaacttctgttattcctcattgaaaaccgtcgtcgtgttgtttctaagagtgcattggctgaacatcttagcggggacatggcggatatgatgaatgactttaacttcgtctatgcccacatcaaaaacttaaaagcgaaaatggcggatgtgggtatggcagattgcattaagacatattatggaaccggatataaatgggctatagaatcatgaaaagtcttttgcataaaacactctcgcagttccttgtctgtacggtggcaatctttatactagccactcccttgtttttcctgctcaccaagtatttctatgcggaggatatgatagacattatcgaggcggtgcaattagggacgtctattccacatattgatttagaacgggatattatggtgggaatgatgcttcagttcctgcttatttttctggtcttgagccttgctttgtttattatgatgcgtttcattacacatcgcctgtggttgccgtttgatgatacgttgcagaagacagaacagttcaacttggcgcaaagtgcagtgcctcagtttcagaaaaccgaaataaaagaatttgcccggctcaacaattcgttggcaaagctgatgcagaaagataaggagatttatcgtatacagaaagagtttaccgagaatgcttcgcatgaactccaaacacctatttctattattcgcagtaaactggacttgttgatgcaggaagaactggacgagcggtcaatgagtcttgtttccgatctttacgacctcaatacccggatggaacatttgaatcgcaatttactactcttggcaaaaatagagaattcacagtacacagagatggaggaggtcgatttaggcagctttattcgtgaggcaatgcctacttacaatgtactgcacagtgatttgaacatttcattccttgaccagcgtacgtgccatgttgtgcacaatgtaaacacaattctgttaagttgcctgctgaataatcttgttgtcaatgccattcgccatactgctgcaatggatggagagattagacttttgctttgcgataactattttacggtcagtaatccggcggatggggtatctcttgatgcccatacactttttcagcgtttcagttctgatgatacaaagacgtctgggaatggacttggactttctattgcgaaagctatttgcgactatcatggttggaggttgcagtacgttttcgaagagaatcaccatgtattttcagtgcattttaggtgatttgttggtgaaattatttcaaagcttttcggttatgaattaattcaccacagattacacagattgacacagatcctattttactgattattagattaataaatctgtgtgaatctgtgtaatctgtggtgagtcttattcattcctataccgatatgagctatataggagtgctgaaaaggatgtaactgtctgtgtgataatgcacttggtgttccactaagatcagtcgtagtggaacacgagttcagtcctagtgggaagtggcttcagtcgtagtgggaagtaccttcagtcctaatgggaactatcctcagtcgtagtaggaaaatagctcgctatacagttgtaaattcctctaatgggaaatgaattccgttaacggcttttcgataatcagttgacgtatcctaaaagatctcctcaaaaagattgtctcccccggtaaaattcaaaatgtcttctaatttgccttttacttttgcctcagaattttgagataaaagaaagaaaaggtatgaaaagatttgttttaggcatcgtggtcatttgttggattacgattgtattcgctgcaggaaatggcagtaaagtgacaggaatcttaagtggtaaaacgaataaagtaccggtggagtttgccacgatagctttgtacgaggcaacaacaaaaaaacttgtgacgggagctatgacagattctaccggatgctttcatctggaagatgtgccaacgggtcgttattatctagtgggtagttatgtcggttatggtgaaacacaatctgaaatgttcactgtgggtaatggtaatcagacggttgatgtcggtgtattgtggattgacgataaaggtcaggtattgaatgaagtggtggtagccgggcgaaaatccacttttgtgcctaaactggatcgtaaggtatttaatgtaggacaggatttgatgagttcggtaggttcggcaagcgagttgatgcagaatattccttcggtagaggtggatttggaaggtacggtcagcctgcgtggtaatgagaatgtgactatccttattaatggaaaaccatccgcactgatgagcggcaggacacggactgatgctctgaatcaacttgccgcaaacagtatcgaacgtatcgaggtaattactaatccttcggcaaagtataaacccgatggtgtgagcggtattattaacatcgtattgaaaaaggagggcaaggcgggactgaatggcactttgacggcgaataccggtagccacgaccgttacaatgccggagtgaatttgaattacggcatcaatggggtgaatttctttggcggttatgctttccggcaagatcgctatgaccgtagtatttttgacaatcgtacatcgcccacggaatacattagccagacgactctcggtacaggtcgtcccgtgtcgcacacattacgacttggaatgggagcaaacctttcgactcatgatgtcatggaaatttcgggaagctataatcgccgtcatttcctgcgaagtgagcgtatagaatctgttacggaagatataaatcatcatttggaagatttttattttcgcaatcgcagggctgatgccagggagaatatgtgggaaggaaactttctttatacccacacctatggaaagggcaatgaatggagtgtgaactatacttattcttccgaaagtgaagacgaacagaatgaatattctaccatgcaaatggagaatgacactaaagacaatgagtgggtatgggatgccgattatttacatatcggaaaagtgcattggcagcatcatttgtcggaatggacaaaactatcggcaggttatgaactggaagcgcttcgtgccgaacagaattatcatgtggagaattgggatggagcatctttcattcctgatcttgaccgcacaagtgattttacccatcatcgcacccttcattctttcttctctactttagaaatgaatccgggagagtggagtcttatggccggactgcgtggagaatatgctgatatctggaacaatctttattctcttgacagcatcacgaggcagcactataccaatatttatcctacgttacacgcctcccgcaaactgaatgagcacaatgaactccaactaagctatagccttcgtgtgaaccgtcccgaaggtagtgatatgaatccatttgccgagcgtatcaatccactcagtctttcggcgggtaatcctgatttgaaaccggaaaagatacattcggtggaggcgggatggctgtggcacaatgatacaaatgcatcgttgatgactacagtctattatcgctatcttaccaatcagattaccgaagtatcacgctacatagacggtggcgtactgctgactactaaagagaatttggatcagagtcacaatgcaggattggagctgatctggagttattctatcaatcgttggctctcttttaactggaatgcaaacggatatttcaatcagatcaatgcagaaaagttgggcttttcacgacacaggaatactttctcgtggagcacgttgttcaatgccaacttcatgccattcaaacattatatgatgcagctcaatgcacgttatcgttctgccacactggtgccgcaaggtcgtagggatgccgattattgtatcaatctgggtatgaagtatgatattccgagtatcaatctttccgtattggcttcggttactgatttgtttgatacctatcggaagtcgtatacgcttgatacacccgaactgaaacagaaggtagaaaaacgccgtaatccccgtattttctatatcggcgtttcttatatatttggtggaaacaagagcaaaaaacacacagcgaagttagaatatgatgagagtatgtaaaatccttatattacttgtactttgtacatttacagtaattggacaagcacaggaggattctgtcaaaacggatacggttcgggtaatggataataatccataccgtttccgcatccggcagatcattttacctgcaactttgattggagtggggattatcgggttggaaagccattggctgcaatatcagaaccgggagttacgtgacgagctacgggaaaacattgacagtaaatttacggttgatgatttttcgcagtatgctccgatgtttgctgtttatggcttgaatttgtgtggtgtaaaaggaaggcatagctttacggatcgtaccataatccttgctactgcctatgcactaatgggtatcaccgtaaacacatttaaaatgacggccagtgtagagcgtcctgatggaagtagccgtaactccttcccgtcggggcataccgcaaccgcttttatgggtgcggagtttttgcgtaaggaatattgggacgtttctccatggataggtgttgccgggtatgcagtagctgccggtacaggcttctttcgtatgtataacaatcgtcattggctgacagatgtgcttaccggagccggaatcggaatactgagtactcaggcggcttattggctttatccaactattacaaagactttcttccgtaagcggtataagaatatatttatttctccttatttctcaaaagaagaaaaaggagtaagttgtcatatcgctttctaaaggatactcgttgcaattaataaggaataaacttcagaataataactttctgtgtttggtcgtctattctgaaacgattatcagtacgttcgcctatcaaccaaatgatatgggagccattgcaaagcacccattgttgctctttgcgggaaagggagaattttcgatcagtaaggtagtcactgaccttttttcgcccagtcataccaaagggaacgaatgtgtcgccttgtcggtagtgtctgactgtgagaggttgttttagtttgtctgcatcgaagcaagcagtgtttcggtcgcggggaatgatgaaatcatccgtgacttctaattcttccattgtcaaacggaagggtagggcaggatcatctggagaaaagactgttgaaacatcttctgaacagatcggttctagcagtagaagctctcgatctttaatcacgcgccattctccactgaggaatattttccccggttgcccattcagagaggtgaaaatatctttgatctgtgcactgttaaatcctaatggagataagatctcaaataataaggtttccggtgcagattcttggagcaaaacactgatcaggataccttgttcggtttgcactttctgcttgccttcttctattccttttttatataagagagctgcatcattcagatgttctgcagtgcggagaaggctttcttttacagagggattgatttcctgcataagtggcaagaggttgaggcgtatcttgttgcgtgtatattcgtcttgcaggttagtgctgtccgttacgtaagattgtccgatttcttgtaggtattcggttatttctttccggtcgaggcataacaaggggcggacaatgtttccgtttttgggacggatacccaatagtccgttgatgcctgttccacggataaggttgagcaggagagtttctacactatcatctttatgatgggccacggcgataacgttggctccttgttgtagacggagctgctcaaaccaagcataacgtaattcccgtgctgccatttcaatggatatgtggcgcttttccgcttcttccgtggtttggaaatgttggacatgtaacggaacttccagctgcaagcatagttcgcggacaaacatttcatctcgaaccgactcatcgccccgcagatggaaattgcaatgtgccgcctcgcaggtgtaccccatagcaagaagtagacgcaacaaagctactgagtccgctccgccactcagcgttaccagtattttgtcttctcgtgtgaaaagcttctcctgatcaatatattgcgctattttctttatattcataatggtgcaaagataatattaacggattgaattctttctaattcttcggaacaaagtggagaatggagaatatttctccttatttaaaaacaatctaaataatttgtaggctaaatacaaatcatttatctttgcatccaaattaaagaaagagagaagactatgcgtttatccgaattaaaaactggagaaaaaggtgtaatcgttaaagtactggggcatggcggtttccgcaaacgaattgtagaaatgggttttattaaaggcaagactgtagaggttttgctgaatgccccgctgaaagacccaataaaatacaaagtaatggggtatgaaatctctttgcgccgacaggaggcagggatgattgaaatactcagcgaacatgaggcgaaagagcaagtgacaaaaccgaattatcatccgggaatgagtgaagatatttatccgggggaagaagaactgaaacgtatcgctctcggtaaacgtcgtaccattaatgttgcattagtgggtaatccaaattgtggaaaaacttctctgtttaatattgcttccggttcacacgaacatgttggtaactacagcggcgttacagtggatgctaaggaaggtcattttaatttccaaggttatcatttccgcatagtcgatttgccgggtacatattcgctatcagcatatagtcctgaagaaatgtatgtccgtcatcatattattgatgaaacaccggacattgttatcaatgtggtagattcgtccaatctggaacgtaatctgtacctcactacccagttgattgacatgaacgtgcgtatggtgatggcgctcaatatgtacgatgaactggaagccagtggcaacacgctggattacatgaaactgagtgaactctttggtgttcctatggttcctaccgtttcgcgtacgggcaaaggcatcgaagatctttttcacgttgttatcagtatttacgaaggtgccgacttcctcgatcagaaaggcaaggtacgtgcagaagtgttgaatgacctgcgtgaatggcatcgggagtatgtgcccggctataccggtggggctcataaagaagaagaagtacgtcatcatggattctatcgtcatattcacattaaccacggtcctgaactggaacgcagcattgaagaggtgaagcgggtgattagtgagaatgagggtatccgtcataagtattctacccgctttcttgccatcaaacttctggagaatgatccggatttggaaacgctgattaaaactttacccaacggcaaagaaatcatagatgtccgtgatcaggaaagccgccgtatccgagacgtgctgaatgaggattgtgatcaggcaattaccgatgcaaaatatggttttatatccggtgcactgaaagaaacctttgtggataatcacttggataaagaacatactacacgtgtgatagactctatcgtaacgcaccgtgtgtggggattccccattttcttcctgttcatgtatctcatgttcgaagggacgttcgtgcttggcgaatacccgatgatgggtatcgaatggctggtagaaactctcggtaactttatacatgccaatatggcggacggaccgttgaaagatctattggtagatggtattgtaggtggtgttggtggtgtgattgtcttcctgccgaacatccttattctttatttctgcatatcgctgatggaagactccggttatatggcgcgtgctgcatttatcatggataagattatgcataagatggggctgcatggtaaatccttcattcctctgattatgggcttcggatgtaacgtacctgctattatggcttcgcgcactattgagaatcgtaaaagccgacttattaccatgctcgtcaatccgttgatgtcatgtagtgcccgcctgcctatttatttgttgctggtaggtgcattttttccgaacaatggtagtttgatactgttattaatatattcaataggtattctgttggcggtattgctggcgcgtttattcagccgttttctggtgaagggggatgatactccgttcgtaatggagcttccgccttaccgtttaccgacagcaaaagctattttccgtcacacgtgggagaagggggcacaatatcttcgtaaaatgggaggtattatcatgatagcttccatcgtaatatgggcattgggatattatcctgaccatgatgcgtatgaaacggttgccgaacagcaggagaattcctacatcggacagataggaaaggctatggagccggtaattgcacctttgggttttgactggaaacttggtatcggtatactttcaggtgtgggcgctaaggaattagtggtaagtacattgggcgtgctttatacgaatgatgctgaagcagatgccgtaagtcttgccgaacgtattccgattacaccgttggtagctttctgttatatggtgtttgtattgatctatttcccatgtatagctacgattgtagcaatcaagcaagaatctggtagctggaaatgggcattatttacggcagtgtataccacgctgcttgcgtgggtaatggcatttgccatttatagaataggaggattatttgtatgatgaattggcaacaatgggtagttgcaatcctgttactgttgtgtattgtccggatcggatggggaatttatgcattttttcgccggacaagagaaaatggtaatccatgtgcaaattgcgtaaccggttgtgacttaaagcgattgatggatgagaagcgtgcagagtgtagtgcgacgaaaaaagaaaagaagaaaaattgctgcggatagttggaatttccaaaaaatgtactacctttgcaaccgcaaatgagaaagattggttccttggatgagtggcttagtcagcggtctgcaaaaccgtgtacggcggttcgaatccgccaggaacctcaaaacgcacaaaatgccctgagtagaaatactcagggcatttgttgtttattgaccttcagtaacttagctaccctgccatttgggtcgaaaatcgtgcgagtgtagaccgaatgtagtccgagcctcctaaaacgatacgattgtagcacatgaaaagtattaattttaggtttttccctatcaataattatagaattcaccagttagttctcattttcccatattacttttgttacaaaccaaaagaaatacgccatgaaaaagattctatttatcctatttacagttcagtctgttttagccccccatataacgaagagctatagtgttaattctatcgaggatagttacgaatattcgatagtcaatcaagaaaagaaaacagtcaaaaaagacattttaggcaatacgattattgaagatgataatggtaataagattacgattaaaaaagatattctgggaaatattattattgaaggtaataatggtgataagattacaatcaaaaaagacattttaggaaatattactattgaaaacaataatggtaataagaaaactattaaagaagatattttagggaatacgattattgaggacaataatggcaataggaagactgtcaaaaaagatatctttggcaatactattattgaagacaataaagggcacaagcagattatcaaaaaggatatatttggaaattccactatcgaagactattaggtagacattcttttccatcttgttttcttccctttcggaaaaaagtatccatgaaccctaattgttcatggataccattccgttcgcatggctgaatattccttgatcaatcagtaattgtatagtctgttccgttaccatatctagattgtttcctttcctactgaaaccgagaagttgggaagtcagccgtttcagatcttcagtcggcatagatatctgttgctctatggcatagcgggcggcgctcattacttctaggattggaatatccagaatatcgcgtttggagttgatgcggtaaaagtcgcagtctttagctttctcttcatcttcccagtaaattatagtatctcccgataaagggtctttatatgcatcttcaagaagattgtcgataaatacctgtaaacgggtggtaactcttgttagattccaaattcgtaatatccttttatatagcagagtatttgttatgggctgttcaatcttgactatttgttgaagttgttttttaacttgataggaggaagccattacggtatcgatatctgtactgtagcctatatcgggcaagtcagcaaatatatattctctttctcgattgttcactaactctacaacaggttcattctctatactgaatgttttcagaacattattctctatcggaagaggaggctgttcttctacttttgtgttttttaaatcttccagctttttgataatgcgctccacgacgttctccttatgttcaaaccagtcgacggaccatacacgcattacattccagtggagcatctgcaaaacattcggttgtactatttcacggtcccttgtagtcttggtttcataatagtttctgccgtcacacaatatccctagaatatatgtatccggttgcaatggattgacaatcgctaaatccaccttaaagtttgaccgtcctaccagagtatccactttataaccacgctgagtaagttcctgtgcaattaaagtaataagattactttgttgtaggttctgtagctggatggccggaacaggtgaggtgccgcgttctgcaaattcaagaaacctttttaggccttccacacctttggactttgtacgtttcaaatctatttgttcggagcgtaaggttgagaagataatcatttcataacgtgcacgcgatacggctacattcagacgacgttcgccaccttgattattcaatggtccgaaattcatagatacattaccattcctgtccgggccgtatcctatagagaaaagaataatatcccgttcatcaccttgcacattctccaaattcttgatgaaaataggttcattactttggaaagctttttcttccaattcgggatatttgttcagttcctcaatgagcatatcttctatcaaattttgctgtacttggctgaaagatacgacgcctatgcttttttcaggaacttcaggtgtacgtagccggttcagtatttctttcacaatggcttcagcttcggcatgattgctgcgtgtacgtcctttatcatatgtaccatctacctgaactaaacgtacttttgaaactctgtcatccacagaaggaaaagtatatagctttccattgtaatactgagaattactgaaagcaatcagactttcgtgtttgctccgatagtgccaagtcagataacgggatggaatggataacgagatgcaatcatccagaatgctctccatatcgtcaaattcagcttcttcctcgtctacttgtgaagaggagaagaaacttgtcggaggcatttgcttgggatcacctactacgactaatgcgttgccgcgggctattgcaccgactgcctcgctggtaggcatctgtgatgcttcgtcgaaaataacaagatcgaacttctctgcatccagatcgatatactgagccactgatatcggactcatcaacatgcatggacatagcttgggcaacagagttggtatctggtctataattctccggatagatgtgccacgtcctccatttgaaatgttcctttttagaattcctatttcggaactggaggcagcttccattgttagtgatggtattctggctgctaatctacagtatagttcttttttactcaactcctgaaaatctatagtcagttgtttgtatttactgatcatttcctcaaatagcaacccgttgaaaaggcgtaaagtttcgtccgcatcaacggtttttagagctaattggtgataaacgcctttcatatacgcattagaagcttccgatccgcttttatgcttatctgttatatagttgataactacggttaaatgaagagattccaattctctcttacggatgcaccattgtccccaatctttaatcttattgaagtgagttagccaggtattcagtagaaccggtagtttcacttcaagattattatccggcagttgtatgtagcataaaccttttatttcattgagaaccgtattcaactcgttggatgtatcgattagttgcctgaatgtatctttattagactgttggaatgcgttccagtcaatactgattttatttgcaaattgattcagaacttctgcgaatggctgttgaacgattgctgcgtattccgataaagtgttgtaaatcatcggaagattcttaagtatagaatcaatatcatcccatttctctttattctttcttcctaagaagccgaaagaagatgataattcggaagattgttcttgaatgatcttattattcttttgataagcatttagcttttctaacaggcttggtatttgtaccgcttgcaaactcgtattgtaaagtctgagctttttcagataagaacgtttggcaaagaatttaggtaagaaccatttcaattcgatagctttccattcttgttggagggcaaatgcattttctcccagaatttgaggtgcatactctttacccagttcagcttgtaactgatctcgcttacgaccggacaggataatatctttccattcttctatcaagtcggtattaccacccatttccaataacgttttattcagatatgggatggatagaagctggttacatatcttgcccatccagttgatcccatcccaattatcaggtatcgagattcccagactatttgaaagcaactttctgttagcggtaatcgaggtgaatagattaataaagcgcctgattccggcttgtaatttttgagagctttctatggaagtatcgtatggttccagcccctttaatgggtggtcttgtggatgccctgttatctgaaaaactgtatccagttcctggatcttttcgcaaaagtctgtcagttgattttgggtgatggagggaaacagagaaaagtcgatcgacaattcatctccctgtatcgataagtagtttgtaatgcaatcataaagagaaaagccggaagcatggggatgatgcaatgcttccatataatcgattaatttctttctacgctcaaataattgctttgaagtgctttcaaactcggctggagactgaatgtgaatgacttctatagccttctgaagctgagccagaaaatgagatttagtgaccttattagaatgtagttccagacagaacggatctaatcctatcttagtcagacggttttgtactacagaaagtgccgccatcttttctgctacaaacagcacacgttttcctttgtacagggcattggctatcatattggtaatggtctgtgatttaccggttcccggaggtccatgcaatatgaagctctttccttctcctgattcaataacggcttccaactgcgaagaatcgacatcaacaggaatggcaaaatggagaggttcaagatttttgtctatttctctggcgttaatctccggagtcgtatcctgccattgaatacgattttccatcagactggctataatggcgttctctttcaatttgtctgcattggtatgaatatcattccacatgacaaacttgttgaatgagaatagccccaacattgattcttccactacatcccaacctttcatattacgaatgcaggtacgaatcgtagcgaatatctttttcacgtctacgccactatcatcttttggcaacggattcaacccggaaagattaacactgaactgttgtttcaatagttcgacgagagttatgttcaatataatttcttcgtctctggtacggataatatatccacttgaacctccacgacgcacaatgtctaccggtaacagtaagataggagcaaagcgtggtttcacgctcttaggagactcgtaccacttcaggattcctaaaacgaggaacagtgaattggcgccattttcttcgatggcggttcgcgatgtacggtatacaaatttgagtgagttctgaagttcgctttcggtcagataagaacgaagttttttgtttctcagctcgctgattactaattcttccaaattctctttccataaagaagaatcatagagacctgtctcacccggttctattttacttttagcgggactgggtaatatctggtagttttctccggcttgcaaatgatcttccagatggtcaatttcaaaagatatgaatggtataacccttctaccaagacggatgttaatcagattattgcgtagagaaaaatccagcagttttctttcccaaataatctgcttggttatttcatccttactgtcctcgagttttatttcataccggtccagttggtgtattctttgggttgcattctcatgctctattccgctgttttctatttgccattcaccgttatggtttatgcgttgcggtaatgggcggattttatccagtctgcacctatatacatcaataaacagctcgaatctgttttcttctttgagttctctctgagccattgtagcagcttcttcaaatgaaatattttgagaagatgccagtgcggttgtctctactaatacaatgtcgctgatgccatttgcactccctttgagtagaaaggaagcatcatcgcctacggtttgatgataaatatcttctgtaagccatgcacctaccaatatatgtcctttcaacaagactaaaagaggatgaatgccattggcttccagacaggaagcatagagtaaagtcaggtctatacatgtacctagtttgctggtgagtacattatctaccaagcggatacgctgccccgaagtttcaaagctggctggaactgtagaatatattaaagactcagaccggagagcttcataaatagcagctacctgtgcacgtactcggttggggtcctgtgtctgatactcgtctaaggcagagtttccggtccacttttcgaggaattgtgaggcttttacgcttattcttgaaagtatgggatgattgggagtaacaaatgtagctaagagttcgggcataatcctggaaccggtccactgatcgtatgccatcagtttgatgggaaatgtttgctgatgggctatctcaccggaaatcgtaataaccagatgaaagatagtatcgatgccttctgtcaattcgattaattttccactttcaggtgatatttccaggttgttgatttgaatgttctgtccgtgcggaatgacttcgagaatactctctgagtacttaattagttctccatctatcgaaactttgatattgttccaatcgacttcatcactgttcattagttcgcagaaattgcatgaaggtacatggttgtgtatcattgcataattgatgcatggcaggtattccaggtggattgttccattgaaggtgcctgtaattgtgttgtcgtttcccattgttgttatagaatttaactgataaaagaggtgatcccataatatcattcccggattcaaagttataaatataatgctaataatctatactttatttataatttagtgagatatttgtcgcttatttagttcaaaaaggattcaccctattgttcattgtgctgatttttgtgatatttgcaacgccttagaacaaaaatcactgttgaattgtttaataactgacaaattttatatctatatgtatattactctcattgttttattcctttctgcgatattctttatgagtggcaaagtgcgttcggatttggtggcgctttgtgctttggtgttactaattatattcggtattctaactccggaggaagcattgaccggtttctccaattccgtcgtgatcatgatgataggattgttcgttgtgggcggtgccatttttcagacgggtttggcgaagatgatcagtagtcgtattctaaaattagccggtgacagcgaattaaagctttttattcttattgtactggtgactgccttcatcggcgcttttgtcagcaataccggaacggtagctttgatgcttcctattgttgtcagtatggctatggggacacagattaatgtcagtcgcctgctgatgccacttgcatttgccagtagtatgggaggtatgatgacacttatcggtacaccaccgaaccttgtaattcaggaagcactgacttctgctggatatgcgccccttacttttttctcatttactcctgtcggactggtttgtgtagctgtcggattggtgatactgattccattgagcaaaattttcctgactaagaaaggcgataaggatcgtaagggcaaaaagaataaatcactgaaagagctggcaggggagtaccaattgttccagaacttgtgtcgggtacgagtggaaagtagatcccctttaactggaaagaccatacaggaactgagtattccacaacgttataatgtgggtataatggaggttcgccgtcagtcatcttcttcgcgtcgtcatttctttaagacgatgagccaggaaatggctgctgctgatactattattcaggagaatgatattctgtatgtactgggagattttacgaatgtggagcgctttgcagaagaaaatacattgaagttactggatacgcatgatgcagaaggcaccgtagaatcaaagagtgatgaacttgaattcacggaaatcggtattgctgaaattgtattgatgcctgcttctaacctggtcaataagccggtaaaggattctggtttcagagagaaatatggggtgaatattctgggtatccaacgcaaacgtcagtatatcttaaagaatttgaaggatgaaaagatgcattcgggagatgtgctgttggtgcaaggaacatgggagaatatagcgcgtttgagtgaagatccctctgattgggtagtacttggacaaccgcttgccgaggctgccaaagtaaccctgaatcataaagcacctgttgccgcgattatcatgttgggaatggtggtaatgatgatgttcgatttcatccctgtcgctccggtaacggcagtaatgattgcaggtttgctgatggtgcttaccggctgtttccgaaatgtggaagcggcatataaaactattaactgggaaagtattgttctgattgccgctatgttgcctatgtcgttggcgctggaaaagaccggagcttccgaattggtgtcccaatcgctggtaaacgggctaggtagttacggaccttatgtgttattagcaggtatttatttcaccacttcgctgatgactatgtttattagtaatacggctacggcagtacttcttgcaccgattgcgcttcagtctgccatacagttggatttgagtccatatccattcctgtttgccgtaaccgtggctgccagtatgtgttttgcttctccgttctcgactccgcccaatgcattggtgatgcctgcaggacgttatacattcatggattatgttaaagtaggtttgcctttacagataattatgggaattgtgatgatctttgtgctcccgttattgttcccgttttaaaataactaaagtataagatcgatgaaagtagtaaaaagtttgatttttatcttgtttgccctttgtagtttatcgggcaaagcacaggaagtagctgccgatagcaccggctacattgtaagagtaggggagatggctcctaactttaccattaccctgacagacggtaagaaagttaccctttccgaacttcgtggaaaggtagtgatgttacagttcactgccagttggtgtggggtatgccgcaaagagatgcctttcatagaaaaagatatctggctgaaacacaaagataattcagcatttgctcttattggtatagaccgtgatgagccgctggacaaagtgattgcattcggtaaatcaactggtgttacttatcctttgggattagatctgggtgcagatatctttgccaaatatgcgcttcgtaatgccggcattactcgcaatgtactgattgataaagacggacgcattgtgatgctgacccgcttgtacaatgaggaggaatttgccgcattaacgaagaagatagacgaaatgctggcaaagaaataataaacagaaagtccgggttgaccttatttcaaggtcaacttggctaaataatcgtagtgctttccctcttttaccaattccgcttggaaaccattttcggctgcataaagactgagtgtctggaaatcaatgtaaagccagtcgaatgactctcccagaatgtccttatattgcatctggaagtctatttctccataatagtcacctgccagatcgatcacaaaacttccgtcttcttcctcaaacagatagcgcagatcactggagtccataaagatgcagccgctgggttgtagcagttgcttcattcttttgaagaaggcaggcaggttcttcaacttaccgatgattccagaaccgttcatcaacattaatattgtgtcgtatgtctcttggaaatgttcatcgaacagattgagtaatgtggcatgccgtacaccgcgttgttgcattacttctactgaaagcggtgaaatatcaatggcatgtacatctttgcctgcttcctgcaaggcaagactatgacaaccgcttccggctcccacatccagaatctttcccgtagccagttgcagggcggtacgttccagaagaggcatctgcttttccatgcgaaaaagttcctttaccggaatttcatcctcatcgaactgtgaggagaaaacccgtagtcgttcggccttgtgtcgtttataataatctgcaatagcagtacccatcggatccttgtcaacagaaagcagcgtagtgttcattctattcaatctttaaaagttgtccgcaaagatacgaaaaatgcagtctgttagtagaaaaaagctatctttgtggtcaatatatggataaagccatacttcgcactggcttatagatgtaatagtaatagaaaccgaatatgagtatagaagatgcaataatgggcggtatcgtctttagaggaaagaaagacaaacctaaggaagatggaaaggtgaaaactaaagccaagaagaaatcgtatattaccgggaaacatggttccggtgctgccaagatgaaggcggatatacgaaagaaaagggcaggtcgtcataaatgagatgataagatggtaaaatgataaatggtaagatgaggaaatgtaatcctatcatcttaccatttatcattttaccattctttcatcattttgccggaagcacctctatccagtaatcatccggatcatggatgaagtacaatcccatagctgtattttcaaagcatacccaacccatttctttatggtattggtgaatagcttcataatcaccggcaacacggaagcataaatggctttcgttctctccaagttcataagcttgcggatgatctttcagacaagtcagttccaagaggaaacctgtgctgttatctgtcagataaaccaatgtgaaggagccatttgaggcttctttacgatgatgttctttcaatcctaatgccttttcatagaaagcaatactacgttccagattggtaacgttgatattaaaatgatcgaatttagcttttatttccacgtaattagtgattagtaattagtaattatttaacgaatgctttcagaatttcacccacatacatgcgtggctgaccttccatcggagtttgtgaaggcatcttcttacattccaaaacaactgacggttcggtttggtttgccggatagaaacgaacggtgtaagtttctgccgtctccatctgttcgtaaggctggtcgggagaaaggaagctgaaaataacaggcttgcctgatgatttgcccaatgaaccacctgcgtttgctgtcatcatggtcatgttgaaagcatccgagccgattacaagcactaacttgcccgcacccatttggatggcatttgccggcaattgatccggagctacttctttgtaaccgggcactgtacctgacgttgcaggagtagccggggtgagcggagtggcggggattactgtgactttgccggtttcagccggagtcttcacttcaacttctgcttttggggcaattactatcggaccagagtttacaacactcttttcctctttcttagcttccttttgctcagctgcttcggctgctttcttagcagtgcttgcactgagggcttcggctgctccaagggccaggtcgtctacaaagtctactgtttttctacgccatttggcaagtccgcgcaccaatttggttttggccttgttcagtgcgtacttgtctactatccattcttctgccgtatatttctctttgccttcgcgatagttgaaacggattttctctacttccatcgtacacttctcaggtgcgcagacaactgaaagctgatagagtatctttgtacggtccagagaaagcgcactcgaactgaatacgatccattcgtctcccgtgcctacgatttgtccttcttccggattggtgtagactacgcgactggtgtttgcgtttttcttcagccgcgcttccatccaagcctgtatgcgtttgaagatttcttcctgcgacatgccgggaatgctgaattctttggtgaataccacttttccatctacttcgggtactgcacctgccagatacttgctgtcgtcatctttatctttattggcgtctgcaaacgctgtggccggcagacagatgcataacagcataaaaagaaactgtgtcaaatttttcataatgcgtatgttttattgagtaatatcgaaactttcgcccctacgggtaatggacaggaaacggcaacctttgctttcggcaaactcccggaaagcatttccgcccttgtattcctcgctgaagtgcataggaacaaagatagcggtttttattcgttccacgaattgttccgcacctctcatatagtctttcccgatgcggttgtccactggaaacatggctacgtctaccgaaggggcggtctgctggaggtacttcacctcggcaaggaagtcgccttcagctttccggatttcctgtggggtggactcttcactccaatgccagttattcaggtctccggcatggaacagccggatgccttgcaggtcgatcagaaaagagatgcccacgtccgtggagccgaatgcttcgatacggatattcgggtcttcgtacacatcacctttatttatataggtggcatcctcacgtgtggcgcgacgatgtttcaggatgtccttggagaagatgtagtgaatatccggacgctcgaccttccataaaagaacttcgcgattaaagtggtcggggtgaaaatgggaagagagtacatatagttctccgggtcttcccaacagatagtcatgaacgatacctttattatattccgtttcagaggaatctttgtagtaatcgataatgactgtcactccgtccgcttcaatcgcgaagccgctatggtaaatgtaatcaagtttcatgcaaggatctatttatagcgcaatattacgaaaaacgctacacaaaccttggcttttagctgttatttttatctaaaagacttacatgggcacttccatcagcaggatatgcgagtctttcagtgtttccagctcaaagctgtgagtgtcatatacacccatgccgtcacggcgtgagagtacagtgtcgtccaccttcacttcaccttcgatcacgaagatgtacacccctgcatgcgactggtgcatgtggtagccgatttttttgcctgcttctatctctccgatggagaaccatgcctgttgcagcatcttggcaggagcgtcaccgtccggtgaaacaatcaacgccagttcgttcttgcgcagcaacgggcggatgtcataatcctgataggcaggtggtgtattcagcttctccggcattacccagatttgcaggaactctaccggttcggtgtcgctgccgttcatttcgctgtgataaataccggtaccggcactcatggtctgtatgtcacccggcgtgatggatcggctgttcttctggctatcaccatgtttcagctttcctttcaaggggatggagataatttccatgtttttatgcgggtgggtgccgaagcctttacctggttctacacggtcatcgttcagtacgcgcagggcaccgaagttcatacggcgcgggttgtagtaggtgtcgaaactgaatgtatggtgactgtcgagccaatcatatagagcacgtccacggctttccgctttgtctattacttttttcataattaattcctttcttttaaatggttgatatgtttagataacaaactggttttgaaaaagtttatggtcagatgttatcctctgcttattgcagattcttattgttaattttatatcttgactttattttccaaagcttttccgcttgcaaagtctttgatattctgaagtgtggtagtggcgatattctccaatgcttcacgggtgaagaacgcctggtgtgaggtgacgatgacattgttgaaggaaagcagacgcgccagtacatcatcatcgatgatgcggtccgactggtcttcgtagaagtattcgccttcttcttcgtacacatccagtccggcagaaccgattttcttgttcttcaatccttctatcagtgcgttggtatgaatcagttgtccgcgtccggtattgataatcattacgccctctttcatcttgctgatggagtagtcgttaatgagatatttggtctgctcggtgagaggacagtgcagggaaatgatgtctgaactgtggtaaagttcgtccagcgtggtgtacaccacttgatgctcacgggcaaagttatagtcggggtataggtcataagccagtacgttcatgccgaagccgcgcagaatcataataagtttcttggcaatctttcccgtaccgatgatgccgaccgtcttgccgtacatatcgaaaccaagcagtccgtgcagagagaaattaccgtctcgtgtacgccaggtggcacgggggattttccggttcagcgacagcatgagggctacggtatactctgctacggcatagggcgagtaggcgggtacacgtaccactgtgataccacaatcggcagccgctttcaggtctacattgttatatccggcacaacgcaatgccaataatttcacgccattgtccgccatcatatggagcacttccgcatctgcggtgtcatttacaaatatgcagacggcatctacattttgtgttagtatcacgttatgtttattcagatgacctttgtaatagcggagttcaaaaccgtattctttgttcttatcattgaacgaagcctcgtcataaggcttcgtgccgaagaaagcaattgtatatgccatagtttatggagtttttagaatttatcgtctgtcaatataacacacgcgtggctaataaggttcattggcgacagttgactacgatattgtggatagttgttggtgactgcggattatctcagtttggtgagtcttgttcataacgctgc

SEQ ID NO: 6305 - DNA, 704 bp, Unknown
  gut microbiota DNA sequence
tcaacttatgccagccgatagaaaacttcggtgacaatctgtgggcgtatcaaaccctgaaagaagatgcaaatgaagcctacgcctcttcgctgataggattactgacaccggagcaacgggaggaaatcaacttccagacagacagcaagagcaattatattcccgaaccctggtataatgcggacgggacgcaatggggaataaaattctccacacgagctttacaaagattgttccatagcaattattactattatccgaaagagatggcagaacgcctgtcgctatactttcctccggagatgttgcccaaagtggaacaacaggcagtggcatacgatgccgaccatgccattgccaaattctgccgactgacagcggaatatatgagaatgaaagaaaaaataaacagcttgtttaatgacaataaataatacaaaacaatatgagtactttacttagacaacatgccgaacagcaattcgcagaagagctgcacgaactgaaaaagaatgaaacaaactctgttcccgaaaattgggaaatatctccgcaatcggtagtcacctacctgatggggggcaaactgaagaatggatttgaagtttcacctaaatatataggtaaccgccgtctgatggagatagcagtagctaccctggtaacagaccgcgcattgctgctatacggacttcccggta

SEQ ID NO: 6306 - DNA, 21484 bp, Unknown
  gut microbiota DNA sequence
tatttaaagttataatttatagcttgcggataaaaagtcggattcttggattcgtcccacattattccataatatttctcaaaatatttcttcgcccttttacttgcattcatttcgtaatcttctaaatcatgggaaggataagttttattgccaattgttacataacttttatcttgtacactaataatactaggtattccgacttttaccaaatagctccacccatagcttttactctgcaaataatgaccatattcatgcatataaagttgatcttttgtaggatcaaagtttccatcattgtcaacaggcattttaccatcaccccaataatcacttttcccatcatttatattaataaagctacctaatgtaacaccattattctttgttggtgaacattcatttattacataagttgccccatcaaaatactctactctatctacatttcctatagcatttctatattgagaccatactacaccagctactgtttgaggaagttcccaagtaaagcgcgaccaaacatcaagaattttaaagtctttcaaaccctgaaataatccaaaattaattttaagttcatttttcgctcccttaatcccctctttccaagctgaaaaaatccttttcaagatattccccttcttaaataatcctctgaaaaagcctgttacaaaccctaagaagaactctccatcttcatcaatataccttaatggattatttaaacaataagaatacctattataattctggctcaaatatggatcttgcaactgtggatcaggagacaggaatctgcctataaccggatcataaagccttgcattcatattaattaaaccaaaagctgtcagatgctcatgcccggtataacctctgcccaagaataacgtaggttctgtgccaaccgcatataaagcttggttagcaggattcctcaatctcccccatgcatcataacttaactcctgcttcagcccacccgaagaattaacgatatgagttatactgcccagataatccttgcatagatagtaaacagcccaagcccctgaaccttctttcacatacactgctgccgctgaatatgcatcgccgccaaggtacagaatttcttttgaacccgcaactcctgtctcgaattcatattgatttccccaataatatttattgagttggacttgattgttcttcttcagattcattttgaccctattaccttccccattatatgtaaatgttgctacataaccattttcagtaatagtctccggccttcttaaagcattataggtaatctgttgttcccgaagtggaacttccgtaccataaggagtaatcgaaactatcgcataaggtttctcatcattatacacaaaagttcctacattagatatattggttatatttccattgttactgtaagcagccgtttttccggcaaagcttgttaatctgttcagattgtcataaccaaagctctcctgaatgttcctcacattgtcttttctccagttcagattgcccgtcttagcgttaaagttatatccggaattctgaataacagtagaaccgtttttaactaccctacccgttggaatcccgtttgcatcataagaatatgtacgggtcagaataccagtgcttacaccggtcgttaatcctaatgagttttcagcagttaacttccagatagatgtcgagctattaagtttcacttccgaaagattaccataggaatatgtatagttttcagtcacaatactgccgacattagaagcatacgccaagtctgatatacgcccactggtgtaagtaaatgtttttttgagccattttccatccacattcgtttctttcatggtctttagcctcatcaaagcatcataagtataggttttagacgtcccgtttgaacttacctcagattctatgagattatcagcattatagctgtaatttattgtctgtccggcaacctccttttttgtcaaacgatgaaaattatcataagttttcttcgtagtatttccattggcatcagtttccagaacgccattccccatagcgtcataaccgtattcgattagtccgaaacttgggtcattcatcgtaattcgtctgccaaaatcatcatacccgaatgtagttgtaatctgtcccggagcaattacgctattcatctgaccatctggtctataattataagcagtggcacctgcggggtcggtaactgatattatatttccggaagcatcctgtttttctgtttttgaaacaccatctaccaccgaagttacgcttgtattagagtatgaaaaagtgtcctccttaccggatgcatattttaatgatatgatcctatcattagaatcataagtatatgtattccattgcgcaggagtggctcccttgaacggcacggaaactttagccaacctccctctctcgtcatacacattatcggtataaatataatttccgtcaaagcgttgttttccacttcttacttccctccctaaagcatcataataagtccgggaagccggagcgcctgtagcagaaatggtagtaagccttaaagctgaagccggagccgtagcccaagaatatgaagtagtttctacagaaccatccggagagacagtttttacttttctaccccaatcatcatattcgaacgtggtttcctgttctttatgattttttacagagtaaagtaatccctttggattgtacgtatacgtactcacaaaattcaaaggagtcgttttctttatgaccctcccataagaatcgtattcatacagcgtttttaagctagtagtagctccatactctttcagaaattcctgagtaaccagcccatctttatatgaacgattgacttgagaggctgatttcccgtttacataattcactgtaacaatcggaagctgattattatcaaatacaggtatgtaatttctgccgacccatgttaaaccatcttttgttttagtggttacctgatcatataacagtcctattctataagtcgtgccattgtctatgttctgataagagttatcagttgttatcgtgagaccatcgctgtaaactgatgtttctttcgttacattactataaacatcatagacacaactggaatttactgtcacgtttttcaacttatctttttctaccttgctgctcgaaatcattctgactaccttatttgataaggtaaccatatgaaagttataagacgattccgccgttggagtgaccacttgagtaatgaacccgaacttcatgggatcaaaagtctgttcagtctgaattcccctgttattgtcatatatcctaattttcctgaacccacagaagcctaagccttgacgatgcgcaacagcatcattataataatacgatacagaagatatgtatttgccattataaatagagtatgcattactcaccatattaacgtctatatacagcttattatatggaaaacccacactatagtcagatgtcgtccaatacatattaccattagtaagattttcataatcaaatttctcaattaccccataactgttaatcatgccggtcagcattctcccccgggcatcattacgtgtaaaggaaattggagtgacagtggcatctttaatacttagcaattggctggtcctacaactataaccatctcctatagttcctgttataaaatgagaatcagaatctacagtcacttttgcagattcggccacagtattcagtttaccgttctggttcagatgtacactgatttgagttccggattttacagctaaatcgggaagtttatcaccattcagatcatgaaacagaaactgataattggtatcggaattagataaaaactcaaatgtgctgcttacaaatccactaccggttgccaataaagcagtccaggttttatatgtactattatagtgagttaccggataagaaatgggtctgatacacggagtggtaaattcaaaagccttatcgatatcaaccttaccaccattattagggaggaagggatcctttattatcggatcatcaataatctcacctctacagccactacattcaccacaagggcgttttttcatttcaatccagtaatcattcttcttcggacctaaaagaaaatcggtgagcccatcaccgttaatatcttcaaccaacaattctcttttggaagcacccgatatatctgtgctcttaatgccgcttgtatatgcaatctgcacaaaagcacctccctgatatgagtaaatataagttccaattccgtttatgaggcaaatgtccgttctcccgtccccgttatagtcgacagcaaaaagcgcatctttaaaataatcaaataagaatggagtttgatcatatatcttagtcctcaattccagattaaacatagtggttcttgaccatgtcctggtttcccccatcggaagtttgttacccgaaacggcaaccaattccatcttcccatctccattgaaatctccggtaatgaataatctgggaacagcactttgcctgctgccttctgcaaatgttccttctaataagaaggatgcattccgggctgtcatattcttatcataggtagtaatatctactttggcgctgttctgatcatgcaaccaataattaattctaaccagctcatcatttccatcgccatctatatcaacaggatataatttctggaatccattacctgcctgaatctttaccggtgaacagaggtaatctccgagattcttataaaccaacagattctgtgcaggatcatatttacttccatactggtaatttccttttttatcataagcggttataccataagattcaaaattaggataggcaacgagtccctcactccgggtaagagaattaaacttacccttatgcaggataagatcaggagccttactgttagcaaaataagtttcaagaaaagccgtgcttgtctggaaacgactttcgtcagactcacctccataatagaacatcagcggattaacttctttgccattcgatttaagactgagtttagacaagaaactatatatacttgtgtcataactcagcgtataagtactaagaagcattgatgattgataatatgtatctatcttcgacaataacttactatccttcatcagccgccccgctatataagaagattgaacatcgcttcttgtctgataggtaaactttacagcaccatattgagtagaattgctgccatatttgatctcggtgacataatagacgttattatccaacagataagtaaaatcaatataccctccgaatgcatctacacttttagtaatcgggtaagtaatttgtgccgatgtattggtgggatatccaagagttactttctttccatccggataccaaacatcaaaatagtattttcctgatggtgcataaaatgtaactttcacattgccgtgctctgtctgataatcgatttgagaagacgtttctgagatcttaataagccgactcccatctaatgaataggcagaattcttatctaaactagccggttttgcattgcttccatcataataatagtttgaattacaaatagatatataggataatccccctatacaccacccgtatccggcagtactattccccatcagactattataagataaggcaagagcgggttggtgtccgtttttccctccatatatttcaataggtacactgtatgtgagtgagccattttctattctcgattgaataggtatttcacctactgcttttgcccggtctatctctaccgtgcttggcaattcgggcagggatggaggcgccggcaaaagaggatctaacggttcaaacggatctaatggtttcaacgggggcttcaagagaggggcgtctaacgaaagaacttcacttcggacggcactgtcttccgacgacaactcattgacttctgtcacgattttatacagtccgtcttcatcagcttcttgcatgaattcatcttttaatggatctataacaagagaatcccggcctactgagatttgggcatatcctgataaggtacataacagtaccaagataaaaaatattcttctcttcataatagcgtattagctttaggttattctttaattattttccaactactggtattaccattatagactatctgcatgatatacatccccggagttcgatcagatatatctaccgcattggactgagatatactgccccattgttgcagcaatgtcccggtaagatcatagagagatattcgggcattctcaaacttctcaactcctgaaatatcaactttgagcataccacgggtagggttgggataaattgtcaccttagtttccgaaagtttttcttcatatatggaaggctctacttcatcatcgctcaagactccccttgtctgaaccacaatttccttttgacgagtcaaccgattaccggcgctgtcataggtatatttgattttgttttgggcgtatgcatcagcagcagcccacatagataaaaccacgaatagcagaaatatggcaactatccgtttagatgtttgaattcttaaaagtagaaatgttgttttcatgtgatataagattttattgacgcttcaaataaccacaactttcacataaaaacaaaatattatatggtaacagtggtaacaaacctacttcagcaagaaaagttgtttttcatcttacagctcttcagctctcctcaactgccctgttcatcggcctttcggctgaaagtatctcctgaaaggaaagattctttgctttcagctttcagccaatacttctttagtgaaacaagggtcaagttgacaaggagaatagtcacatctcccatcacatattcaaaaacatcccctactataaatgtcccggccatacatttctttttatatagtctgtacatctgaggatatttcaatttaaattgtaatgcaattccttttcccatagcaccagcacaattacaaccatgcgcatagcacttaattccatcaatagtgaaaatatttccttcattcacgtatcttaccatatagttgttcgtttttaataaatgatagcgaccatactttgttaaattcctcttccgaaatataatcagattcctcaagagttaaatcatccaaccctttatcatataacatatattctccttgaacagggtttcatctgttaaacaaatagtttgttgtggaaacacctctatttatctaacagctagtttgttatgaaaatgaagataagaaagttcttcttcatatatggaaaggtcctcttcgtcattcaaggctcctcttgtctgaactacaatttccttttggcgagataaccgattaccggcattgtcgtaggtatatttgatacgctgcgcacaaatatccagacctgcccacatagataaaactacagatagcagaaatataagcgccgcccgtttagatatccgtttaccctttttcataatgcgtaatgtttattcgatactgaactctcctgataacaaggtttctccgaaagaaatttctaataagtattttccattttccactccagacatattcacaaatatatcggtcggagtaaagtacaattcagattggatagtttcacctgtcagaatactttttacagaaactgtgacgtcagtatatacgcaatctaaattaatagataaagcagcagcatcaggattaaaataggcaaagacatccaaaggttctaaagaacgtgttccgggctgctgctgtcccttacctttaagagatttttttaaattaatctgtttgacagataccatttgctctgcacaaatatttagagagaacaaagcgaacaagagcgaaagtagaaatgttgttttcatgtagtataagattaaattatttgactcttcaaataagcacaactttcctctaaaaacaaaatattacgtggtaacaatggtaacagagaagtctaagtatataacagtcaatatataaatcacacattatcagacataaatactttttcaaaaagttccttatccattttattcttaatcctgtttttccgtgtttttattgcatcagaagtagtattcattacgtccataataatttctttcgggcaatgaagtatcactaatatgcaatataacaaatcatccatagtcaaagaagaacaacaagcattcaaatcctccatgatatctacaaatgttcttctaatatcattaagaatcaacaccctatgattatggataatactaatgcgctctttgggttttgctttcattaattctgttagtttcttactcccttcagttgatctaaataaagaaatacaaatatcaatccttaactctttcaattcatgcaacttgctattttcttcttcacagatatcttttccatataacaatatttccgcacgattatccatcaattgtttctgtaaagcaatatatttgttcttcctgcatctatccctccacataaatataaggcttagtactaaaataaaaaataaggatagtataatcaaaagattcatagtccttctatgttctgtagaaagcttatacttatgtaattccaataaatgtttgtccattaattcattaatctccgcacggtcattcatgctctgaatcgaatcataataaacaatgaaagaatcaacatttaaaattgcatctttccaattggaaagttccttatttgcttgatatatactataataatttgaagtttttgtgtatatatcagaagagttcttccctaaattccaataataaaaggctgagtctttcttacccagattatacaaaatatcacctttcaaagaataggcagaggttgagctttctatatctaacaaataaggtatggctcttgaaatacaatcattggcctgtccatactctccctgttcattataaactccagataaattcttatatatgacgcccagcaacaccggataatccaataaaagcaccatttccagtgcctgttgataataaattaatgcactatcaaattgaagttcaagtaaaaaagtaccaccaataccactcagattgtgaaatgcacgtaaagtatcatgattgttcacatttatagcataagcctgcctatacatgtttcttgctgtttcttccatattttggtctgtatagcaatctcccaaatcgttatataccatcgataaaagcgcggagtcacttccttgtggcatagttctcaatgactttaaatataaatttatcgcagtaggtatgtcttcttgctcccgatgcacacacccgctataaaaataagattttgccaattgttctctatcgctgttcttttcaaaataatccacagctacctgtattaaagaatcattctccagcgacacataattcttatacttcgcctgcgtaagcagcaaggcataccatgccctatctgttttccccatcttctgcggtgcaggtatagcttccagcaattgcagcgaactgtcaggatgcgactgcatcaacgaatcagccaataacagaatagaactaactgcatgagaacctcttctacatgcccccagcagaatagtaaatgatatgaagaacaggaaagcaggtaacagttttttcatgctattttaaacttctcgtttcaatacaacaaagatagtaacaaatcatggaaaaagccaatgagaaagtaaactgttgaaacataaatagtagtccattatcattttgacactttgcatttctaattgtctgagaatgcattattcccgaacaactgaccatggaggtaaaaagaaacaaacgaaattcagcaagccacagattattaataatatatcgaaatacttacacttcttttagagtaaaacaccaccctaaaaacacaactataagagaaatagccaatacaaataagtgcattacccataagtagtaacccttttgaccgtaagtagtaatgatatcacctataagtagtaaccttatggtccataagtagtaacccttttctgcataagaagcccgaaaacatgtaagaatatgcaagaataacgaatttacattccttatttattcatagaatattctataatgcaaaattgagaaatacctataatcacataaaataaagaaacaacatcaatttgattaaaacatcaataaatagaaaacaatttgccagcccaccctacaatcgttctgtccccttaaaaacaaccagaggaaaagattcgtttgctgacaacaaatgaaatcatttgccaataagctatgaaactatttgttagtaacaaacaaaacagcatatttacaagaaacagctctatactaaaatgagaacaataaaaagccgtcccctcctttcgccacacgaaaggaagcaggacggcttctatataaatagcttgtaaagctacgctgattacaaaaccagagaaagattacagaccgaaagcggctttcaccttgtccacgtaatccagtttctcccaagtgaagagttccacctctacatccttgttaccttcgtaacgagacttgaagtgcttggtaacaatctgtggctcacgacctagatggccataagcggcagtctcctgataaatcggattacgaagcttcaggcgatcttcaatagccttcggacgaagatcaaaaagttcatctatcttcttcgcaatctcaccatcgctcatatttacatggccgcggccataagtattgacatagatattgatgggacgagccacaccaatagcataagacacctgcaccagcatttcgtcagccacaccggctgccaccaggttcttggcaatatgacggactgcataagcggcactacggtctaccttactggggtccttgccggagaaagcgccaccaccgtgagcacctttaccaccgtaggtatctacgataatcttgcgtcccgtcagaccggtatctccgtgaggtccaccgataacgaactttccggtaggattaacgtgataggtgatatggtcattgaacaatgcaagtactttctctgcatgaatagaagcaatgacacgtggcatcaggatattgatgacatcctgacggatagtggcaagcatttcttcatccgctttcagctgggcagcttcgctgtcgtcggcaggctggatgaaatcatcatgctgggtagaaactacaattgtatcgatgcggacaggcgtaccgttatcatcgtattcaatagttacctgactcttggcgtccggacggagataagtcatctctttaccttcgcgacggatgtcggccaacacttgcaagatgcgatgtgccaggtcgagcgaaagaggcatgtagttttctgtttcgttagtagcatagccgaacatcatgccttggtcgcctgcaccctgctccatagggtcctgacgttctacaccacggttaatgtcggggctttgctcatgaatggcggacaatacaccgcacgagttactttcgaacatgtactcgcctttggtatagccgattttctgaattacttcgcgcgcaatgagttgcagatcaacgtacgctttggttttcacttctccagccagtaccacctgtccggtagttaccagagtttcgcaagctactttcgaactggggtcgtaagccaacagtttgtcaagcacagcgtccgatatttgatcggccactttgtcggggtgtccttctgacaccgattcggatgtgaataaatatcccatacttctaaattaaagaatgaataattaaagaatgaaaagcggggatctggtggtgagtagacatgcatatcccgatgctcggagcatcgtcagaaaaggatgtgttttagcatttttttctgtggttgcaagctactcaaatctttccacatttcattttcgggtgcaaagataaaggttttcttatgaaatagcatataaacaggaaagcattaacattatattagcaaaagaagtgtaccgatatcccatcggcacacttcccatttagtagtttcaatattgttaactttaaaactgtgctttatttcaataagttccggtagtaactctccacatcgctccatttatagaaaggaaactggtcggtctgtaccggaatatgtacttcatgctcattatgcagaatcttaaccagaatatcatccgcacttcctttttcattccggaagaaggcaatctgcacattagccgccatagggactaccttaaagtcactccacactttatacacctcgtaaggatcatctacggcaacgttacaattctctatctgcatcaatgccaccaaaggaatcacattgccatcatgcccgaagcgaagggtagcagctatgccacctttctgaatagcctcatcggcgctatccagaatattccgtaacaatgatttcgcattggctacaacaatccctttcccgtcggcatgatttgcattgcccacatagaaacgataattgatgcactgccacaaatcaaacagctcctggggctgaaacagatcatagaaggaaaccttcgtctctgcattctgcatatcactcgccacccagtacataccccacatcacttccttcggattcactttcttcagtatgaaacgcttgtccttaaataaagaagcaatcaaccggtcgggattggtgtgaacatcttcaaactttctgtattcttcagcccacggaccgtcagtggaagaagtaaagcgattggattcatccgtatggtaattcaagtagtccatatacttatggctggcttcataagaaatgcgcagattgggattcagttccttcaaacgatcaccaaaagccaccatactcatcgcacaacgcagcacaaccgtagaacgggcagaaatggaaggattgcccttaaaggcttcgggaaatgcggcatacattctttctgcaattccacgatgctgacggatacctaatggggtcagatcacctccatggccttccgcttcttcccacaccttcagcaaacgctgccgggtatcttctcccaagtcggaaagtgcaccctcacgatgtgcttcttcaaaaaggtcgaccaaccatttataatcacggtcgccaatcagataacgggaaccatgccgtccatagtggcttacgtagaatggtttatatcctttgggagcccgggtttgcggtgcaaaatcaagtggataggcccaatagactccacccgttttctcaatagtagaaaacatttcttctttggatgtctgcgctccaagatgaacacagcacatccacatcataccacataacagtaattgtttcagtctcattctattcttcatttattgtttataaccgtcattctgattcaacgccgggttgttggtcaattcgctttccggtatcgggaacagttgatacttgtcgtccacatctcctcccagacggataccgttcttccagtcccagttattgcctttcgtatatttaccgaaacggatcaggtcagtgcgcctggtcagctcggatgccagttctttctgacgctcgctcaggataaagttcaaagaaagttcattgaggccgatttctcctgaaacatccgaacggacaccgctcttcgcatatttaccggacatatacgctctggaccggacttcattgacgtagcctaatgcttccgtttccgtaccatttgcgccacgcaagatagcttcggcagccatcagataggcatcggcggtacggaacaacgggaaatcaatagaggtataagcatcacccgaagcacagagctgatcatccttggttacatttctccatttgatatagccataaccacaggtaaaggtgctggtcatattcagttccgagtcccaggtttccttcacctgattcggaagggcggtcataaactgtgcacgtttatccttctttccgttaccccaggtatcattgacatcaaacgccacatcatccgcatcaaaggcgtctaccagtgtcatcttggcacgaacattaccccaacctcgcgaaccgacccctgtcttatacaattcgtccatcggaccattcacgaaagcttttacgtagaagtttgttccggctgaactttgggcacgctgtccgtcctgcaccaacccccagatgatctccttgcaggttttgttatccgccaggaagatttcacgatagtcggaagccagcggatagtgtccgtctgtaattactttcttcgcatacgtatatgcctcttggtatttattttcatgaatccaggactcggcattcagatacatacgtgccagcaggaaccagtcggctacacggtcaatccgtccgtattcgttttctcccggagctttcagttcattctcaacagccagcaattcactttccgcatattcaaatatctgcttacgggtatactgaaccggaatttccttcacacctgtatgttcatccacatagggcacggaaccaaacaaatcacaaagcatggaatagcagtatgcgcgtataaaacgtgcttcggctctgtaaccaatgtattcgtccttcatttcttcccaaagtcctctatcctgtaacttcccttcggtacattcgcgcagcagctcgttacagtaagcaatgctcatataaagccgctggtaagtccaggtgacaacagaagcattggaggcatcccattgcaggttcaggcacttacgcagaccgtttgaagaagaaggcatcagaaagttatccgtactcatctcctgcaagtagaacaacagacgcacataaccggaatatccttcattggcaccttccaagtcgccattgccgccatcgccaccctgctgtcctgtcaggatcagagatgaataacacttggccagcacgcctgtatagccgtccttggtcttatatacctggtcgctcactaactggttattatccagtggcatggtatcgaggtcacccaggcacgaagccagaaacgtgaccaagaaaagtagattgaatgaataggcaattatctttttcatatcgcatagttttttttaatccgttagaaagttaaattagcacttaatgagaatactcgcggacggggatatatctccttgtcgataccgctgtagatttccggatcgatgcccgaataaccggtaaaggtagccacattctgaacaccgaaagtcagccgcaaagagcttgactgatcccacagtttcttgaaagtgtaacccaatgagatattgtcaatccggaagaagtttcctttctccagaaagtagtccgaatacagttgctggttctggaaacctgtagctttggttctgctcaggatattcgagaagtttccctggtcgctataaacagactgtacatactggtcggcagctatgtagttatagacataattgccgaaagctccgtgcccgctgatagcgaaatcccagttcttatagctcagttgggtattgaagcccagataggattccggcaatgcactcttgttggtggcatactttgtttctgttgccgatacggaaccgtccggctgtacatattggccttctatcggcttgccattgtcgtcataagcttgttttgccagatagaaagtataagggcgttcgcctaccatgaatacctgtactgttttaccggtgcccgaaatggctccggtctgtacaaagttggcttccgaatccactacattcagttttgtgatctttgaatcgttccaggtatagttcatgcctactgtccatttccagtctttggtatgtaccggcactgcattaatggaaaattcgagtcctttattatccatttcaccgatattcgtggtaatcacagaagaatagttggttcccgaaatcacaggaatcgtattcagcaagtccttggtgtggcgttgataatagtccacagaaccatagatacggttattaaggaagccgtaatccaatccgatgttataagtttcggtagtctcccatttaatgtcggagtcataaccattcggacgatacgtattataccatttatctccgaactgatagcaagcttcaggataggatactgtgaaagttgtcatataaggatagtcgttcagaatatcctgttgtccggtctgtccgtagctcagacgcaatttcaggtcagacagaatatccgaatctctcaggaaagcttcctggctgattttccaccccaatgccacggaagggaacaatccccaacgattgccttttgcaaaacgggatgaagcatccgaacgtaacgtagctgtaatcatatagcggttatcatacgaatagttaagacgaccgtaaaacgaaagcagataatattccgattcataatgattgggagagaagagttccttgccctccggagaaaaggtagtagcatcaaacttcttccagaaatgctgccagccgtatccgcccatggcactgaagttatgcttctcattgaaaacatgagaatagttagcgtataagtccagcagataattccgcttgttctgcttggagtcatagacaagacctgtaccatccttcatattagaggtgtacatcattcccgccagttcgggcacttctttcgagtatttactggtcaggacatcgtatcccaggttcatgttcagttgcaaatcttccaaatgatgtaccttatagttaaaggatgcattaccgatagagcgtgtcactttattgcggatgtcctgcaagtcaagctgcgccaccggattatccgtctggatggccatcggagaattaccgttcatccagataaaatatcccaagcccggatcagtagccgcagtggcacttccggtcttaaccggacgtgtaggatcatagcgaagcgcgttatttacgacgctttcatcgactttcttattattctcataagacactttcaggttcaggtcaaccgtgagatgattatcaaaaaacttgggcgaaatacctccgttaaatgtaaatctctcatagttattggtacgtatgacaccgttctgattggtatatccaaccgaaaggcgataaggagcattttgcttcactttacccgatacagaaaagttgtgttcctgtccgaatgccgtccgatagatttcatcctgccagtcagtcgatgccgtgcctaaggtcacagaagccggtactccggatacagtgggaacaaactggcgaaattcatcggcagaaagaatatccagcgtttcagtaactgtacttaccgacaggttcgttgaataattaaagcgcaaattggtatcagcccctttcttcgtagtgattacaatcacaccgttcgaagcccgcgaaccgtagatagccgtagccgaggcatctttcaacaccgtaaaggtttctatatcatcgggattaataccaccaatcacattgccaccaccttcgatagtagagttatcaaccggtacaccgtcaatcacaatcaacggatcattggaagcggaaagcgaagcaccgcttcggatgcgaatcgtggcgcctgtgcccggagcaccggaactggatactacgtttactcccggtactttacccaccagggcatcctgagcggtcgtgcgcagtcctttattaaaatcatccggcttaatggctgttaccgagcctgttgcatccgacttctttacgcttccgtagccgatgacaaccacatcttcaagcatctcgctatcttccgtcatcacgatcttcatgttggcagaagcaggcatctccacgtttttataccctatataggtaatcagtaatgtagccttaggatttgtgatcgagagagtgaagttaccgtccacatcactgatcgttccgtttgacgttcctttctccaaaatattagctccaataataggcagattatccttatcgaggatattgccctttacaaccgttttctgtgcggcaacgctcacactgaaaaccaaagcaaacagtacccaaacataccgccatctacttccaaaagtttccggattcttcttgtttttcataatagttttaaattagtttattatacgtgtaacaaaggtatcgcgtgtctcatacaatacgaagcaaaagtaatttcaatggtatagcagaacaactacacgaagtggaaaagtaagtaaataaagaagagaacagaaagtaacatactatttatcaacatattgacaaataagagtaaaagagaaaaagtaagatcaaaggagatgtaaaactacagtttctgtacctgaattgccagatccttgcccggaatgatcgctttattccgcattttcatccggtagttgtaaaccgtttgaagtgaataatgaaggaagttggcaatcttggaattatcatttatacccaaacgtatgagagcatatatacgcaactcaggcgtcagcagttcaccttccttcagctgcacgcgctcttcttccttcaacagagcattaaatgactccacaaaattaggaaaaatggaaaggaatatagtatcaaacttactgatgaaaagcttgaaatcatcggaagtggaagattgtccgcggagtgtctttgatatatccgccatagagcctgtatttgcaatcttcagtaatgccttgcggtcgttctcctgcttatagatatattcggaacatatattgaacagcaacccgatatattcttccttgatatgatttgattcctgaatctgctcattcatccgggtgaggttcccagccatttcctgcaagcgcagattctgttcggccagcgattgcttcaccttcagcagtttggtattcttcttacggataaagaagaaagcgacaaccagggctattaccaatatcaggagtatcagaagggaaaagagcacccgattctcatcagccttaatacgcgcatcattagcggcctgaatgatggggagatatccggcaatgtcaataaagcgatagcgggctttcccgaagttcacatcttccagggaacatgaaatataattataagcccttgcaatgtctccttcctggaagagaagtattgccagatgctgcaaagacatatacaccttcttggcattggcaatatcagtcaatgaagccagaataagataatgccttgcctgcaaagtatcctgtttccccaaatacaattctgccagaagatactccattctcgctctgtccgaattatcttctgcactttgcccataataatcttccagcagccggatagcctcatcccactttccggacatactcagccgaccgcatttattggtaacatagctggaagagtgtggttcgctaatcgcaatcagcgtgtctttataagcctttatctgctgccaggcaagttgtttgccggggtcatctatggcatcattatagcaggataagtaaatggtgtggtatagataatagaaataagtatccttttttacatcttccgtccgtttcactttgccaagcataatcaacgcattctcatgctttcccattttgttcattacatcggctatgttcatcagcccctgattgattagcgtttcatccttcagactttctgccagttgcagtctctcctttgcgataatcatagccgtatcaatccgaaatgaacgatatttagtgaacagattccctaatatatcaaacctaagtttatcatcttccgcataatccagcgtccggcgaatgtctgctatttccttttccactttttgctggtaaacctcacgatgctcgatcatcttatccagttttaaaagcagggcatcatcgtccgctttgaccgcagcccacagaccggaacaaataaaaagacaaaataagatagaaacagaatatctggacattagactacaggttatatacttcaagagcaaagatatagattttttctctatgataatccgtgtactgcctctttttagcagataaaaggcagcttacttcttattaccgatctttatcaaagccattccgatggctatccataataattcgcgtatgcgggtaatcagtcccacataaacgcccaatgccggggacatgtgcaacccgtccacagccaatgccaaaccaccttcgcgtgcgcccagctgcatcggaaagaagaatatcagattactgaacaaagaagagaaagccagtatcaacacacagtcccacccgttaacgtccggtgtgaaaacgcttagaataatgtatatttcaagactggagagtatgcgtgccgaaagttccaatagcaaagaactatagaaagttatcttatgctggctatgcagcaaggctatctgactatcaatctgttccagagtatctttttgcttcacaacgaaactatgcgcccacttcctgacaaagggtaccttctgtaagaaccggaaagtcttcaccgccatcccatttttatatccacgggtaaagaaatagatagccaacagacaaaatgcccctattgcagtaagcaatattgccataaaggtattcacaggatacaggaagatatataagaatatggagagaaaccagaaccaaaagtgagaaaagatgtgcatcatcacatatagaatgaccgaagacgtagctttacttacgcctacatagggagtcagttccataatccgatacggttcaccgcccatcagtccgccgggtgtagcgtaatttatggcaaaacctgtgatcgacaacttacagaccttccagaaagggacgctatattgacggtcgtccctgattatcagataccatgaacaggtatttatcagatagacaaagaaccacaacaacatgattacaggaaaccaaaagcctatgcgcttcacgttctcccaaatgtcggaataatccatatccattgtacaaagcataatgacaatggcgagtattccgaaaagcaagaacaagttacggtatttattcttcattgcaggaaaccggttattaatcagtcagatcacgatagatatcccccagtgtctttcctaataccgggtgtatcacatcgggtgcaatctccgccaacggctccatcacaaagcggcgttcctgcatcagcggatgaggcaatttcagtgtaggggtatccagaataagatcatcatacaacaacagatcaatatctatcacacggtcactatacacaccgttcaccgatttatgggtacgccccatctcctgttcaacggactgggctatggaaagtatctccaacggcggaagtgaagtctccgcacaaacggcagcattcaggaaagcattatcagaagtaaacccccacggggcagtagtataaaaagcggacagggaaacaatcttccctatccgctcttctatcttgtgtacagcagtccggagattctgttctttatctccca

SEQ ID NO: 6307 - DNA, 938 bp, Unknown
  gut microbiota DNA sequence
aaatgtagttacaataacaatactatgaaattcaatcaatacacatggaacctatataagcaatcttctgacggacaaaaagctattaaggagtttgaggaagccaatgaaaagatgactgaatacgaactgttttctaaatacaatcctaattcagcacgttttctttcagaagactattttgtagaaacatgcgacctattttgggcttgctctttcgacagtgcagaaaagcccgaaaaccatgaatctgcaaagcaattttattatacactcacgaccaaagggatatttgatgaagagcatgtagcagtaatcaatgagggcgaataccaattaatgctatctgctaatgatatgttgtcattcatgttatattactttgcccctgaatactttttcccaaaccttttcagaagtcgttttttcgttttaaataagataacagacacattcgagatagaacttcctcttatacctaaaaaatctgattataaatcgagatgtatgtattattgggaattgtgtgaggtgttttatcggtttagaattgaaaaccaactctctccagcagagttatgcgcatttttatatgactatgcacccaatttcatttcaaaagaaaaaacagatattccacaaccggcacaagcatggttcattggtgggaaaacagccccgatagaatctactttagattttactttttggcaggccaatcctgaaacccaaaaaggcgatattctagttcactatgaaacatcaccagttagcgcaatcacttgtttgtggatcgctcaaacagatggagtgatagatccattcttccactattacagcaatacgtacataggaaataagataaatctacctcatataacattgaaggaactccaagccgatgaatacttctcaaagcatcctcttattagaaagaa

SEQ ID NO: 6308 - DNA, 50632 bp, Unknown
  gut microbiota DNA sequence
gctatgcaggcgcaatacttgcgttcatcctattttatggaaggtagcagtacccgcattcagttaaatccggcgttgcaacccaaacgtggttatgtcaatctccccggcatcggttccgtgaatgccgaagtagccactaactcacttggtatacaagatgtcatcgacgttttcgattccgacggtgaattttataacaacgacaagttctacaatcgtctgaaaggaatgaatgaagtgaatatcagtgcgaatacagatgttatatctttcggattctataaaggaaaaggtttctggtcattcaatgtaggggcacgggctgatgtggacgccactattcctaaaaccatgttcgactacctgcgcgcaacagacgctgataatttcagctggagcggtgagagttttgatatccgcaatgaaaaactacgtttgaacgcttacatagaagtcggagcaggatattcacgtgccatcaacgagcgcttaaccgtaggcggtaaagccaaattactattaggtgcaggaaacataaacctgaatatcaaccagctctacatgtatgggaaggatgctggcatcgactcggaattccaactaaaaacggatgcatatctggaagcttctgcaaaaggacttgatctggaagaagaaaacggatacatcactgacctggattacaatagttttggcatcagtggttatggagcaggtatcgatttaggagcaagctatcaggtgatgaagaatctgactgtttctgccgccattcttgacttgggattcatttcctggggcaaatcaagtactcaaatagctgaatcagataaaaatactactattgataaaaataactatagcgaatcatccgatgtgctggactttgatttattcggtttgaagaagaaggaaaacaaatcgcgcaccacctccttatcaccgactatggttatcggaggtgaatacggattactgaacaacaaactaggattaggattattatcaacaacccgtttcggccagttaaaaacgtattctgaattgacattctccgccaattatcgtcccaatactttgattaatactacgttgagctattccatgttacaaggtggcgaaacattcggtattgctttcaagataggtcctttgatgctgggtactgactatatgtattttggaaataactccaaacatgtgaatgcctttatcggactttctattcctttgggaaagaaaatataatagctaggagttacaggctacaagctacgagtgctatgcagaataatagcgcagcaacttgtagcttgtagcttttgtggcttgtaactatttaatcgttatcatcgttgccccgaaaccatattcctggaaagaggcatcctgatgccggaaagtaggatatttacgtttcagttcatccagcaacgctttacgaagtacaccgtcaccttttccgtggataaagacaatacgctgttcacgtttattcttatactgttccagcacttcacggaatttatccagctgataattcagtatctcactgttgctcattccatgagtatcatccagcaattcaccaatatgaaggtctatctcaataatgccactttgtccgccacgtttcacaatcggctgagatttgggtttgtctaccactgttttcttaagcaaagctgattgcaattcttcagcagaaacatacacttgtttagtgggaacatcatcctttactatatcgtaaatcaatgcaggcgtttcaaagaactccgactcctggaatgtatgcaatttatagaacttcaccgtatcaatacggagttccacgcttactgccggcttcatagcaaacgaacgcccttccttaaaagcaataaattgcacagctacgtgttcacgatcattcaattctgctttttcaaattcttccagcaagaattttgtattcggctctactactccattggaacggacttcccatgcttttccttcggcacagagataggtataatacaaataatagttactgtcattcaccagataagcttcaaaaggagtcgtgctgactgctttgatatcttccggaacgaaagccagaaaaacattcagcacatccccaccacgcatttccggctgacgaaaagcagaaacttgaggcttagacaaatgtcccatttctttttcttcatgtacaggatgggaaatagaagatcgcaccggcttctcttctactttcttcggagtagctttcggcaccggtctcgtcatattataatcatccgtatcaatcaccacacactcacgtatgggcatcgggatatcaaatccatcggcatcttctaccagcacaatatcctttccccgaaatcccgtcacaataccacccccgatctcattcaggaagcgtactttatcacctattttcatcttctttctatttaagtatttgacgaattagaatttacgattgaagttcgaaagcccaatcgctctacaaagatacggcaactcaataaaaaaagatagaaaaaagagaataaatatccgtacctttgcagcccgtaaagaagtttatcatgaaagaagatccaaaacatatccgtatcagtgaatttaactatccgttaccggatgaacgtatcgcaaaattccctctaccagtgcgcgatcagtccaaactcctggtctaccgccatggtgaagtatccgaagaccgctttacttcacttccatcctatctcccgacgggaagtctgatgatattcaataatacaaaagtgatacaggcacgcctgcacttccgtaaagaaaccggcgctctcattgaagtcttttgtctggaaccgattgagccgaacgattatgtgcttaatttccagcaaaccgaacatgccgcctggctttgtatgatcggtaatctgaagaaatggaaagaaggtacgctgaaacgggaaatgactgtaaaagagcaaccgattactttgactgctacccgtggtgaatgccacggcaccagccattgggtagatttccgttgggataatccggagataacttttgctgatatccttgaagtattcggtgaacttcccattccgccttatctgaatcgggatacacaagaaagtgataaggaaacttatcagactgtctattctaaaataaaaggttcagtagccgctccgaccgccgggttgcactttactccccgtgtattgaacgcattaaaagaaaaaggagtagatttggaggaattgacattgcacgtaggcgcaggaactttcaaacctgtaaagagcgcagaaatcgaaggacatgagatgcataccgaatatatatctgtttctcgcgggacaattgaaaatctgattgcccacaacggaaaagcaattgccgtaggcactacctccgtacgaacactggaaagtctctatcatatcggtgtcacccttctgaaaaatccgaatgcaacagaagaagaacttcatgttcatcaatggcagccttatgagacagctgaagagactgcaagtatcacatctgtaaaagcgttgcaggccattctcgattacttgaaccgccatgatatggaagcgttgcacaccagtacgcaaattattattgcaccgggctacgactacaagattgtaaataccatggtcactaatttccatcaaccacaaagtaccttactattactcgtctccgcctttgtaaaaggcaattggcgaaacatatatgactttgcattaaaccatgatttccgttttctaagttatggggattcttcattattaataccgtaaaattatgaacagcgataataaccaggaaatgtttcctcttgtcgatgaacagggaaatattacaggcgccgctacccgtggcgaatgtcacaatggcagcaaactattgcatccggtaattcaccttcatgttttcaattccaaaggtgaattgtatatgcagaaacgtcccgaatggaaagatatccaaccggggaagtgggatacatccgtaggaggacatgtggatttgggcgaaagcgtagaaatggctctgaagcgcgaagtgcgcgaagaactgggcatcacggactttacgcctgaaacggttacgcattatgtattcgagtccgcacgcgaaaaagaactcgtctttgtgcacaagaccatatacgatggtgagatactccctagtgatgagctggatggcggacgtttctggacgatagaagaaattaaagagaatttaggcaaagggatattcactccaaactttgaaggggagattgacaaagtactctcattaaaataaaaagaccgcccttgcggaaacggatgatgtgcccagggtaaacagaccatctgttcctgaaacacaaatgggagaccaaagcctcccatttgttgaatatttataaatctgctcttgacagcttttacttcgccagatcttcaattaccttcataatcttctgcccgatttcttctgcttcttccggtgtggaagcttcgctatacacgcgaataatcggttcggtgttactcttgcgcaagtgtacccacttatcagcaaaatctattttcactccatcgatgtcattgatttcttcatccttataaagctctttcactttagccagaatagcatccacatccgtttcaggagtcaggtctacacggttctttgccatgaagtaagacgggtaagttgcacgaagttcactcactttcttaccctcatgtgccagatggctcaggaacaaagcaatacccaccaatgcatcgcgaccgtaatgactttccggataaataactccaccattgccttcaccaccgattacagcgcctacttccttcattttagtggttacgttcacttcgcccacagcagaagcaaagtattccttaccatacttacgggttacatcgcgcaacgcacgtgtagaactcaagttagaaaccgtattgcccggagtatgcttcaacacatagtcagccacacttaccagcgtatattcttcaccatacatctttccatcttcgcaaatcattgccagacggtccacgtcagggtcaacaacaaaagccacatccgctttaccacccttcatcaggttcattatgtcacccaggttcttttcaagcggttcaggattgtgttggaagtcacctgtcggctcacagtagagcttctctatatgctgcacacccagttgtttcaacaattccggcagaataataccacccactgagtttacacagtcaatagccacgcggaaattcgcttttctgatagcttctacatctaccaagttgagcgccagcacactatctatatgtttttgattataagtcagatccttgcgatacgagcccagatggtctacatcagcaaattcaaattcttctgcctcagcaatacgaagtacttcattgccttcggctgcattcagaaattcgccacgttcattcagcaatttcagagcgttccattgtttggggttgtgcgatgctgtcaggataataccaccactggcaccttccatggttacagccaattcagtagtcggagtggaagccaaatcaatgtcgattacatcccagcccatacccatcagagtacctactactacattcttcaccatttcacccgaaatacgggcgtcgcgtcctactacaattttgttgctttttaccgtgcacgttttgcgaataagtgtggcatacgctgatgtgaatttcacaatgtcaagcggattcaagcccacacccgctcctccgccaatggttccgcggattccagagatagatttgattagagtcattaggttaatgatttaaagattgttggttatactataattatttatagatttgatatttctgaatatagtaataataagggtatacagattgcatagccgagctatgtcccattttagaaggaacaatcagtttaacgcatgcgccatcacgcacatacgccaacggcaccaaccaaccggcaggcacagaagttccataataagagagcataaatccttgtgtaaactgaccggcaatagaagaacttgttactctatagttaaattcatcgactacttctgcataatccagattggacacagttaccactttatccataaggctatattccgagaagcgaaccagaatctgatcattcgcctttaccgtatcggccaaattagtggaacccttatctatgatctgcatatatacaccactggcaagctgtacatattcattcttgttcacatccgtagtcgagtcgtttctgtaaaattcagtctgagatataacagtgatactactgtcccgtataaatgcctttatagcatctttttcgtcctccagcatttctgcataagtcttggtattatcacaagcctggaaagccaatccacatgccagcaaggacaaaaagaataatgtaagtttcttcattatctgttatttagtaattccgtacaaaagtattcgatttcgttgaaagttgaaagctctacgaggaaagttcgtatcttttaacctttgtgcccctctttttttatcctttcgcattcagtaaaggcttaaacttctctaaagcacgctccaaaactttctttgcttcatccattgtaccatagaattcaccaccggaagcattcaagtgtccacctccattgaagaattcggcagccaattgattacagggaaatgtacctaccgaacgcaacgaaactttaatcattggcttctccgtatcttcacgtaagaaacaggaaaataccacatcctttatactcagaggaatatttacaaatccttcactgtcaccccggatataatcaaagcgtccctgttcgtttctggtcaacgaaatcaaggctgcatgataatcaggatacaccttcatttgcgaaagcacatatcccatcaaccgtaaacgactctcagagtaagtattatagactttcctgtaaatatcatctttatcgatgcccttggaaagcaactcgctgatgataaaatagatttcccggttattggaattataggtaaagccacccgtatcggtcatcataccggtataaatacactctgctcccgctttggtaatttcattgaaataacccatacggcatatcagacggaacaccagttcggaagtggaagatatattcggatgtgaaattgtaatatcacaaaattcttcgggatacagatgatggtctatcaatatttttttcccttttgcagcctttacggcatctgccattgcatcaatacgactcaaagcgttgaaatccaggcaacagattatttcggcctcagatatcagcttatcggcaaattctttgtagtgatcgtaaagtaacacatctttgctgcccggcatccatctcagaaaatcggggaaggcattcggcacaatgacatttaccgttttatcttgtgaattcaggaagtgccacaatcccaatgaagagcctatggcatcgccatccggcgctacatgggctacaattactattctctccgcatgccccatccacctggcaaaacggtctatcttagcttgttcgattactttagtcaacatacgcttaatctatgatttacaaacagacggctggagtgcccccattcatctataacaatttgaagcgacaaaagtacgaaaaagttcgagagttgagggaaagtagtgcaggttttatttagtccttgcccacagccttatttcccggagcttttttcatgctcttcataaccggcaagattgtatagaacagggatagtactgtttccaacacgatagataccgaatttaaagtaataaccttcttcgtcattgcgccctattaatatctcttccttatttacaatatgcttcttaacttcttttccagcctgctgataggacatgatcacatccagaagaccgggcttcagaatggtttctttctctttcccgtacagagtccagtcaatatccacccggaaggttatccaacaatctttcggaaaggaatcaaacggcattttgtaggctattgtcgaagctttataagtggaggttacgggcttcataatctctgccttgtccgggtttacattacaacggtcggttttatcggtcagccatttgcggtccgagttagctttaatatagaaatagccttgtgaaaagccgaaagcaagaggtggatagccaccttgctcaatcagccagccattaggttttccggctttatagattgtatctcctttggaattgattttagttattttgtcatgggctatattcttcttgaaaatcatcctcttttccaactcaaggaattcttcaacgctaagtctcatcactttaccgtcagggtcggaaacaagtgtacgactcggcataccatgccattgtgcaaagatggtagacacttccttatccaaagtccgcggaatgtaaacagagaatgtataactcatggatgagccttgcggacaacttcctttaccgtaatggtatacagtcttcattttctgcgcattaaggtattcagttgccggatagttacggaaatcattggcaacagcataacaataacacaattcggcacgacctttggtttctccctgggcatagccttccaaagtattgtcttcctgtttcagctcgaagcgataagaaggtttgccttggaaaggacgggaataatccaactgaatggtatggggtttatttgtaccgacggccacccaacgcccgtcaataatctgatttgtacgggctgaatcagcctgcacatttacgcgttctttcaggggtgttaagttatctgactgtgcacggaccggacttactgttaccaaagacaaaagacaaagggggattaatactgcggttctcattctttaattgatatttaataatgtatacgaatcaagagttagatggagcttatttgaaggagttatcagtctgcttgcaggctgataactccttcaactcctaattaggtagaggtaccattgccctgcggccatagtttaatttcaaacctttcttgtaggcttcggggccatgcagatctttaatatccatttcacccaggtttacaaggataccacgcgccataagtccggcatcttcattttcaagacgcggtaaattttcagcggcttctttcagtttagacaaaaacggacggatatagtcgcgcatttcagggtctaaagataaacattccaaagaggagtaacctattttcctgtccttttcttgagccggagtaataaggcgggcaataccttcctgtgctttacccagataaacaaccgcataagctgcctcggaagctatataaggattctcgtcttgcaagagtgccaataatgcttgcggacaagtattaatttgcttctctctggcaagatttgcatatcctactaccccccagaatctcatctccggcagagggctggcaatagctttctccaacatgggaagagaagctacagttgccgttcccgcaatttcgacaagctcataaagctcatccaagggatatttctctttgcgtactttctcataaagtatatgtccggtacgtgaatttgggaggaaaaagcccaaatcatgggtagtacgaatgtggtcggataatgcttgacgcattttatataaggtttccgcatactcaggaatagcggataaatcatgcaattcatccggatctttttcaaggtcaaacaacatttccgccggatgaggctcaaaagtctgcttccagtccggattggtattgtgacctcccagcaccagtttgtcccaagctttattggatggcattccccattgataataattacgcagagcaaactgacggtaaggaatataactacggatatacttgaagcgaccatccgtaacagcgcgtaccggcatgaaatgatgcagttggttggctgccaatgcaaactgtacttcacgcttttctttactggcgaacttgccgtaaagcgcctttccttgcatgttcttgggaggctttacacctgctaaactaagtacagtaggtcccagatcggtgaagttcaccaaaccattttctttaccttttgctccatttgccaggtgccgccatttaggaggaaagtaggctatcataggaactttcagtccgctttcgtacagataacctttaccacgcgccacgcaaccgccatggtcactgaaaaagaaaatgatggtattgtcttccaatcctctagtctctaaatctttcaggaagattcccaaccaagtatccacatcctgtaccgcttccagatgacctgcataatccgaccgcacttccggtaaatcgggcacataggaaggtaaagtaagttgttgtgggaaaataccctcttgagtataatccctgcgtccatcagtgtggaaagtacgaatacgtcccatgtgtgaagttactgtgttatatacagcgaagaaaggctgatcctttccacgtttggtactattgtaagaagctttattgttacattcgtcccaacagcttttgttatctgtagtagagttataatgtgttttgctattgtttgtgcagtaatacccggcttcacgcaatctttgaggaaagaatatatcagccggagtatcataaggaaccgggtgtatatccattccgtaagttgatgaataacatccggtgataagagatgaacgagctgccgaactttgtggtgccacagaccatgcattcataaattgtatgccacgagctgccaagctatctgcattgggcgtatgtacatcgccattgccatagcaaccaaattcataagcactggtatcttcgaaggttagccaaaggatattgggtctttcgttttttttgtcagccgcctcggtttgtgaggaatataaaccacaaaaagcagtacacataaataaaggtaagtgtctcataaaatagtatgtattaaggataataaattcttgaggctaaagtagggcgtttatgaataacaagcgttttcttatgtcgaaaagagtgctaatattgtttcaataagctatatttcgacaatattagcagtgattcaacaaaattacggttagtcatagacgaatgtggataagatattatataaaagaggtgaaaagactggaggcgaaactttacttttgaaataataatctaatcaaaaaaaacatgagaagcttaatcttagtactattactgttaaatgcattattcttatctgcccaagaggctaccaacaacaatctgtcattcgataattctttacgcactgaatcagaaaagttattaacggagtggatggacacattcctgacttatcaatgcgacaatttacatccgtctcttgatggtggtgtgctgtgccctgcctgtgcccgcatgcatgggcgcatcggagatgccgtactccccttaatgtatctggctgataaaacacacaaagagaaataccttcttgctgccaaacgcctgatgacctggatggaaaacgtgcatcttcccaatggctcgtggatgaacgatgtacatgtctccgactggaacggtacaacagtcttcgcttccatagctctttatgaagcattacattaccatgggcatttattagacgattctacccggaaccattggaagcaaagactgatagaagccggtgagttcatgctggcaactccttttatatacagccgcaaacgggaaggtatgcggaatatgaatgtgaattattcagcctcagccacctatgcattgtatgccattggagagatgtgcaaccggcctgattttcaaaaagaagcccgtcagatagctgccgatctaaaaaactttttcactgaaaacgatacttttctatatggtgaaggtcccaatataggttcaaagacaaaaaacggctgtcttccggtagacctgctttataatgtagaagaatccttgccgaatatggtatattacgcccttatggcgaaagacactgatttactgactctcgttgaccgttcaatggctactcacctggagtttatgttacccgatggtgcctgggacaatagttggggaacccgtagttttaaatggacttattggggcggacgcaccagtgatggttttatgggaggctattatgcaatggctgcccaacatccggaatatttagaagcaatccatcgtaatatacaattactgaaaaaggctacttccgaaggtctgctttatggtggcatgcattatcgggtttccgggattgccccatgcattcaccatacattcggtcacgccaaggcaatcacttcttttttagaacttcctcccctgaatatcacttcttcccaagagcttccgcgtgataaaatctatggtctgaaatatttcaaggatatccatacctggcttatctctcaaggcccctggcgtgctacattcaccggatatgatgcagaatataaaattaaaggtactcatccgatgggaggcgcactcgctatgctatggcatacacaggcaggacctgtttttgccgctacaatgaaccaataccagttgattgaagcgcctaatatgcagagtaatagccgtaagtatatcatgggaggtacaccacggatcgagtttatgcaaaatgggaccatatatagcaatttggatgaccagaatacagatatcatctgtgatacagaaaagaacggctatcggtttaccgtgaatacccatttggtcgatataaatcaaaacgcacctgcccaaggagagattcctgtcacaatttactatacctacacccggcaaggtcttgaaataaacgtagaaaactgctatgacgctacatatctgatgctgccagtcatcgcatcacccgcagaagaggtaaaagtaactccccaaaaagcatctataaacaaggatggaggcactttatccatcacctgtacagccggacatatagaagtagcgccaaccgataaagatggacgaatattcaatccggttcctggattttcttttgtacctttgcgaataattcctaatagttcggaaaagaaaattcgtataaatattctttttcgctaatctattttgttaatttgcctcgtaattggatacgactatgaaaataatacaaactttgttagtacttttaggagggttatttccatttatactgaatgccggaacaacggaggatatttacttctctcacatcggtatggaagatggattatcacacagtaccatattcgcaattaatcaggataaagaagggaatttatggttcgccacgtacgacggtgtgaataagtacgatggttacaatttcactgtataccgccatgaatatgcaaaccccaatagtattgccagtgacataacccggtgcatagccatcgatgattcggatcagatatgggtgggtacccgtgaaggcctatccttttataatcgtcgtaaaaactcattctccaattactactataagaagaatggcatcaatgtccccatcaacagcattgctcccattaaagagaactggctgatgctgggtacggcagaaggtattttacttttcgatatcaagaaagaatgcttcttaaacgatactttaccttccctgcatttgttgaaaccaaccgttttagtacgccagggcgaatacatttatataggtgccgaagatggagtatatacttacacattatcgggaggtaaattggaaagattagtaagtatgcccgcagggatacgcatacatgccattttgtgtcagatgttcagccgaatatggatggcaaccgaaggggatggactatttatgtacgatgccaaaaccaaggagttgaaaaactatcgttatgaaagtgagcagtccggtttaaattccaattatgtacgctcattggagctggatacggaaaatcgtttatgggtagggacttatagcggactgaatatctataaagaagctaccgacaatttctcttctataaaaagttccgagatacaggaaggaagtctgtcacaaaattctgtcagaagtatttttaaagattctcaaggcggcatgtggttaggaacttattggggcgggttgaactattaccatcctctttgtaatcgcttccagcgtatcaagcatgttccttttctgaattcacttagtaataatgtggtcagttgtattgtagaagacagtgaacataacctgtggattggaacaagtgatggcggattgaacttctatgattccacctcaaaattatacaagaactacctgtttaaatcaggatcattggatgtacctttcaaggatattaaaacagtgtatgtagacgaggaacatgataaagtatatgtgggagcccatgccggaggcatgatggccctccagcgcaaatcgggacgggtagaatacttcaatcgccagaacagtaacttacccagtaataatatctattctatcatctccgatgagaacggaggattatgggtcgcttcactggaacatctcctgcatttcgatatagacaagcgcaattttacaattgtagacaaagatcagaatgggcgtaaattacaacaatataaccgtttgttgtttcgcgattctaggagacgtatatgggtaggaggtgaaatgggggtatctgtttataatcagataggaacagatttcctggccaatacagatttccatatagacccgatactacagcaggcatttgtgaattgcttttatgaatctacatcgggatatatctggatcgggacacgtagcggacttttcgctatgaaagaaggaagtaaggagctattgcaatataccacggcagatggtttgccgagtaatgttatttatggcatcatggaagatgcttacgctcgtttgtggataagtaccaatcaaggtttgagttgcctgaatccggaaaatggaaagttccgtaactttactatattggacggtttacagggaaatcagtttaatgccggatcttattgtcgtcaagataacggttacatgttgttcgggggtgtcaacggcattacattattccgtccggaaacactgattgacaatccttatgctcctaaaccggtaatcaacaagctgtttgtttacaataaagaagtccttcccaacgacgaaacgggaatattgagtgaaacgattgaatatgcagatcatatcaccttatcctcttctcagaattcattcgccatatcttttgtagtgtccaactatatcgccggcaaacacaacacttttgcttataaactggaagggtataatgacgagtggtacagacagaacgataccagtccggtttcgtactctaatttgccggcaggtgactatactttttatataaaagcagcgaacaatgacggtaaatggaatgaagaaccgactgtacttcatattcgcgtcctgcctgtttggtactgtacctggtgggcactttcattgtttgctctgtctttcatgttggtggtatttggcattgtccgctatttctggttgcgtaaaagtatgcaggctgaaattcttatggaaagactggacaaggagaaacaggaagaaatcagccagatgaaaatccgtttttacgttaatatatcacacgaattacgtactccgctcaccctgattgtagcaccactgcaagaattgctaagtcgcatatccggacattgggaacatgaacagttgctgtatatacaaagaaataccaaccgcttgctgcatctcgtcaatcagttaatggattaccgacgggcagagttgggaatctttgaactaagactggtaagtgccaatgcctacaaaagagttttgaatagcttcatgaactatgaaagtttgtcgaagaaaaaagatatagactataatttctatacggaattgcaggacaaagaactgttattcgatgaaaactatctggatcttattgttaacaacttactgtcgaacgcttttaaatataccgaagaaggtgaaagtattacggtaaaactgtatcaggaagcaggtgatcttgtactgcaagttacagatacaggtatcggtattcccaaagaaaaacaggagaagatttttgagcggttctatcaagtggaaagcggacgtgaaggaagcggtattggtctttccctggtacaacggctggttgaattgcaccatggaagaattgagttggagagtgaacccggaaaaggttctactttctccatttaccttccgcaagataaatctgtatatagccgtgaagaactgcttggaggggaagagaacgcagacaatcaacgggtatactctacgaatgcgcacgacgtatatatcggtgatgaagaagaagccgatacagaaagcgaagaagatgagaatacaaataaacgaggaacactccttgtggtggaagacaataaagaattaaggcaatatctggtcaatggattgtccggcttattcaatatgctggaagctgaaaatgggcaaaaggcattagacattctgaaagagaaggaagttgacctgattgtaacggatgtcatgatgcccgtaatggatggtgccaaattatgtaagttggtaaaacaaaacttacgcacctgtcatattccaatatatatgctgtctgccaaagcagatattaaatatcaattggaaggtttacaggtaggagcagatgattacatagccaaacctttctcgatggcaatattgaaagcaaagattatgaacatgctgcgtacacgtcaccgcatcttcgaacactattccaataccaccgaaatagaaccggagaaacttaccaataacacgatggatgaagaactgctcagaaaagcgattgcagtgattgaaaggaacatggacaatgtagaattttctacagagcaatttgcgcgtgagatgaatatgagccgttctaatctacatctgaaattaaaagcaataacaggaaagtcagctatcgactttatccacaagatacgctttaaccgcgcatgtcagcttttgcaggaaggaaaatacaatgtttcagaaatcagttttatggtaggctacaatactccttcttattttgcagcacgcttcaagaagtatataggttgtctgcctaccgaatatggaaagaaataagatatgagaaaacataagatgtggacactactcattgttctgtccttgttagcagcatgtaaacaaccccaatcattaaccccttctgtcagtgaagtcgcacaaattaaggcaaatggtacatccatccggcttttctgtttgacaaacaagaatggaatgacaatcaaagtcaccaactttgccgcctcgctaacgtccgtttccgtacccgacaaaaaggggaacttcgaacaagtagtactgggcttcgatagtttagaaagttacttgggaaagcatcctaaatttggtgccactgtaggcagatttgccaatagaatcaagcatggcgagttttgcctggataaccagatctttcaacttgaaaagaacagtaaaggaaattctgttcatggcggaagccggggattcaatactcaagtattcgaaacagataccttttatgtagtgaaagacacggcaatagttgtcttttcttataaaagcgctcaccttgaaggaggatttcctggcaatctgaatctgtcaatcgcttataaactgactgatcgcaatgaagtaatcctggattatacggcaaccacggatcagcctactgttgtaaatttcaccaatcacagctacttcaatctgaccggctgtaaagagcctgtactgaaccatctttatacattgcatgcggactcaattaccccggtagattcaacaggagtccctaccggagagctgaaggcagttacaggaacggagtatgacttcagaactccacgaacagccgaaaaacaaatccgacggatgatgggaaaaacttatgatatcaattataaactaaataaacacccggattctttggaattagtagctacagtcaccgaacctgtatctggaagaatactaaaagcatacaccactgaacccgggatgcaattttatattccaagttccaacatggattatctgaatgggcatggcaatagaaagtacggtaaatactatggattctgcctcgaaatgcagcatttcccagactcccccaataagccccaatttccttctacagtattgcgacctggcgaaatctaccggcagacaacaatctataaatttgaaaattcaccagcaacgaaatgccacctccgtatcaagtcagtacctcctctgtactgagtccgtatctatgagtatggagatactacggaggaggtacggacatgatacggagatacctcaatggtctttcagcaatcaatcctgcatattatttctttattgaataaaggccccccttccatagggctctgtggcgcacattttacacaaaaacattctaaggtgaacaatattagcatgcaaaaagcataaaattgggagtatcaaaaacaatactttcccacttttttttgcgcttgcagtaagtttgccgtcacaaaaatgatctctaaagttaaaccttagatttatttattatgttcaaattaaaagaatctattttattgtttttcctcgctttcgtcagtacgattgcatacgcgcaaagtctgacagttactggtaaggtagtcgatagcgaaggttatgaagttattggaggtagcgttattattaagggtgctgccggtattggaactgttactgacatagatggtcactattcgctgaaagtgaatgatgcatctaaagatgtattagttttttcgtatgtgggaatgactccccaggaagtgaaagtcaacaatcagagtgttattaatgtaacgttgcaggcagatgccgtactgctggacgaagttgtagccatcggttatgcaactgtaaaacgtaaggacctgaccggttctgttgcttcggttaatagcaaagaactttcgaaagttcctaccagtgatatcacacaagctcttgccggccgcatggcaggtgtgcaggttatgcagagtgaaggtgctcccggagcttccatttctgttcgggttcgtggtggtatttccattactcaaagtaacgaacctttgtatatcattgacggtttccccagcgaagacggtatgtctacccttgacccggcggaaattgaaacaatcgacatcctgaaagatgcttctgctacagctatctacggtgcccgtggtgctaatggtgtagtcgttattactaccaagagcggtggtaaagacggaaaagcgactgttacatttgacagttatgtaggtttcaagaaaatagccaagaagctggatgtactttctacttatgaatttacgatgttggattatgaacgtcgcgtttacgacgctaccactccggacgactgggagaaagacatcaaaaagttcaccgaaatctacggcaactacagtgaccttgaaaaaaactatggcaatcgtaaagggctggactggcaagatgaaacattaggacgcacggcaattacacaaaactatcgtgtaggcgtttccggtggtactgataaattaaattataacctggcatattcttattatgacgaagagggtgccatggtatatagcggcaacaacaagcacaacatttcattcaacatgaatcataaagtgaatgaccgcttggacatcaccgcccgtatcagctacgaccaaatgaaaattaccggtatgggtacttctgaaggaggcgaccgtttcaataagatgcagcacattttgcagtaccgccccacagtaggtatcaacggaaccgatgacctgttattgggagatgaagaccctattttcctggatgattcgggtaacgtaatgcagaaccccttactttctgcagcagaagagacgaatgatcgtgaatatcgtacattccaggctaacggtggctttactttgaaacttttcaaaggtctctctttccgtaataccacaggtatgcgttaccagacacgacgcaatgatgttttctacggagacaagtcaatcacagcaaaacgttcaagcatcaatggtagtattcaaaatctggagaccggtagtttccagacttcaaacgtattgaactataactggtcgggtaaaggtcatgacgtgactgccatggtaggtcaggaatatgtagaccgttggaaccgtaatttcaaagcagcagcatctaacttcccgaatgacgatataggtttggctgacctctcactgggtcttccgacagcagttcagtctgccgaaaactatgatgataaattgctctctttcttcgcccgtttcaactacggcttcaaagataaatacttgtttaccgcttcggttcgtgccgatggttcttccaaattcggtaagaataacaaatggggctattttcctgcattttcagcagcttggcgtctgggagaagaagagtttatcaagaacttgaatatcttctctgacttaaaagttcgtttgggctatggtatggcgggtaacaaccgtatcgacagttaccttagtctggctgtattgggatctgttacttatcccaatggagactccacccagcccggttatgtttccaagcagattcctaaccctgacttgaagtgggaagctaacaaaaccttcaactttggtcttgacttcggtttcttcaatcagcgtttaaccatttctcctgaattttacataaaccgcagtagcaatttgttgctaaacgccaaactgcctacttcatccggttacaacagcatggttatcaatgccggtgaaacagaaaacaaaggtattgacttaaccatcaactcaaccaatatcacgaataagaattttacctggaacacatccatcactctgtcacacaataagaattctgtaaagaaactgacgggagaagatgtgcagttgtgggaggctaacttcggttacagccagaatacgcacattatcggtgtgaaccaacctttgggacagatgtacggatacgtaacagatggtctgtaccaagtatctgactttgattacgatgcagcaactaaaacttacacactgaaagacggtgttccgtatgcaggcgaaaaaggtaatgtaaaaccgggtatgtggaagtttaagaatatagatggcagcaaagacaataaaattacagaagctgacaaaacagtcattggtaacgcttatccgaaaatttacggtggtatcaataacactttcacttacaaagatttcgatttgagtatatttcttacctatagcatcggtaacgatgtattcaatgcaaccaaactgaccaataccaaaactgctttgcagaacaaaaacgttttggcagtagctgactctaagcaccgttgggtattggttaataaggcaggtgacttgattacagatccccaggagatggcagacatcaacaagggcaagactgtagccgccatttatgataacgaagcaggtgatacttacattcactcttgggctgtagaagacggttctttcctgaaactgagtaacattactttaggttatacattcccgaagaagatgatcagaaaaatcggattgagcaaattacgtctttatgccacaggctctaacctgctgacctggaccaaatattccggcttcgatcctgaagtttctaccatgggaaatggtctgacaccgggcgttgactttggtgcttatcccagaagccgctcgtttgttttcggtattaatttagctttctaatgaacttcaaatggagaatacaatgaaaaaatataaagtgattgcgctaagcgcactgattgcagcaggattcacttcttgcgacctgacagaaaaacctacttcttactacgagaaggacacttattttgaaactatggaccaggcaaaaatgtcagtagtaggtatttacgattgtctggctatagacaagcattacggacaatatgaaatggcgatgcctgcttcggacgatacctattatattcaaggaacaggtacggataacacacgtcgtgatattgcccactacatggtgaaaccgaccaatacttggattgcatccatatgggaatacaaatacctgggtattgaccgcgctaatttttccattgccggtattgagcagatgacaggttacgaagaagattccaatttaaaggagttagtggctcaggcacgtttcctccgcgcatttctggctttcgatttaattaaatactggggagatgttccgttcaaaaccacttatactgccggatatgaagaagctttcaaaggtcgtgtaagtcgtgaagaaatctatgaccagattatagttgacctgaatttcgctaaagagaacctgcaaaaagacaatgcttcactttcaccggaagttccttcacaaggtgctgcccatgcattgctgatgcgtgtttatctgcaacgtgccgggtacagcttgcagcaagacggtacattgacccgcccggacgaaactaaaagaaaagaatactttaacgctgtaattgccgaatggaccgccttccagaacaaaggcaaccatggtttttatacaggtggttttgaacagttattcagaggttattcagaaggcatcttgaattcccaagagagtttgtgggaaattgctttcaatcctacaggagccggctacaaggacaatgcaggtacttgggctacttataacggaccagcggtagaggcaccgggaaaaaatgctccagctgatgcatggggacgtgccaatgctttcttccgtgtactgccggcctggaaaaacttctttgaagaaggcgatgaacgcagagatgtaatggtatgtacctatcagtacaaatggaatgcaaatgccggcaaacatgataaggttgaaaacgcaaaactgactgactggtatcccggcaaatggcgcagagagtggatgcccggaggttttgtagatcccaacaacacaggagtgaactattgtccgcttcgcttcgccgacgttgtattgatggcagccgaagcttataatgaaacaggcaacaccccggaagcctggaaactgctgaatatggtacgtgaacgcgcaaaagctactccgataaccgatgccaactacagcagcctgatgaaagctccacaagtttatgatctcccatatattcaggatggagacgctgccggcaagttccgcacagctctttactgggaacgtggtttcgagttagctttcgaaggtcagcgcaaatacgacctgttgcgctggggtatcttgggcgacgcactgaagttcttccaaggaaatatggacaaaacactgaaaggcaagtatgtagccggtgataaattcgtcaaaggccagcatgaacttttcccgataccactgggagaattacaggctaatccggctttgaataaccagaataatccgggttacgaataaatccgggaaatataaaattggcaattgcgatggagagagaatctgtttcatactctctccatctgctttacttataaaatgtattgtatgaaaagatttttattattttgttgtgcggttgctacattacaaggtttctccagctgttcatccagtcagcctaatacagagtatggctggttgaaaaatgcaatagacacctctgtacagcaattggaagaaacagtggccgatgtaggtgattcagtcttattaccccgttccatctggacaggatatgatatggattttctctgtcggcaattgcaaagagatcctgcaacctttaaggattctttgcggattaagccagtgaaggatgccataggaacccgtcgctattgctcttccatctatgattggacaagtggttttttccccggaaacttgtggtatgcgtatcagctaaccggcattgaaggtttaaagaacggtgccgtgaaattcacgaattatttgtatcccgtaaaagactataaaggcacacacgacatcggatttatgatgaattgcagttatggcaatgcatatcgcttggctcccgccgacagcgttcgtcaggcattggtgcaaacagctgataacttatgcagccgttttgatccgaccataggttctattcgttcctgggatttcgggaagtggaatttccctgtaatcattgataacatgatgaacctggacctgctgttttacgtaagccatcttaccaatgattccaagtataaggacatcgcattgaaacatgccgagacaacattgaagaatcatttcagaacagatcattcatcctatcatgtagtcagttacaataatgatggcagcgtagaaatgaaatgtacccatcagggaaaaaatgacgattcgtcatgggcacgcggacaagcctggggagtatatggatatacctcttgctaccgtgaatccaaagatacggccttcttgcagcaagccaaagatattgcaacgttgattatgacccgcgtaaagactgaagatgcgatacccttgtgggattatgatgcaccggatagcccggaaacaccccgtgatgcatctgccgcctctgttacagcttctgctttgatagaactcagcacgttggtagaagacggacaagtatattttgattatgcagaaaagctactaaaatctctttcttccgatgcttatttggcaaaggttggtacgaatcagggatttatcctgatgcactctacaggttcgttgcccaatggctccgaaattgatactcctatcaattatgccgattattattacctggaagcattggcccggtatatgcaggtaaaaggactcgattataaatcgctttaaacgaaattaatataccatgaaaatagcaaagtattttttatgtctggctcttttgctggttgccataagtgcggaagcgcaacaattgcggaaggaagcttttgatttactgaacctggattatccgggtttggagaaagtaaaggccgcaggcgcccaacaacaatgggataaagcggctcaggctttattggactattaccgccaacgcaccggcataggacatcctgatattaatctgaagaatatcaagatatcaaaggaagaacaaaaatgggcggatgatgccttggaacatacattttttgtgcacaaaggatatcagccttcctataattatggtaaagacatcaactggcaatattggccggtacaggacaatgagttgcgctggcagttgcatcgccataaatggttcaccccgatgggaaaagcatatagaatctcaggggatgagaaatatgccaaagaatgggcataccaatatatggactggattaagaagaatcctctgacaaccgtagagaaagaagaatacgaacttgtcagtgcaggtgaagtaaaaggaaatgctgagaatgtacgctttgcatggcgtccgctggaagtgagtaaccgtttgcaggatcaggcactgcaatttctattgtttattccctcacaggcttttactccggagttcctgaccgagttcctcattaattaccatcggcatgccttacacattctgggcaattactccgatcaaggcaaccatctgttgttcgaagcacagcgtatggtctatgcaggtgcatttttccctgaatttaaagaggcaaccggatggagagagagtgggataagcattttgaaccgtgaaataaaaaaacaggtttacccggacggcggtcaatatgaactggacccgcactatcatttggcggcaatcaatatcttctgcaaggccctgcgtatggcagacgtcaatggtttccgtcaggaatttcctgtcgaatacgtgaatactgtgaaaaatatgattgagttctactctaatatctgtttcccggattacagtaatccttgtttcagtgatgcgaaactgggagaccgcccggcagaagtccgcaattatcaagactggctcaaactgtttccggattgcgactggattcgttattatgctactgaaggtcgtgaaggttcccccctacccaacctttctcacggagccctgacttccggtttctttactttcagaaatggctggaaacaagatgctactgtaatggtggtaaaggccggtcccaaaggtgagtggcactgtcaaccggataacggaacttttgagctttggttcaatggtcggaatctctttccggatagcggttcatacgtctatgccggtgatgatgaagtgatgaaacttcgcaactggttccgccggacaagttcacataataccctgacactggatgagaaaaacttgcagaccacacaatccgttactaaactttggcaacccgaaggtaatgaacaaatcctggtgacagagaatcctcattatgagggtttgaagcacagacgttctgtcttctttgtagaccaatcttattttgtcattgtcgatgaggctgtgggagatgcaaaaggaacagtgaatctgaactatcatttatgtgaaggtactgtaaatgtggatggaaagaaccatattctgaccaccgcttatgacgggccaagcaatatgaagctacaatgttttgccgaaaagaaagcttcgataagagaaaaagaaggatggcgttcaactgcttatcgcgtacgtgtaccccgtacttcggtttcttttgatgtggacaaaaaggattcggaagctgtacgctacataaccattatctatccttcgaaaaatgcagcttcttttcctgcattcaaggctaaattcctgaataagaagtttgatgagaatggagtgaagatagaaatatctgttgatggaaagaaacgtcaattggagtataaactataagaagacttttattatgaatcgcttatcatacttatttttgcctctcactgccatcggagtctccgcttgcagctccaataaggccaaagaggaggtgaaacgtccgaacattatctttatgatgacagacgaccatactacgcaggctatgtcatgctacggtggacgcctcttgcaaactcccaatatggatcggattgccaatgaaggtattcgtatggacaattgctatgcggtcaatgctttatccggtccgtcaagagcttgtattttgacgggcaaattcagccacatcaatggattcactgataatgccagtactttcgacggcaaccaacagacctttcccaaattattacagtcggcaggctaccaaacttcgattatcggtaaatggcatctgattactgaacctcagggatttgattattggtgcatcttgaccggacaacatgaacaaggggattattataatcccgatttcaatgagaacggaaagcagattgtagaacagggctatgctaccgatattatcacggataaggccatcgagtatctggaacacagagataaaagcaagcctttctgcatgatgtaccaccagaaagctccgcatcgtaactggatgcctgccccccgccacttgggtatgttcaataataccgtttttcctgaaccggccacactcttcgatacgtatgagggaagaggttccgctgccagggaacaggatatgtctattgaacatacattgaccaatgattgggacctgaaactgctgactcgtgaagaaatgttgaaagatacgaccaatcgcctctatcaggtctacaaacgcatgccggctgatgtgcaaaataaatgggattcagtatatgcccagcgcattgccgagtatcgcagtggtaaactggaaggtaaagagttgatcagctggaagtatcagcaatatatgcgggattacctggctacaattgttgctgtggatgaaaatatagggcggttactcagttatctggaaaaaatcggtgagttggacaatacaatcattatctacacttcggatcagggtttcttcctaggcgaacatggttggttcgataaacgcttcatgtatgaggaatgtcagcgtatgccactggtcatccgctacccgaaggctatcaagagcggaagtgtttcgaatgccattgccatgaatgtggattttgctcccactttgctggattttgccggagtagacatacccgccgatattcaaggccggtcgctcaaaccgattttggataatgagggaaaagtaccggcagactggagaaaagccgcctattaccactattatgagtatccggcggaacattcggttaaaagacattatggtattcgtacagctgattttaaactgattcacttctataatgatgtggacgagtgggaaatgtacgatttgaagaatgatccgaatgaattgaataatgtgtttgacaaaccagagtatgccgacaagcggacagaactgatgtcactgctgaaagaaacccaaaagcagtataaggatgatgatccggatgaaaaggtaaatgagctgttcaaaggtgacagacgattgatgaaaaatagataatctaaatgaataccatgaatagaagaagttttttaaaaaatacaagctggtccttcctcggattagcagtttccggtagcttattgtccgcatgccaacgcggaactgccgcaggaaagaaaattatgccctctgccagtaatctgaaatatttctggggagacttgcataaccactgtaacataacctacggtcatggcgacatgcgttctgcgttcgaagccgccaaggggcaattggattttgtatctgtcactccacatgccatgtggcctgacatacccggggcagatgatcctcgcctgaagtgggtgattgattatcataccggtgctttcaagcgtttgcgcgagggaggctatgagaaatacgtagccatgaccaatgagtacaataaggaaggagaatttcttgcctttgtaggttatgaggcacacagcatggaacatggagatcatgtggccctgaactatgacctggatgcgccgttggtggaatgtacctccattgaagactggaaacaaaaagcccgcggacataaagtatttataactccgcatcacatgggttaccagacgggctatcgcggatataactggaacttctttacggaaggagaccagactccgttcgtagagatgtattcccgccacggattggctgagagcgatcagggtgattataattatctgcacgatatgggacctcgccaatgggaaggtacaattcagtgtggattggagcaaggcaagaaattcggtattatgggctctacagatcagcacgccggatatccgggcagttatggcgatgggcgtataggtgtactggcagagtcattgacccgtgataagatctgggatgcaatgaagaaccgtcacgtttgttgcgctaccggtgataagatcaatatagattttcgtctgaacgacgcttttccgggcgatgtggtacggggtaacagtcgccgtatttatttgaatgtggaaggcggcagttgcatcgattacatagacattgtcaagaatcggaaatgcatagcccgtttaagtggtccgttgttgcccgaaatgccggaaggagacatggtacgttgtaaggtaaagattgattttggatggaaccgtgaagagcagtatgtacattggcaaggtaaactatctatcagcaaaggaactatcaatgctgtggaaccttgcttccgtggcgctgccttcacttctccgcaaccgggagaacccgagtttgagacaaaggtgaaccgtattgtgtctgttacggacaaagatacggagttggacatgtacagttccaagaatccgaataccaccactcccgccatgcaggccgtcattctggatgtcactatgcctaaagacggtatgattacggcagagttcaacggcaagaagtttgaacattcactgggcgaacttctggaaggttcccgctcccatttcatgatcggatggcttagtgaagctatcctattcaaccgtgcaatgccggaaagttgctttatggttgaacattatatggaagacactgaacccgaaagagatacggactattactatatcagagttcgccagcgtgaccagcaatgggcatggagctctcctatatgggtggaaagaacataatgtttccttatttgatgtaataaattatggaatacgcaattggcattgatttaggtggtacatctataaaatatgctttggtagataaagcgggtaattctttctttgagggaaaattaccctcttttgcttctgtctcagctgcaaaagtgatggaacaactgataaaggctgccaccttgctgaaagatgaagccgcaaaacagaactggaccgtactgggcatagggctcggtacaccgggaattgtagatgaaacaaatcgtatcgtactgggaggtgcggaaaatattgtcggctgggaaaacatagatgtagcctcccttatggagaaacagatgagtttaccggtagttgttggaaatgatgccaatctgatgggactgggagaaacgaaatatggtgcaggaagaggttgcactcatgtggtgtttctgactgtaggaaccggtatcggcggagctgtcatcattgatggtaaattgttcaatggatatgctaaccggggtacggagttggggcatgtaccgttgattgccaacggtgaacgttgtgcctgcggggcaatcggctgtctggaacattatgcttcgactgccgccttgacaagacgctttagcgcattggcgaaagagcagaatttaagttttgatacggagataaacggggaattgattgttcgcctgtatcatgaaaatttcctgctcgctgtcgagtgcatgaacgaacacttttactatttgggcagaggaattgccggctttgtcaatatcttcagtccccaacggattgtgataggaggaggtgttgcagaatccggcagtttctatttagagaaaataagggcggtagtcaaaaagcacgtaatagcagactgtgccctgaataccaagattgtagcagccgaattgggcaataaagccggtcttatcggtgcagcatcactaattctataaacaaacgaattattatgaaaaataacaagaaatggggtatgctggcattgatcatgatgttctggtttaccatttcattcattacaaacattctcggaccgttaattcctgacattatccataactttgagctgaaggatctggcaatggcgggatttatcccgacttccttcttcctggcttatgccatcatgtcgataccggcaggcatattgatagataaatatggagaaaagccggtgctgtttaccggtttccttatgccatttatcggaaccgtcttgtttgcatgtttcccgttctatttgatattactggtatcttcctttattatcggcttgggaatggccatgttacagaccgtaattaaccctttgcagcgtgttgtcggtggagaagagaactacgcattcatagccgaattggcacagtttgtgtttggagtagcatcgtttatcagtcctttggtttatacttggttaatacatgcgctggcaccgggagtctatcagccgggaaagaatttcctgcttgatattttggcggacatcactccggtcactcttccctgggtttccctttattgggtattcacagtgttattgctgattatgctgctcattgtgtcgttggtccacttcccgcgcattgaactgaaagatgatgaacgcagcggttcttcggcttcctacaagaaattgttccgtcaaagatacgtatggcttttcttcctgggaatcttttgttatgtcagtacggagcagggagtttctatttttatgagtacttttctggagcagtatcatggcattgatccgaagaccgtgggtgcgcaaagcatcagttatttctggggttcaatgactgtcgggtgtttgtttggcatgttcctgctgaagttgatagacagtaagcgtttgctgcaaatatcgggcatactttccatgagtttgctgttaattgcattattcggctctgcggaaatagcggtgtgggcttttcctgcaataggcttttgtatctccatgatgtactccatagtattttcacttgccctgaatacagtaacccagaatcacggttcttttgcaggcatcctttgttccggaatagtgggaggtgcaggtggtccgctgctcgtcagcctggtatccgacgccacttcgttgcgaacaggaatgttgcttattctgattttcatgggatacattacgtttatcggcttctgggcacatcctttggttaataataagacagttagcttgaaagagctggttaccttcaaaaaacaaaaataagattctgagatgaaaaagatagtattgggcttatcggccctctgcctgttaatggcatgtggcagttccgagcaacctgccgtgataaaggtttccgaagaaacattgatgcatgaagtccgcgcaactccctctcctgccgatggcacatacgtcaaggtgaatccaccgcgtttcatgtggccggacaaattccctcatttaggtccggtgctggatggagttccgggacaagtagatgaaaagccaaaagtagtttaccggattcgtatctcccaagacaagaattttcggaaagatgtccttaccggtgaacgtacctgggctttcttcaatcctttccagtgtctggcacaagggaaatggtattggcaacatgcttatgttacccccgaaggtaccgaagaatggtcgccggtttaccaattctatatagataaagatacaccggaattcaatccgccgactttggaaaaagtcctggcagaatatccttcccatcacccgcgtgtgttgctggatgcagctgactgggaaaagattatagcgaaaaataaaaataatccggaagcccgggcttatatggacaaggcttcccaatgcatttcccgtccgttgaagcatcttcaggaagagatagatacaacgaatgtagttacgttgaccaacattgtgcaacgtaaatcagccctcatccgcgagagccgtaagattgtagacagagaagaggccaacgtggaagcattggtccgtgcttatttgctgacaaaagacgagaagtattatcgggaaggcattaaccgcctgagtgaaattctttcctggcaaaaaagcaaatactttgcaggcgactttaacctgtccaccctattatcgatgagcacctccgcgtatgacggattttacaatttactgtcaccggaagagaaacaactgctgttggataacatccgcagaattggagacaagttctataatgaatacgtgaaccacctggagaaccgtattgcagacaaccatgtgtggcagatgactttccgtatcctgacgatggcggcattcgctacggtcggtgaaataccggaagcgtccgtatggacagattactgttataatgaatggatttcacgccttccgggcctgcataaggatggtggatggcacaatggagatgcctatttccatgtaaatatacgtaccttgatagaagtgccggcctttttctcacgcatatccggcttcaacttctttgcagatccgtggtataacaacaatgccttatatgttatctatcagcaacctcccttctccaaatccggaggtcatggcaactcacatgaaggacaacgcagcccgaacggagggcgcgtaggatatgccgatgccctggcacgcgaatgtaacaatccgtgggcagctgcttatgtacacgaaattatgcaggaagaccctgacatcctgtcgaaggctttcgaagccaaaccggcagatttgacctggtatcgctgcacaaccccgaaggaaaggcctgcttatagcaaacatctgtcggaactaccggaagccaaagtcttcaaacaagcaggcactgccctgatgaataccgatatagggcatcatgccaacaatgccatgctttctttccgaagcagcccttatggttccacatcccatgccctggccaatcaaaatgctttcaacaccttctttgggggtaaggctatcttttatagcagcgggcatcgtacaggatttacagatgatcattgtatgtatgcctaccggaatacccgtgcccataactccatattagtaaacggtatgggtcagaagataggaacagaaggctatggttggattccccgctactatgaaggtgaagaaatctcttacgttgtaggcgatgcctccaacgcctatgggaaagtagtctctccgttgtggctggaacgcggacgtttatccggcactcaatttacaccggagaaaggttgggatgaaaataagctggaattcttccgaagacatatcgttcagctcggacgctcgggtttgtttgttgtttacgatgaactggccggtaaagaaccggtagaatggaactatctgctacatacggtggaactgcctatggaggtgggtaaggaagaaggaggattgcgcatcctgggtaagaataaagcggatggaatatcgatagctcatttatattcttcacaggagatgacttatgcacaaacggatacattctttgtagccgcccttgactggaaaaagcgtcttggcaaggctcttgctaatcattatcattttacggcaacgacaactccttgcaataaagtgttttttctcaatataatcgatgtacatggaaacaaccgcgccgatgccgtgataaatcatcagggaaatcgcattacagtagaaggatgggttattgaatgtaatctggatagtgaaggcaaagcgttcctgcacatagagaatacacagaacggtgcttcactggacttcaactataattcgaataagggtgctacgactatcgtcgatcaggtaggcggaaagagaatagagaaaagactggttgattccttaccgaaacctgaaatataaaaccgaatattaaatcatgaaagttactaatatggttaaacaaattccaatgaagcatctggcatttttttctttgctatgctcttctgcggcttctgcggccgaacgtcccaatatcatctatatattcacggatcaacagacagccagcgccatgagttgtgccggaaatccggacctgcacactcccaatctcgaccgattggcagccgccggtgtaatgttcaataatgcttattgcaccgctccgctcagcggtccttcacgtggagccatgtttacggggcattatccggatgcagtaggactgtcagtcaatggttcaccgatacccgactcgctcaggacacagacattaggcaccttaataaagaatgccggatatgattgtgcttatggcggtaaatggcatcttcctcttcttgatgtccccgacaaagaatacggcttcgacaacatttacaaacatagtgacgacggactggcggaagcttgcgccgaatacctctcacgcaaacataaaaagccttttttcctggtagcttcttatgacaatccacacaatatctgcgaatacgcacggagccaaaacttcccttatggaaatattgatacgcctgatatacgggactgcccgggagtaccagccaatttcgccaagaatccttacgatgccgatgtcattgaaagcgaaagggcaaacaactataatgtatatccgactgccggttttactcccgaagactggcgtatgtaccgttatacctattatcgtttggtagaaaaagtagataaggagatcggaaaaattattgatgccattgataagaacgatctttggaagaatacagtagtgatcttctccagtgaccacggagatggtataggggctcaccattggaaccagaaatctgctttatatgaagaagttatcaacattcctcttatcgtaaccctgcccggcaagaagaatgcaggcaaagtattgcctcaacttatcagcaacggtatagatttcttcgcttccgtatgcgactgggcaggtgccaagatgccggaaggagcagccggaaagtctttccggaaagttgtggaagaaggtaatccacaggccttacatcaagaatacatcatcaccgaaacacggtttgacggcagcaagacaagaggctgggtagtacgcactgagcgctacaaatatgtgctttatgataaaggaaaatatcgtgagcaactgtttgatatgcagaatgacagaggagaaatgagaaacctgatcatggaaaatgcctatagccaggaactgcaaaaacttcgtgatgtccttgaaaagtggatgaatacctataatatacgtccaacccgtccgaagctgcacgatgttcccggaaagaaactcaaaagcacaacccgatatcagacagcttataaatagattaagaaatgatagcccgccttattatctttaaagtgcaataggcggcaattagtttcccggcgtgaaactgacagtttcattacttgaaaccagtagtttcacaccgagaaactgacggtttcatcccttgaaactaatagttcctccgcaggaaactttttcttcctttatagtactaagcaacgttttaaaaataacttggtacataaatgataatttataggcgagaatgggtacgcggacgacgcggataaggcggacgaacgcggagtttgaaggctgcgctgtgctgcattttttaggcgcggattacgcggattacgcagatttatttcttgatcatgtatagcgcagcctttaatccgtgaaatccgcgtaatccgcacctaaaaaaaatacttgtaatccgcgttcgtccgccccatccgcgtcgtccgcgtacccattctcgccgctaaattatcatttataagccgactcgctgcacttgcttatgtaccaagttattttttaagcattactaaaagagtacggtgcaggatgatttcacaaaaaataaatattaaggctaaagctgaattcaacttttaagtgcgacacgtcttttagagtatttgcaaacctctttcctcttcaaactaaataccggcaggaagaagaaaataccgataatagacatcaccaatccgccaatagtacccgcagccaacggaaaccagaaagcttccttatccgtccccaccataaacgggataaaacccagaatggtggaaactaccgtaagaaaaataggcagtatctttgcattccacgcctttgtatatgcccggagcatagaaagccggggaaagcggctacggatgctgttatactcattcagaatatagatgctggcatttaccgtaataccacaaagcagcacaaacgaagcaaagcctccctggtcgaaattcaagcggaaccaatagaatgtaaggaacactcctatataagataccggaataacaaagataatagccaaaggctgtttcagagaattaaacagaatactcgttgtaaagaagataatagcaatcacaaccagcaacaacaggtattgcttgttatctttcttaccccatgaccacgattggctatccgattcagcagtataccccatcggaagcaatttattaaactcttccaaatcccgcttctgtattttattgccttgctcgtacgaaccgatatactcatattgcagacaaagacgatattgctgattctctttggctatctgttgcggcatctgccccttctctaccgtagccaactcggaaagtttataatgctttccgccatccaccccgtaaggaaaaaactgcatagcccatacatcatagtcgtgagactgtcgggaagaaagtcgaatactttccgtaccgctttccgtcaccaccgaacccacctgcatattcttgccgaatatcggctggatagcggagaacaaatgctgggcattaatcccctcctgagccatacgctccttattcagattgaagtaaaactcttgataatcgtctttccaccaggaaaattccgacttgataaacacttccttgatgcgacggtgcgaaagcaatacctccttcagcttttcggcccatgcatagagctcgtcataattgtagccatacatcttgatgcgataagaacctgcgctctcacgaacatcattactgaagccttgatcttgcaagccatatacatcccagctaccacctcctaactcagatactttaccaatcagattcgcctttaacgtataagggaaaccactatgctgatactctttcttgaaataaatctgaagattggccctgcgtgcattatagacagaagcatgaaactgcttaatctccttgaagccgctaagataagtttccacacgtttcaccagcgtattcatctgttccagcgtacttccattcggtaagttcgcattcgcatagagcaccacttcttcattgcgactaaaataactgccttcgtacactttctgcacaaacaaacgaagactaccacctaaagccttatccaccacaggtttcactttctctttataagtagaagagcccaacgtcttgttataccgttctatccatttgccttcaccctccaacttctcaggaagaaggaaaacgggcaacccgaaaccaagcaggagcaaaatgcacaccgccaccctccagcgcagaagaaagcggatgagcaactgatagaaatgcgtgaagtaaacagtcagcctgcgaatacgtatatgactccgcacccagcgtttcacgctctgcctcttgacaagctttattctatcaatcatagccggaacaaaaaagagagccacgaaaagagataccgctagattaataatcaccacagctgcgaagtcttgcagattcagccggattttctcatccagaaagaagataataaccaaagcccccattgtggtcaaggtagccgccagtacggacataaaagctttcagattacgcctgtgcaaaatgtggtccgtcatcacaatggtactgtctatcacaagattcaaggacacagtaatccctgccaatgaatacagttgcacctccagcccgaaaagataatagaaaataaccgccacggaaatgttgatagccaagctggtaacaatcagcaacagatacttcagattcaacgtaataatccagacgaataccagcaggatcagtactgtcagccccgtacggaaataaattttattcagttcctcgcgaatatactccgtggcatcatagctggtatgcacctcgtagccgggcggcaaagtcagacgtattgcttccatttcccgcatcacttcattgctcagttgcaattggttagcagtctctacggccgtgacagacatataaatggaattcagaccattgatacggtaatagctttggggggcttcttccatacgcgctacagtcaccaactcgtccaagcggataatcttaccgtccgaagcagtcaccgtgatgtccgaaggaataaattgtccgctgactccatccggtatcaagaccagacgtatccactgcttaccaccggccgtatccatgttgtgcgttcccagaaactctttattataatgtaactggatggcacgttgaatatcagaaatgctgattcccagcgtccgcaattgttcactgtcgtattccaaccgccattccatcggggtagcaccacttaaatctatcttataaatgccttgcaacttagccagacgcggcttgatatgttcttctgcatactgctgtatcagtataggcgtggacggtgcattcagtgtgaatgataagaacggacgggctgtattcgcatcgggcaccttcatgtcaatatacggataactgactccggaaggcagttgcgaccatgtctgccggataatagtagaagcctcaaaacgtaccgcatccacatcagcgtgtttatccagatctaccgtaatggaaccgtagccattgcttgaagtagagtacattccctttacccctttgatgcgggccagcatggactccagtttgcttgtcgcctccatctctaccacccgcgacgaagtgcccggcatgctaaagcgcaccgtaaagcccggcaatgtgcgcgacggattcagcttgaccggaagcatcggaaccaaggccaaacccaccagtgccagacagacaaaggtgacgatgagggtaaaaggggaaaggcgattcatagtgattgactattagtgattagtgactataatcgaatttgtcagaaagagagaagccgctggcaaaatcgtgcagggtcagcttgcggattttataatagttcagccaatagtttttcagggctgagatatagttgcgctgggcttcttgctgacggttcaatgacaaggtaaggctactgatatccgccttaccgatgatgaagcgttggcgggtttcattgtatgccaggatggaaaggtcgagggcttcttcggcacttgtcaccaagtcttgctggacattgaaatcacttacggtcataatgacttcttcttcaatgctgatttcgttctgacgggaagaggtctttactacattcagattgttacgggccatattatattttcccttacgcactccccagtccactaaaggaatggagacgctgacagataccatttcctgctgcatagggcggttgtaggcttcgccaaatttctccgccacctggttgaaaccgacactggcgttgatactggcgttgaagcgggattctttcttggttttgtctacattccgttctgcttccaatatgtcctggcgtaatccaaggaagttcgggttgttggaacgggcggcatccaaggcagcatctacagggatgtttagttctctgggacgactggggagaagaagccgtatctctgtattcttttccagattgaggaaagaagccagcgagaacatggcacgtttcaatgaactttcagcattctgcaaagtgttacgggcattcaccacgtccagcttcagcgtcagaagatcggcacgactgatagaggctatcttcagacgttgcataccaatacgataaagcgtatcggaagaaacgacattctcctttgccaagtcatactcagcctgcgccatggcaagtgcaaagaaataggtagtggcctgctcggatacctgctcagcattgtagatatattctttctttactttctcgtatttcagcggttcaatctttcgttcccagcggaaaggattataacctaccagactttgcgaataacctaaacgaacgggaacactggtatactgcgtgtagggattggaaccgaaactacgcatatagcccaactcagtatccagataaaaagtaccacccgtcaggtcaaagttttgcctgactgccaggttgccataggcatagaaagactgttggctacggtaaatatccaaatcctgttcggagtcataacgcttcgtaatgtcacggttatactgtgcaggagtcatattcagcgtcaggctcggcaagcgatttgccttataggtacgatattcccaatagcctgaaagatacatatttttagtacggaaagcttccagcgaactgtcgttcgccatcttaatcgtctgctgcaagtccagcgttacctgctgttgctgcgcgacggacggaagcacctgagaaagtcctaaaagaataattaaaccaagtttcttcattatatcaagcttttttatcccggtaaataaaccaatatatcaacggaatgatgaacagactgaccaatgtgccgatgaacatcgccccaatcatggcaatggaaagcggcttctgcaattccgatcccatatcgaaagagaacaataacggtaccatggcaaaaatggtagtgagcgaagtcatgatgatgggacgcagcctgcgccgtcccgcctcatggatagcttccagaagcggcatccccgtcttacgtaattcattaatcgcatccagtttcaggatggagtcattgataataataccacacgtaacgatcagaccgatggcagacatcagattcagcgtatgtccgcatatccacaacagtaccaaggcaaatgctacgtctatcggtatctccaacaacactacaagcggttgcacaaaactctcgaactgtgccgccagaatgaagtacatcaacagaatggaaataaacagaataaccaccagttcatccagcatcttccggttagagaagaaacttcctgaaaaagcggtatcccaatcaccggtagcatccaccacttccttcacttgctccataagcggttccgcctcttttacttcataaaaacggaacggaacatattctccgttacgtcctgcggtaatcgctttcagatcttccgccggcgccactgataccagctcacgcaaaggcagatattcaacaccatattgatccgcccgtgtcggaacgagtgtttcctgtaagatgttgttgaccgtttgttcctctcccacaatgctgataggcagatattgctggtaagaatgaagagtagctatgctgttttctttgaaagctgttttcagtatgcgatacaactcgtcatacgaaacattataaagtagcaatttttctttattgatacggatattcagctgattttcaaaggcaatacccgtgggagcatatcctgtacgggtagcaaactcagcttccagattacgtaattcatccgctgtcggcactttttccttgttgcgggaataaagttcagccacaacatcggcttctcccgtcacaaacagtttctcaaataccgtctcgggtggcgaaaaagaaatcacggccaacggatactccgttttgagggtacggtaaaccttttcctgcaaagggactatctcagagggattctttgtcttgaaataaagttctgcttccgaagaagaaagagcctgctcccggttcaggagatagtcttgttgtccgacggcggcagtctgttcgatagtctctgtcttaaacaactcaaataaattgtctaccctgcgacgattctcgtccacatggatattctcattccattccacacgggctatcagctcattctgatctatttccggcatacgctcttttcctatgaaatagaacatgaatacacacaatggcacggaaactatgcagaaaaatacgcttgccgttttatgagcaaatataaaatcaatcccggcatcatagaaacgatcaagtgtatgatcctttataggattattgattcggatacgcgagaaccatgatttgcgcagtcccgtccggtaaaccagcatatagagcaccggcagcaacatgatgcccgtgaagtaagaaaccatcaatccaacggttaccgagaaagcctgatcgtagaaaatggctccggcaataccactcataaagatcagtggtacaaacaccgcaatggtagtcaacgaggaactgagcatcggggtaaccacctcactggtacccgtaatacaggcacgtttcagcgagtatcctctttcccgatattgagaaatattttcagttacgatgatggaactgtcaatcatcatacccagtgcaagaatcaatccggacagggatatgatgttcagtgacatcttgaacaaatagaaaaagagaaaacagatcacaatggaaacgaccatactcagtccgatgatgaaaggagatttgacatcccccagaaagagtacggctacgatacagataaatagaaagcccaacgaaaggttttgttgcaagttggagatagtataatccaaaagctctgtctggtttcggctaacgctgaattcaatgtcaggatatacactctgaaaataattcatggtgccgccaatggcctgcttcatgtcatccatattctcgtccgcctgcttgataatggccaatgtcactgcccgtttaccattgctcatggatacgcctttttccctgacgggaacaatacctatccggcagaactcttccagacggatgatgcgtccgtttttgttaataagaatattcttcacatcctcttccgtacgcaacagagtggaaaacttgatattgtattcataatatccatcacgtacggtcatacttcccggttccacattattttgggcaagagcagattctacatcctgtatggaaagtcccagtacggcaagcttattttcatcgggaacaatctgcaactggcgctccaccaatcctgtgatatccaccatggctacctctgtcagctgctcgatacgccgtttgataacgctttcggcaaattcacacagatcgaggaaagcacgttcgtccgtttgtccgtaagcgctgtcattcttcagggtgaggctgagatagaataccggaatatcggtagcacttgcttttactactttaggacggtctgtatccttaggcaggtagttcatggcggcgtcaatcttctcattcacttcgataaaagcaagatccgtattggtgccgaagtcgaaattcagccggataagacctgccccatcatgcgcctcgctatccatatctttcagacgagccacctggataagttgttggcgcaatggtttcaccaccgtattctccaactcacgcgcagaagtattctgtgccgagatttgtactgtaatctccgggatggcaatatccggcagcagagataccggcaacgtgaaatacgttaccataccgacaataaaacatgcggtaaacgccatcaatacggcaatgggccgctgtatcaagaacttaaccaccccttttattttttattttcaataactttcaccggtgcctcatgagccaggttcacattgcctgtcacaatcaccacatctccttcttgcacttcatcttccacaatcgtgtattcatcggaattttccagtacggtctgcacgtagttccatttcgctttattatctttcagtgtaaaaatcacctgcttaccggaacgcaacaccactgaactcttcggaacaaccaactgttcacctagcgaacgatgtacattaacccgtatgttcatgccattaaagagcttgccctgtccgttgacaacggccttcactttcaccatgcctttatcgtccaccagcggattgatttcggagatacgtccttcgtatttggcagaaggatctgcataaggggtaacaaccactttatcgccacctttaataagggggagttcactctccaatacagtaaagtcagcttccatgccctgtgaaccgataattgtacagaaagcatctgaactgttgggagcattatagggtttggaaaagagattagccaccaccccgtcaaaaggagcaatcagagtggcatgttcttcttcatatttagccagttcatattgagaaagggtctgatcatagccgcttttcacccgtgccagttgcatgatatcatcgggtacattggcagtatcatccgctgcatacccctgccctatcaatacatcctgcaattccaacttagctttctctaaagcatctttggactgtgcggtcttattttttaaacggaatttatccagctctgccagtttttgtcctttgtgtacccggtcaccgttcttcacataaatctgcgccacgatacccgaactttcaaaacgcaaatctgccattcctccggccactatcttgccattacttaccaactcgtgattgaatatctgccgcttcaaaggcaacacggtcacttcattcttctcatccggcaatacggtagctactccttcatcggcggcttcttcttttttcgcaccggaacatgctgccaacgcaaatagtgccagacagatcaaaaaccggtagttctgtgtctttatcattctatattagtttttccgtttacacttagtgtatgcaaaaatagtcgttttccctttacgagccgccatatatatatggacaaaacgagactggatacaaactgttatttttctaattatcaaacaagtatattcttgtccactcccaaacaggtggacaagaacatacctccttccttatttagggactgtaataatcactaccggattagaatcatccgtcaattctttcagtgccgaaagtttttcattttctgccgcttcaggattttcttccaaccaggtcatcacttctccggcatcaataatcattccatattctccctgtgcactgcatgctttgggatggaaagccataaagccggtcaggtcatcttttataccttccttttcggcatacatccgggtagtatttgccttccggtcgtagattccgttaaacgtttccggttcatctgtataaagtccccggatacactgaaagaaaacagtatgatccgtctcaaaaatacatcccaccaacaagcgtttttcgttatctttggattcagtacgtgcctcggcgccccaatgccatttaccggtggagaatgcgatataaggtgtcagctcatttccactcactgtataaatggtatcattgaaattctctttgtaacgtatcttattatcactcttccacaggaaaggaatacccgctacacttgccgaggcatctccacttttaaatgtagtcagaataatacctgcatttccctgctttttgacgctgatactgtttatgtcatctactcctctattaggcaaaaccggaagtagactgggcaccgtatctagctgttctcccgtttcattaaataacagcaaagcgcgcccgttatcacctacaatattaccgtaacgacctattatcacggaatctgtaaagctgaaatcactcggtgaatccggaggggtaggtatcgttacaccaccacaataattaccttgcaaatcatatttctgtaacttaccgggtctgcgcataaaataaagcagaccgtttacatcattataagtaggcgccgcagttgaataagcttccggatcatcgcccaaatgtcccactttgcttaaaaacttaccgctctctttatcaaagataaaacaagtttgacgtgaaaagacaacaatctctttatccagtaacagaatattcgggcttccacctaccagacacgaatcggttgtttctaatggaacatagcgtacatcgcttcctaattccgaaagtttcaattcggcaggcttttccatagctcccgccacatcaatactagaacataatccatctgcagaggattgcggagtaccggtacaagccgacaccaggcaaaccagacctactgcatacaaccattcttttttcataacttcttgtgtgtttttagatttaatattcataacatctccgcaaataaactaatatttttagttttagaactatattttatcgttaaagaagtaaaaaggggtatttaaagacatatttctaaatagactttcctttatattatagtctcaaaaattccattataaatcagaagatgacttagcactgacaaccacacaatactacaattaaatttagcacacacatttatcttcatcttacaacatctcacgtatacttcacatttttaaaaacattcttttccattcgatattttttgtttcttttcttcttgtaaaccaaacaaaagctacttttcctacaataaaggatcttggtaaaacaccccaatatctagaatccacagaaaccggtagattatctccagcaacgaaataataatcttccataaaacaataagcattgattaaactatcacccaaataaaccttattcagcttcaaatgcatttttttcttttgttcccattcaattaatgctttatacactatccacgaagcagaatcaattaccacagtcatatttttggcaggaacccataaaggaccgaactctcttacactccaaaacttattttctgcctgaaaaacagatatttgattattattatacatcaccgtatcaatgcccttagacaccaatttttgctgtttcatattccctaaaagacccttataaccatgtacacgaaagaagccaccctttatttcaaacgtatcatttggtaaagcgatacaacgtttcacaagatattggtctgaacaaaacacaatactatcaaacggctcctttagaaaaggcatattaaatactataacatcattgtgcacaatgtctccagtagtaaagttggtcaccaatactctatctccaggaaacaatgtcggctccattgaggtcgtaggaatcctaaaaaaagagtaattgttaaaaaacagttcacctaatacaattacaaatataattatatataacaaacgaatccaaacactatatcgccattttacatttggtttcattaaaatatttttttaatatccaatgcatatattgttgcgtcaaaattggtgcttcttttagtggtatatacatactatttattctactagtatattctgttaatacaaagaaataaggtaatcccaaatctgcaaattccaaattaacttcttgagttaaattataaatgggaaattttattcgattagctttcttaaatcttttcaaatacaaaatattatcatacgtagtaaaaagtaagatgttatctactccaatcgaatcgacatataaattcagtatgtcaatttgctcttcaatacatgtattgcaatttaactccgaataccgcaaaaccaatttatttcctcgtatcaaatcagtcaaaaagcacttctctccagttatacttattaccttgcaactgtcagaataatattttccattatattcaatttcataattcctattctgattaaaagtttctaacccgattaatttatatgaattttctttcaactcatttaataagtcatttataaaattgtcccgtttatgaatctcgtaatagaaatagattccacaaccaattatgattagagcatacaagaatatgcttaactgttttttcctcataaattcactcttatttatttttcaaggtaaaaatcccaatgataggattatcttcttcacttgtttgctcatatattttctgtaagtctttcttatcctcactgcgaataaaagtacgattagaataacgttctttccacgacgaaagaaaagcaccaccagagtctgctacaataagcttaccatcatcagagaaagagtattcccacatgtacaaatcgccccatttacctaatttaagcacattagcaaccgtatgctcatcggttcgtttgtcatacagtatactacgcattatgtagtcaccatattgcgctataaaatatccatctaaattcaatatagagctaagccctttaatataacgtttctccatagcagtcatcatgattgttgtcccatctttctgacgtaaatcctcgggtagctctcgctttgaaaaatgaaccgcatattttgctgaagtaccatctttagttgattgataaatagtatcattattggaacagataatcaacaagctatctttgtattgactgatattagaaaaaagcccccaatgagagtgctgtttcgccaagttttctgaaaaagggagatagcaatccatctcattagtcgccataccaagcttcaataaattataacacccgtatgaataagaagaattattattagctactaagtacaagttgtctccttgcaaatagaaatcatcataagaaagattctcatcaatatccataagcctaccaacagaactttttaagtcataaacataaagtttccatggtgaagcatcatcctttatatagagatagttaccaacaacttggaattttcctaaacgaacatattctccagggccttgacctttaactcctattttctttaaaaaagatccactgtcattaaagatatacacagattgagataattcatctgcaatataaattttaccatcaacatagcttatttgtttcatctctgaaatcagacaactatccgtcgtttccaatttaatgaatttcgcctcatcgttaagaaaaagtgaaaagtctaattcatcaatgacatcatctacatcaacataaacatctgttacttcactattagccctttcttttactaaatttgaagtgcaactatatattaaaaccaagaagcacataaaaaaaatagattttaccataacttttaaatttaaattaatcccacttgcgcttccattcgctatcaggcagataacctcctatattcagttccaccgcggccttcatcaccgctttcacactatccagacggtcatcttcataaccgtcatgcccaggcatatttcttataagaaagcgggcggcttctaacttcaaactatcattttggtagtagttcagcactttttccagttctatcctgttttttccggcctgttcgagtgcaaaatccaaacgtttatctcccgcactttcgcatgatacaaaaaatacaattgacagagaccatattattgtcatctgtactctattcatagtattataattaaattattatagtagttcttctcttaataatctttt

SEQ ID NO: 6309 - DNA, 24938 bp, Unknown
  gut microbiota DNA sequence
aatctaataatcagtaaaatagaatctgtgtcaatctgtgtaatctgtggtgagtcttattcataaccctacataaatgaatgaattccgccaacgagttacaataatataggtttacgatgtcatatcccgctggaaatcgttacctttgcagccctgaacgataaattcattgacactatgatatcagtagaaggactgaaagtagaatttaatgcaacccctctgttcgaagacgtctcttacgtaatcaacaaaaaagaccgcatcgccctggtgggcaagaatggtgcgggtaagtctaccatgctcaagatattggccggactacagcagcccacttccggcgtcgttgccattccccgcgaatgtactatcggttacctgccacaggtgatgattctcagtgataagcgtaccgtgatgcaagaggcggaactggctttcgaacacatcttcgaaatgcaagcagacatcgaacgcatgaaccagcaacttgccgaacgcaccgattatgacagcgaagaataccataaactcatcgaccgtttcactcatgagaacgaacgtttcctgatgatgggcggcaccaacttccgtgctgaaatagaacgaaccttgcaaggattaggtttcagccgcgaagacttcgaccgctccaccagtgagttctccggtggttggcgtatgcgtatcgaacttgccaaactcctgcttcgccgtcccgatgtgctattgcttgacgaacctaccaaccacctggatattgagagtatccaatggcttgaaaacttcctttccacacgtgccaatgccgtggtattggtgagtcacgaccgtgcatttctcaataacgtcaccacgcgcaccattgaaatcacttgcggacagatttacgactacaaagtgaagtatgacgaattcgtcgtactgcggaaggagcgtcgcgaacagcaactccgtgcctatgagaatcagcaaaaacagatagaagatacggaagcctttatcgagcgtttccgctataaagccacgaaagctgtgcaggtgcagagccgcatcaaacaactggaaaagatagaacgcatcgaggtagacgaggaagacaactctgcattgcgtctgaagtttgcttgcagcagccgtagcggaagttaccctgtcatctgtgaggatgtccggaaggcctatggcgaccatgtcatcttccacgatgttaacctgaccataaaccgtggtgagaaagtggcgttcgtaggtaagaatggtgaaggtaaatccaccctggtaaagtgtatcatgggagaaataaccgactataccggtaagctcaccctcggtcataatgtacagatcggttacttcgctcagaaccaggcacaactcctggatgaaagtttaacggtatttgataccatcgaccgcgtagccgtaggcgatatccgcctgaagatacgcgatatccttggtgccttcatgttcggcggtgaagcttctgataaaaaggtgaaagtgctgtctggtggagaacgtacccgcctcgcaatgatcaaactcctgctggaacctgtgaatttcctgatattggacgaaccgactaaccacctcgatatgcgttcgaaggatgtactgaaagatgccattcgcgaatttgacggtacagtcattttagtaagccacgaccgtgattttctggacggacttgcgactaaagtatatgagttcggtggtggaattgtaaaagaacacctcggtggcatctacgacttcctgcaaaagaagcagatagaaagcctgaacgaattacagaaagcccccgcactttctacctcaccttccggtggaaaagagaatgcggataccgccactcaatcttccggtgccaagctttcctatgaagagcagaaggaactgaacaagaagctcaaaaaactggaacgtcgcgttgctgactgtgaatcggagatagagcagaccgagtctgccatcgccattctcgaagcccgaatggcaactcctgagggagcttcggatatggccctttacgagcagcatcagaaactgaaacaacaactcgactctgtgatggaagagtgggatgccgtctctaccgaactggaagcagttcggaaagaacaataaaacttataacattattttatattttatgaaagtaactcattatttacctttagccgcagcttgccttatgatggtgggatgtggtacgggcaagcagaaagctgaaatgacagccggtatccagcttgccaatcttgacacaactgcccttccggggagtagtttctatcagtacgcctgtggcggttggattgaaagccatccactttcacctgagtattcacagtacggttcttttacagaacttgccgagaataaccgtaagcagatacaaggtttgattgaagaactggctgccactcagcatgaagcaggtagtgtagcgcaaaaggtaggcgacctctacaagattgttatggacagcgtgaagctgaacaaggaaggtgttgctcctatcaaagccgacttggaacaaattgcttccctgaaagataaagaagctgtttatgctttgctcgccgatctgcgtaaacagggcatcggtgcttacctcggcctctatgtggctgccgacgaaatgaacagtaacgagaacgccgtgcagctttatcaaagcggcttgagcatgggcgaacgcgattactatctggctactgatccttctactaccgctatccgtgatgccttccgtactcatgtacagaaaatgtatcagttggcaggtttcgatgaggctactgccaagaaaggtatggaagtggttatggacgtggaaacccgtcttgccaaagctttccgttctcgtaccgaactgcgtgacccgcatgctaactacaataagatgagcatggaagaggtgaagaagaattatcctactttcaactgggacgcttacctttcaggtcttggactgacagatgtgaaggaaatcattgtcggccagcctgcttcggtagctgaagctgctaacatccttaacaccttacctgttgatcagcaagtcctttacctgcaatggaagctgattgactctgccgccagcgcattgaatgacgagatggctcagcagaactttgacttctacgaacgcaccatgtctggaacgcaggaaatgcaaccccgctggaagactgccgtttctgtagtgagctccgcactgggtgaagccgtggggcaaatgtatgtagagaaatacttccctgccgctgccaaggaacgtatgatatctttggtgaagaaccttcagaccagcctgggcgaacgcatcaacaaccttgcctggatgagcgacgaaaccaagctgaaagcacaggaaaaactggctactttccacgtgaagatcggttatcctgataagtggaaagactactctacgttggagatcaaggacgactcttactggaacaatatcaagcgtgccaacctgtggaactatgccgaaatggttgccaaagccggcaaaccggtagacaaggacgagtggttgatgactccgcagaccgtaaacgcttattacaacccgacaacgaacgaaatctgtttccctgccggtatcctgcaatatccgttcttcgatatgaatgctgacgatgccttcaattacggtgcaatcggtgttgtaatcggtcatgagatgacacacggcttcgacgaccaaggtcgccagtacgacaaagacggtaatctgaaagactggtggacggaagaagatgctaagaacttcgagaaacgtgccgatgtaatggttgctttctttgacagcatcgaagttgcaccgggggtacatgccaacggtcgtatgacactgggtgagaacattgccgaccacggaggtttgcaagtatcttatcaggcattcaagaaggctaccgcttccgctccgctggaagtaaaagacggtttcactcccgaacaacgcttcttcctggcttatgccaatgtttgggctaacaatacccgtcccgaagccatcctgcaattgacgaagatcgatgtacactctttgggcaaatggcgtgtagacgctgcgttgccgcacattgctgcatggtatgatgcatttggcattaccgaaaaagatccgatgtatgtaccggtagaagaacgcatctctatctggtaatagtttcatgcgggggaaataaattatttcattacctgaaactaacaagctcatcagagcggaagattatgaactaaggcagtaaatcctaaacaggattgctgccttttttaattatacctaatttattgtgtttgagtatgtgtgcaaataaacatttttagtacctttgcgcatcaaatacttatatacgcaattccatgtctgaaacaaaaagaattaaaaccgctttagtatcggtttatcataaggaaggtttggacgaaatcatcaccaaactgcatgaagaaggagttgagtttctgtcaacaggcggaactcgtcagtttatagaatcactggggtatccctgtaaagcagtggaagacttgaccacgtatccctctatcctgggtggacgtgtgaagaccctgcatccgaaagtgttcggtggtattctctgccgtcgcggactggaacaggatatgcaacagatagaaaaatatgaaattcccgaaatagacctcgttatcgttgatttgtacccgtttgaagctaccgtagcttccggtgccgacgagccgactattatcgagaaaatagatataggcggtatctcactgatccgtgcagctgccaagaattacaatgatgtggttatcatcgcttctcaggcacaataccagccgttccgcgatatgctgatggaacatggagctaccacttcgctggaagaacgccgttggtttgccaaagaggcgttttccgtttcttcccattacgattcagccatcttcaactacttcgatggcgaagaaggttccgcattccgttgctctgccaataatcagaagactttgcgctacggtgagaacccgcatcagaagggtcacttctacggaaatctggaagctatgttcgaccagattcacggaaaggaaatctcttacaacaacctgctcgatatcaatgcagccgttgacctgatcgatgaatttgaggagactacgtttgccgtattgaagcataacaatgcttgcggtctggcttcacgccctacggtgctcgaagcatggaacgatgcattggccggtgacccggtttccgcttttggtggtgtgctcatcacaaacggagtgatcgataaggatgcggctgaggaaatcaataaaatcttctttgaggtaattatcgctcctgattacgatgtagacgcattggaaatcctgggacagaagaaaaaccgtattattctggttcgcaagcctgccgcactgcctaagaagcagttccgttctctcttgaatggtgtgttggtacaggatcgcgacctgaacatcgagaagccggaagatttgaaaactgcaaccacgaaagcacctaccgcacaggaaatagaagacatgctctttgctaacaagattgtgaagaacagtaagtccaacgctatcgtactggctaaaggaaagcaattgctggcaagcggtgtgggacagacttcacgtgtggatgctttgaagcaggctatcgaaaaagccaagaacttcggcttcgacctgaaaggtgccgtgatggcatccgacgctttcttccccttccccgactgtgtggagattgccggaaatgaaggtgtgaccgcagttattcaaccgggtggttccatcaaggatcagctttcgttcgactattgcaacgaacatggcatcgcgatggtgaccacaggaattcgtcatttcaaacactaattagatttatgatttataatttatgagttatgaccgctgaacagcaagagttgtaagcgccctcattatcatccataaattataaatcataattcataaatcataaatattcgcatgggattattctcttttacacaagaaatagcgatggaccttggtaccgccaataccattattacaaccaatggtaagattgtggtggatgagccttcggtggtagctctcgaccgtcgcaccgataagatgattgccgtgggtgataaggcaaagatgatgcacgaaaagacccatgaaaacatacgtaccatccgtccgcttcgcgacggtgtaattgccgatttctatgcttgcgagcagatgatacgcggtttgataaagatggtgaataatcgcaaccgtctgttctctccttcgctccgtatggttatcggtgtcccctcgggtagtactgaagtggagctgcgtgccgtgcgcgactctgccgagcatgccggtggacgtgacgtctacttgattttcgaacctatggctgccgctatcggtatcggtatcgatgtggaagctccggaaggaaacatgattgtagatataggtggtggttctacggaaattgccgttatctccttgggtggtatcgtagccaacaattccatccgcatagcgggtgatgactttactgcggacattcaggagtatatgagccgtcagcacaatgtgaaggtcagtgagcgtatggccgaacgtattaagatcaatgcgggtgccgccctgactgaacttggtgaagacgcccccgaagattatatcgttcacggaccgaaccgtatcacggctctgcctatggaagtgcctgtatgctatcaggaagtagcgcactgtctggagaaatcaatctcgaagattgaaaccgctatcttgaacgcgttggaaaatacacctcctgaactgtatgccgatatcgtgcacaatggtatttatctggcaggtggtggtgcattgctccgcggactcgataagcgtttgactgataagattaacattccgttccatattgctgaggatcccctgcatgctgttgccaaaggtacgggtgtggcgctgaagaatgtggatcgtttctcattcctgatgagatgataaagccatatgcgaaatttactgaactttcttattaaatacaactactggttcctctttctactgttagaggcagccagttttgttttattgtttcgtttcaactactatcagcagagtgtgttcttcacatctgccaacagtgtggcggggaaagtttacgatgtttcgggaactattacttcttatttccatctgaaatctgtcaatgaagacttgctcgaccgtaatatgtggttggagcagcgggtggctttcctggagaaaacgctgaaaaataaaggaatggactctgttcggttgtatagcctggaacggctcgaaccggacgaataccatattttcaaagcgaatgtcatcaagaatagtctgaaccgggtggataactatatcacccttgatgaaggaacctctgcgggtatccgtccggaaatgggagtggtagatgccaacggagtagtgggcattgtctataaaacttctccgcattactctaccgttattccattactgaacagtaaatcgagcatcagttgcaagattgtgggcagtgaatatttcggttatttgaagtgggaatatggagactctcgttatgcttatttgaaagatttacctcgtcatgcagagtttaatctgggtgatacggtggtgacaagtgggtattctacagtatttcctgcgggtatcatggtgggaacggtggatgatatgtctgattctcacgacggtctctcttatctgttgaagataaaactggccacggatttcggaaaggtgagcaacgttcgggtgattgcccgtaccggacaagaggagcagaagatgctggagaaggaagaagggaagtgatggagtgataaggtgatagagggataggagtgataaatggtaggggagtagccccaattgtaaatcgtaaattgtaaattgtaaatcaaattggttctcaattatctgcataaaataggttggtttatcggtttggtactattgcaggtactgatactgaataatgtgcatattgccggatatgccactccttttctatatatttatctcatactgaaatttgagtcggaaacaccacggaatactttgatgctgtgggcgttttttctgggactgacggtggatatcttttcggatacgccgggtatgaatgctgcagctacggtggcactggcttttttgcgtcctacattcctacgcctgtttgtgccgcgggatgcatttgagaatatagttccttcgataaaatcgatgggaattgtacctttcctgaagtatttggttgttagcgtttttattcatcatgcaatattacttaccatagaattcttttcgttcgcccatatcggaacgttgctgctgagaattgtggcaagtgcgttgctgactataacctgtatcatggctatagaaggagtgaagaagaagtaagatggcaaaagattatacactcgaaaagcggaaatttgtgatagctggggtagcaattgtgattgttatcatttatatcatgcgtctttttgtgttgcagatcatgactgatacttacaagaagaatgcagatagtaacgctttccttaataaaatccagtatccttcgcgcggtgctatttatgaccgcaatggaaaattactggtgttcaatcaacctgcgtatgatatcacattcgtgccgcgagaggtgacggaactggatactctcgatttttgccgcacactgaatattacgaaagaacagctgctgaagcgaatgaaagatgtgaagaaccgctggatgaatcccggttattccagatatacgcatcaggtgtttatgacgcagctctcggcggaagagtgcggtgtattccaggaaaaactctttaaattcccgggtttttatattcagagacgtactatccggcaatacacttataattctgccggacatgctttgggagatatcggtgaggtttcaatgagagatattgaggctgacgactattacattcgcggtgattatgtgggtaagcaaggtatagaaaagtcatacgagaaatacctgcgtggcgaaaaaggagtagaggttttgcttcgtgatgcgcacggacgtattcagggccactatatggatgggaaactagatcgcccatccataccgggtaagaacctgaaattagggttggatattgatttgcagatgttaggtgagcgtctgatgaaaaataaaatcggtgcaattgtggctattgagccggaaacgggggagatcctttgtctggtatctgctccgaactttgatccgcacttgatgattggccgccaacgtggtaaaaatcataatatgctgcagagagataagcagaaacctttgctgaatcgtgctattatgggtgtctatcctccggggtctactttcaaaacagcgcaggcgctgacattcttacaggaaggtattatacagccatccacatcgtttccttgttctcacggattcatttatggaggtctgcgtgtgggatgccacgggcatggatcacctcttccgttgatacctgctattgccacttcgtgtaatgcttatttttgttgggggctttatcgcatgtttggtgataagaaatacggttcaccacagaatgcgcttactgtatggaaagatcacatggtttctcaaggatttggttataagttgggaacggatttgccgggtgagaaacgtggatttattcctaatgcaggtgtttatgataaggcctatcgtggatcatggaatggattgacggtaatcagtatttctatcggtcagggtgaagttttaagtacacctttgcaaatggcaaacttagcggccaccattgccaatcgtggttattttgtgactccgcatattgtgaaggatattcaagatgcagaattggatagtacctatcgggagcgtcgttacacttctattgatcgttcttattatgaagaaattgtagaaggtatgcgggcggctgttacgggagttaccggaagtgctacttgccgtatagccggaaccatattgccgggtgtagaagtttgtggaaagacgggtacggcacagaatcgcggacatgaccattctgcatttataggttttgccccgatggacaagccgaagatcgctattgccgtttatgtcgagaatggtggttggggtgcaacctatggagtaccttatggtgctttaatgatggaacagtatttgaatggaaaactttcgcctgccagcgaggaaagagcggaagaaatgagtaatcgtgtgataatgtatggtgacgaggagagatagtatatggaaatcactggattgggtaacgatctgtgtttacttgattctgattgcattcggttggtttagcgtttgcggggcaagctatgattatggtgaccgcgacttctgggatttctccactcgtgcaggtaagcaactggtttggatcatttgctctttcggattgggatttgtgttgttgatgcttgaagacagcgtttatgatatgtttgcctatctgatttatatagcacttgccatattacttgtggtcactatctttatagcccctgatacgaagggatcgaggtcgtggctggtcatggggccggtaagtttgcagccggcggagttcgccaagtttgctacggcgctggctcttgccaagtatatgaattcctattcgttcaccatgaagaactggaagaatatcttgatgatggttttccttattttgttcccgatgatacttattatcttgcagcgggagactggctcagcgttggtatatactgctttctttttggttctgtatcgggaggggatgccgggtgtggtactgttttccggagtgtgcgcggtagtttactttgtggtaggtattcgttttgatcaggtgtttattgccgatacgccgacgccgataggggagtttgcagtactttcgatggtcttgctgtctgcggcaggaatggtgtgggtttataagaagaaatgggaaccggtacgcaatatattgttagttaccattggagtgttgttaatcgcttattttatatcggaatatgtgactccgtttaatttggtttgggtgcaatggggactgtgtatgctggtagttgggtaccttattttcctttcgttaagtgaacgtcatcttagttatttcctgataggtatgtttgctatcggttctatcggtttcttatattccagtgattacttctttaataaagtattggagcctcaccagcagatacgtatcaaggtggtattaggcatggaagaagatctggctggtgccggatacaatgtcaaccagtcgaagatagctatcggttccggtggcctgacaggaaagggattcctaaacggtactcagactaagctgaaatatgtacccgaacaagatacggactttattttctgtacggtaggtgaagaagaaggatttataggttctactgccgtgctactcttattccttatattaatactccgtctgattgctgtggcggagcggcaaccgtctacttttggtcgagtctatgggtactcggtcgttagtatatttctgttccacttatttattaatgtaggcatggtgctgggattgacacctgtgattggtattccgttgccattctttagttatggcggttcttcgctttggggattcaccatcttgctgttcatcttcctgcggattgatgcaggacgtaaaaagagactgtcagcgttttaatttgattcctacatcattgataccgggaagaacttcgtccggtagaaggtgtataattttgaagcggtattccccggcttttccaatacggatgaagcctgctgggagagttgattgatataacccaccccagccatctcctaaccaaatacctgcattgtcagcaagtcgcagctccaatgtatcccgcttgatatttgggacttccgggctgtcgtagtagatgagtaagggcaaattctgatatggataattgttccggtttcttacttctacggatacattgtagagtgtagcggagtctgcaaccgaaacattgaagaatagtgtgtcattccgctgccagccttccgttggcagggattgaaaagaatgatatacagtctgttcatcgcaggctgtgtagaggcttgcgatgaacagcagtattaaactcttcaggagagatgttttattcttgggctggtttttcatttccggctggtttctctccttgtggtctgggtggattgttgggtctgggacctctatcaacacgttgtccatctcctcgctcacgatttttttgcttgttgcgtctgacctgatcgccttgttgtctgggttggttcccctgttgccttggttgctcgccttgtggtctgggagtaccttgtgggcgtggttcaccttgtgggcgtggtctggattgttgatctccaggttgattcggatttccttttttctttttcttgcggttgttattaccgctgtttccattcccgccaccgttattttctccgccatttttacctttacgactacggtcaaagcgggttaagctttcctgttccaacaaatctatcggcttcttgggttccacttggcgtgcttcttctacaagactttctggcttagtaccccgtttgttcataccgatgatttcaaatgcacgcttaccactgattgttaccagattggcaggaatgttcttgtcggtagagtaggttatctgattgcttagaatatctgccttgaaaaaatagaaagtaccgtctttggtttccaactcgatctccctggaaggaagacgtttctgagcttccacatagcagtccacttcatagttgagacagcatttcagtttggcacattgtcctgccagtttttgcggattgagagaaatatcctgataacgggcggcacttgtggatactgacacgaaagaggtcatccaggtggcacagcagagctcgcgtccacaagggccgataccaccaattcgtccggcttcctgacgtgcgccaatttgcttcatttcaatgcggacatggaaagcatctgccaataccttgattagctggcggaagtctacacgctcatcggcaatataatagaaaatagctttgttaccgtctccctgatattccacatcaccgattttcatgttgagattcaggttgagggcaatctgtcgggcgcgtatcatggtgttatgttcgcgtcctttggcttcattgtatttgtccatatctacctgtttggctttacggtagatgcgcttgatatcagcctcagacttgatgttagcttttctcatttgtagcggaacaaggcgtccggttagggtcaccacaccgatgtcatgtcccggtgttgcttctacggccacgatgtcgcccttttcaagaggtatatggttgctattgcggaaatatcctttgcgggtattcttgaactgaacttctaccagatcgctttcttctccgtttccgggaatatcggccagccagtcgtaggtgttcagttgcttgtcttgcctgccgcaacttttgcagcagagacttccgcttccgttatgtagtttaaaatccatttttttatttatgattgagattactactatatatctgatttctactgtttcagtagaactatcattttcaatgaaaaatcaaaaaagaccatccttgcatttacattttgctcaatatgtatctgcgcttcgctcaattcatccatcattcccattacattccgttcgttgataaaaggggcgaagcgggtcgcaaagttttgttcgggtaaagtcatgtaactcatctctttgcaatgcaggttatagatgaaattctcgcgtatcatacgctgggcgtatgtcagaaagttcttctgtcgttcacgtcccatgcctgccagctgctcactccattgtttcatttcacgtatcttccgttgataggaaagacgcatgaggctgacaaagagttcaaagaacagttcattttcttcgtttaggtggatggtttccaatgctttgataaagtcaccattggcaagatgcgccaaggtgaaactatcattaggacgtacgccgtatttctgttgcaaggcgttggcaatatccgtttcttctattttacggatgttgaaacgttgcgtacggctcaggattgttggcagtatcatgtccggagtttcggatatcaataggaatactgtcttttcgggaggctcttccagaagtttcaataacttattggcacaaactacgtgcattttctccggtagccagacgatagtaaccttgtagccaccttcgcttgatttcagactgagcttgcgcactatctcgtcactctcctttgcatagatgatggcttgcccgttttcagcatccatctcatttagccagtggtttagactgaaataagggctgttcagcaccagatggcgccagtcagctatataatcatcgcacacttctttctttcctttttttacgatgggaaagacgaaatgtacatccggatgtaccagcttattccactttacgcaggagggacaagtaccacaggcgtctgtatctgtacggttcgggcaacagatgtaacgggcataagccattgccaacggaagttttcccactcccgatggaccgcagaagagctgagcatgaggaatacgcccctcttgcacttcctgccggagtcgctgtttggctgcttcttgtcctattacctctttgaaaaacacgatattatatataatttaattatcaattactaattaccaattagattactccaactctcaactttccattctcaactttcaacttcccctagtataccagttttgcaacttcttttatactgtccactgcaccgatggagtagaagtgaatactaggtactccatgttccactaattccttacattgcttaacacaccattcgatgcctacttgtttggcttcttcatccgttttgcatttcatcgcttcgtatgccagttcttcgggcaagtccactttgaatgtcttgggtatcatggtgatttgagatatcttcttgaacggtttgatacctggaatgatgggaatggtaactccggctttccgggcacgttctacaaagtcgaagtatttctggttatcatagaaaagctgtgtgacggcatattctgcaccggcttccattttctttttcagccagtagatatcagtgtcaatattgggagcttcttcgtgtttttcgggataacacgctacgccataggaaaatggtgtattggtcactttcatttccgagccatctacgaaaatacctttattgaagttattgatctgttcttgcaattcaatggcatggtggtagccatcgccttcgggagtgaagacggactcatgttttgctttatccccacgtagcaccagtaagtcggtaatacccaggaattgcagatcgagcagtacatattccgtttcttcgcgggtgaaaccactgcaaagaagatgcggaactacagtaatattatatttgttttggatagcggcagctacggcaacagtccctgggcggcggcgcaagcgattgcgctgaaacaaaccgtttcccagatctttatacacatattcgctgcgatgtgtggtgatattgatgtatttcgggtcaaattcccgtaaagtatctatggtgtcgtacagcttttcgatgcctgtgcctttcagcggtggcagtatttcaaaagagaaagctgtcttctcgttgctgtgtatcaggtcgataattctcatttctttttcgttgtctttgttcggtgaacaaaacttatttgtacattgggaacaaaaatacgaaaaagaaatgagatatgcttttattgttgggctattcttttatacaacgtataggaacagctatataataatctttatctttcactttattactgccagtgtcgttaatatcgtttgatgtacttttcatgaaaataacggtttctgtcaatccattcacgtcatctcctatccaatagaaagctgcggcagactcatttatcaaagctgttttatttccactttctgtatacactccgtaaggataaaaacttaatccagtctcattagtggcaggggatacgatatctcccgccttaaatggtatccaatctcctgtttttaaaacagaaatatcattcttgatatactgccttagtgaatcccaatttccgttattaggtattttccatccttctggagctaagttaccagctaatatagcttctccattatagaagtatatttcatctttttcgggtttaaaataacccgctcccttgcctaattctacttgtttagtaagaggagtgccatttctgtatgtagttgcgcacaagtctttctgcatccaatattgtatgcctatttttactataggatattcttttaaagttccattcctgatatctctaatcgtatgtcgtataacatttatatccaaaggcttttcgggttttattaatgtgattattcctgattcattcagatagaatttatcaatttttccagaagtacctgtagtatatgtaaacgaattatcttctgtattccaacttatttttcctccattgatctctctttcatcatctaatagttgtagtacagttccattagtaaggtcgctttgttcatcggctccgataggataaatagtgattgcttgtgaactaatattatctgacctaagatactctttgcaaatttctacaataggtttaccgctactatatactttataaacatttgattgggtaaaagataatgcggcaatatgtattgctgtagttttgccgctattatctgtttccttaccttcaacagatgtccagtcttctatgttgccggttattcctgtcaatatatgactggtagtctgcatggctgctatgtccaggtcacattgtgtattttctgtcattgttaattccggcattgggcatgtgtatagttgtccgttccagtccatgacgaatgattgtatatcggattttatgtcttgaggaataatgataatctcttttcctatgagtttcccgttttttatactccatgttccgtaaggaataatatctgtttcttctttatgatttgtaaattcccctgtggtcaaattatagtcggctttattatagaatccggtagcaatgattcgtggattagcacttagtaaactttcaacagtttcatctcctttgggggtaagtgttatgttgaatttgactaatttatgatagaacttcagttcaacagctttttcactacttgccacttttgactgtgttgcgattagaaaatctgattgtgaacgtttaataggattgctttgatctgactgtatagagattggaataatggaagaattggcagatatctctgttggtaggtaaggggaataactgataaagtcaagagttgcatctcctaccggatagaaaactgttttttgggggataagcgtactacttcctgtacattctaactgcaaattgttgatatacctttcttctgcaatagaagtggaggatagcattgcgtataatcccactttatctcctttctcgaaggttgtatttgtcactcgtgtactcgttttattgatctttgttgaaaatgtgataggggtagttcctggagaagtctctgaatctaacttattgacacaagaagaaataggtagaaaaagagaacataataaaacagaaatcaatctgttacttttaatagttgttttgctcatttgttgctattttatgaaatacaactgttgtatttctagttagtacgtagctctatctgttaattaaagcatcggaatatctgaggtgggtaaggaccataattggtataagaaagtctgtggctttgggatgctaattaattgaattcacgcttgaattccagttctattccatcttaatgtttttcaatgttcattaactctgttggttgacaaaggtaaaataataatctaaatatctgaaagaataaactagtttctgttaaaagtatttttatcttcctttgtatgaagtgaataaatgaatagcttttgtccctacattttcattctttcgcgggagatttcaaaattatcagtacctttgtactctaaattaaagataatctgataacttatgccattaaatttacctgataagctgccggcgatagagttgctgaaagaagagaacatatttgttattgacaactcccgcgccacgcaacaggacatccgtccgttgcgcatcgttatcctgaacttgatgcctttgaagattaccacggagacagatcttgtgcgtttgctctccaatacaccgcttcaagtggaaatctcgttcatgaaaatcaagagtcatacatcaaagaatacgcctgtagaacacatgcagacattctatactgactttgaaaagatgcgtggcgagaagtacgacggtatgattatcaccggtgctcctgtagaacaattggatttcgaagaggtgacttactgggatgaaataatggaaatattcgattgggcgcgtacgcatgttacgtccaccctttatatatgttgggctgcacaggccggactttatcatcattatggagtacccaagtatgcgttggataagaaaatgttcggcatattcgagcatcgtcctttagatccgttacacgccattttccgtggtttcgatgatatgttctatgtaccccatagccgtcatacggaagtacggaaagaagatatcttgaaagtgccggaacttactttactttcggaatcggaagatgcaggcgtacacctggtggtagcacgtggtggacgtgagttctttgttaccggacattcggaatactccccactgacgctggatacggaatatcgcagggatgtggataaaggtctgcctattgaaatacctcgtaattattatgtggataatgatccggataaaggtgtgatggtacgttggcgtgcccatgccaatctgttgttctctaattggttgaactatttcgtttatcaggaaactccgtacaatattaacgatataaagtagctacaagctacgggctacgagtgacaagaccttgcggtgtatagcgtatcactcgtagcttgtagcctgtaacttgtaactaaaacgatatgataaagcaacggaagatagagttactggcccctgccaagaacatggaatgtggcattgaagctattaaccacggtgcggatgcagtgtatatcggtgcacctaagtttggcgcacgtgcagcagccggcaattcgttggcagatatagctgctttggtggctcatgcccatttatataatgctcggatttatgtgactgtcaataccatcttaaaagaagaagaactggcagagacggagaaaatgatttgggatttgtatcgtgcgggagtagatgccctcattgtgcaagatatgggaatcactcgcttaaacctgccgcctattcccttgcacgccagtacgcaaatggataaccgcacaccggagaaagtacgtttccttgcagaagccggttttcggcaagtagtattggcacgtgagctttcccttcaggaaatcagccatattcataaagcttgtccggaagtgccgttggaagtatttgtacatggagcactttgcgttagttatagcgggcaatgttatgtcagccaggcttgtttcggacgtagtgccaaccggggagaatgtgcacaattctgtcgtttgcctttcagtctggtggatgccgacggaaaagtaattgtacgtgataagcatttgctatctctcaaagatttgaatcagagtgatattctggaagagttacttgatgcaggtgccacttcgctcaagatagaaggccgtctgaaagatgtttcttacgtaaagaatgttacggctgcttaccgccaaaagctggatgctatctttacacgccgtaaagaatacgcccgggcctcttccggtacttgtaattatacattccatccccagttagataaaagttttagtcgtggatttacgcattatttcctgcacggacgcagtgaagacatcttctctttcgatactccgaaatccctcggtgaagagatgggcaccatgaaggaacaacgcggaaactacctcacagtagccggattgaaatcattcaacaacggtgacggtgtttgttatatcgatgagcaaggacgcctgcaaggcttccgtatcaaccgtgtagatggaaataaactctatccggcaggtgagatgcctcgtatccgtccgcgtactgtgctttaccgtaactatgaccaggagtttgagaagttgctggcacgtaagtcttccgaacgaaagatttccgtatccttgcttttggcagatactgccttcggctttgctctgactgtcacggatgaggatgataatagcgttacactttctttccctcatcagaaagaacctgcccgtaccccgcaggcagataatctgcgtactcaactcagtaaattgggaaatactccttttgaagccggaatattagcggataatcgttcgcctgaaacaaattccgccatagaaatccgcttttcagataactggtttcttcccgcttccgtagtagccgattggcgccgtcaagccgtagacaagctggttaccgttcgccgtattaattatcggcaggaagtggcagtctggaaacctacaactcatgttttccctttgccgggaacttcttctaaggcaacagcttccgctacttcattaacgtacctcggtaatgtaatgaatacccgtgccgcctctttctataccgatcatggcattgctaccgtagctccggcttatgagaaacaatctgtaccgggtgctgttttaatgttctgcaagcattgtttgcgttatagtatgggttggtgccctacttatcagaagggacgttcaccttatcgggagccttattatttgcaaggaactgatggtaagcgcttccgcttggagtttgattgtaagaattgtcagatgaaagtatatgcggaataagagagaacatattcgttatcaccacagagcggtacagagtaacactgagtttcttaaatatcagaaaagactccgtgcaactctgtgctactctgtggtgatagcgattattatcagtctggtttcctgccgttactcccgtcccaatctggatgatgaaggtatcagtgataaaacccgcgactctctgacctacctttacgaccggcattatacgttgaatacgaatctggaagtggtgcaggattccgtggtgcttgcctgtctgccagtgaaggattgctacaatactctgtatagaggagaccgtgtagtagtggccgaatttgccattcattctgctgatagtgtggacagtgtttgggtaaaactggctcattcccaggagatacaaggctggatcggggagcgggaaatgatgcaagcttttgtacctacggacagtatctcacaattcatttacttgttcagtgatacgcatgcttcttacttcgtgattattttcgccttgtttgtcggtgcctgggtgttccgtttgttccgtcggaagcagttgaagattgtttatttcaatgatattgatagtgtatatccgcttttgctctgcctgttgatggcattcagtgctacggtgtatgagacgatgcaagtttttgtgcccgaaacgtgggaacatttctattttaatcctacgctttcacctttcaaggtgccgtttattctctcggtctttttgctgagcatctggttgtttatcattgtactgctggcagtactcgatgacttgttccgccagttgactcctgccgctgccgtattttatctgttgggattggcatcttgttgtatcttctgttatttcttctttatactgactacacaaatctatatcggctatattttccttgttgttttccttgggcttttcctaaagcgaatgtgtgctacacttgtcatttaccgctatcgttgcgggcgttgcggacagaaattaaaagaaaaagggccttgcccaagctgtggtgctatcaatgaataatagggtgtagcaagttctcttaaccctttcatgcttatgatacttacttttcccctctttcctgcttagatgtaatgtaaaagatggcatcttttgctgcgaaagatgccatcttttgatgttagagatgccaccttttgcgacaaaagatgccatcttttgcataacgggttagggagatgtatggggacggaagtaatgatctctatcagaacctgcaacgtagttcgattcccgcctgtatggggcggcctttctgcatgaatccgttgcccatgctttcaaagtagaaagcagcgtagtctttatccagtgcattgcgaacccagaagtcaatctgtccgttgcctttttgcaggctgaggcgtccgttcaatgtgccgtagaaagcttggctgatatcattctgctcggtccaatagatacgtcctgcaccggtgtagttggcattaagttgaatacggtccaaccaatgtcccgggttgatgcggaaaatgtattgtccgcccaggctcagggtgtgcttcggaacgaaaggaacatagttgccgttgtaacttatttcttctaatttactgttggttgttatgtaatctttgaatgtggcataagtataaccgtagcttgcagtcaaggtaaagttagtggtaactgcacccatcagagatatttctgctcccaggctgcggctctttcctgcatttaccgtctcgcgtccaagtccgctctgggcgaagcgggaaatctgctggtcgcgcgtttcaagccagaacagggcggcatcggcacgcagacggttttggaaaaggtttaggtgagtacctatttcatagttccaggtttgttccggtttatatacggtggcagcccgggcatccgggttttcgccggcatcgggtataaagttcaccatatctttaaggttttcgggaacctgggacatgatttcatctttggtcagcctcatcatatcgttcttcagactcgcttgcaacaggtcggagaacatctggatgttgtatcctcccgaacgatatcctttgctgacggtggcgtatacatttccgaggttcttcgggaagtcatattgcagggcgaactttggcaatagttgcagataatccttgctgatggagccttgataccgtgaggtgacggtcagtgctgtttccggcatcatggaaatgggctttcctgtgggcgctccgttcatcatcatctggcccgtaatacctatggtgtagtccattgctgtaccggagttataatccatcttcattttctcatagtccagtcgaaggccagcagtgaatgatactccatcgataccgaataaatctctgaatgtggattggtggaacagagctccgttcaaaagcggtgtcttgaagtctccgttgataggcaggcgggcgctggttactttcagtgcgggcatgatgttcatatttcttccgggtcccatcggtacctcaaccagtgcggggatgaagtttcccaacatctgatccatcatcgccataccatcttctttgaatgtgaccggtgcagtagtatttagccattggtagaaaccgaaaatgcctgtagcccattgccagcggtggctttccttgctcttcattacgatttcttcactgatggtgttgatgcgctgcttctgttcgagggtataggtgtttttagctgtgaaatcctgatccagaaacatacgatcctttagatgttgatatccggttacggcactgagtgtgaaattctgtgcctggtattctacattaagtccggtattcaacaggttgcggtaatagctactttcatcattgtaagccgttttggctacatctccggtttctttattgtagagtccatacgggtaaccgccctggtcaccatattcataacttacattaaagtcgagcttccaattgtcgctgggcaagtagatggcgcggatacgtccaccggcagactgccctttatctacctttttattgttgagcgctgcattgcggaagaaaccgccttcgtattcataaaatcctccagccgagaatgcaaagcgctcattcatccggtgatagtgagtgacggaagtattgtattgattgtgtgtacctgcccctatccggaagtcagtaccttgataagagaaaggagatttggtatgtactttaataagtccacccatcgcatttcgtccgtacaatgtaccctgcggaccgcgcagcacatcaatacgctcgatgtcggaataattgaaatcgaatgcggatttatctatataaggtatattgtcaacatagaggcctacggagggagtattgatgcgagaaccgataccacgaatgtagacggcagatgtcagtcgcgaaccgtaatcaggaataaatatattcgggaccagtgctgtcaggttctttatggagttcacttgtgcagcttgcatgtcttgttgcgaaagtaaggtgacggcattgggtagctcgcgcaacttacggttttctttaggtgctgcaataatgagaacctcttcaacgtccactattttcagggtatccacttcttctgccgcaatgtttcctataggtaggagtgccagggcgaaaatcaacaatttactcttattcattctttgtcttttaggataaatgataatttaccagcgtagcgctggagcaaggttctccttcggcgtgcaagtaatctttcaga

SEQ ID NO: 6310 - DNA, 13875 bp, Unknown
  gut microbiota DNA sequence
gatgatgctgaagaagctttcaaacaagtacttgctgacgatgaaaagaataccaatgcattgtacagtttgggtacactttcttataataaggcagctttagtactgaagaatgcagcaccattggctaattcagataaagctaagtatgatgcacagaaagaaatcgctgacaaaaacttccagaatgctaaaacgtatctggaacgtgcactccccttactctcggcagacaaacctcgtgaaaaaagtatgatagataatattaagaaactattgccgcaaattgaagcgcaattgaaataatctatcgaaaagaagaataagaaagccgtgttggaatttcccgacacggctttcttatttatagtatgttatttatttcgttttcttcaatactactgctgtacgggcaggaatatataacttcaaccattccttcttctctttttcataaagaggatcagcaatagtgaaatgttttacagtgtcatcagtcaatccgttaccgccataagcaggattatccgtattcaatactacttcatacgtacccggagaaaccaggaagccataatcggtaaatgactgtttgggattgaaattgaacacaaagacataatctttacgcatatatgccaatacctgatcgccgtcattgtgccagatttcttgaacaggtgttgcctggaaagctttcacactcttaatgattttgagcatatcagcatcaaagtcagccatatagtggtaagtaagattcttgttatctaccagatcccactgacggcgggcatacttgcatgaccatccgttaccttcacgcggaaaatcaatccattcgggatgaccgaattcgttgcccatgaagttaagataaccaccattgatagtacttgaagtcagtaaacgtatcatcttgtgaagagcaataccacgattcactgtgtagttttcatcacctttctgcatatgccagtacatatcggcatctatcagacggaagataatcgtcttatcgcccactaatgcctggtcgtgactttctgcataagatatggtcttttcatctttacgacgattggttacttcccagaacatgctggacggtttccagtcttcgtctattttttctttgatggtcttgatccaataatcggggatattcatcgccatacggtagtcgaaaccatagccgccgtcttcaactttagctgcaagaccgggcattcccgatacttcctcagcaatcgttattgctttggaatttacttcgtggataagtttgttggcaagtgtcaggtaacaaatggcattgtcatcctgatggccattgaaatagtctccataattacagaaggcttcacccagtccgtgactataatagagcatagatgttacaccatcgaaccggaagccgtcgaatccgtattcctcaagccagtacttacaattagaaagaagaaaatggataacttcattctttccatagtcgaaacaaagtgagtcccaagccggatgttcacgtcgtgcgccggggtagaagtattgattcggatcaccagcaaaattgcccaagccttccacttcattctttactgcatgagaatgaacgatgtccataatcactgcaatacccaatccgtgtgcggtatcgatcaactccttcagttcttccggagtaccgaaacgggaagaagcggcaaagaaactggatacatggtaaccgaaactaccgtagtagggatgttcctgaattgccatgatttgaatgcaattgtatccggctttagctatgcgcggaagagttttttcacggaactcgttgtaagttcctactttatcttcctgttgcgccataccgatatggcattcgtagataagcaaaggatccgtattaggtttaaatgtacgcttctttactttatatggcttttccggtgcccagacctgtgcactgaaaatcttggtttgctcgtcttgtaccacccgtgttgcccaggcaggaatacgttctccgcaaccgccttcccaatgtacaatgagtttgtataaatcaccgtgtctcatggcatctgccgggagtttgatttcccaaacaccataatccttacgtttcagactgtacttcttcagttctttccattcattgaatgtgcccacaataaatatttctgtggcgttgggtgcccattcacggaaaatccagccgtcagcagtacggtgaagtccgaaatataaatatcccgaggcaaaatcagacaaagtctgtttccctttgttcgtcagttcagcctctttgtctaatacatgctgatgacggcctttgatggcatcttcgaaaggttccagccaggggtcgtttttgatcaaattcaatgtttccataaaggatgagtttttgattgattggattattatgctttcacttttacaatgactttcttcacaccgtcaggagaaatgccgggagcatgtccgtcttgagggaagaatatagcaaacattccaggttttacagtgatataagtttcagccagtccttcgaagaaagtaatatctttctctgcattgtagggagcatcagcgggtacgcaatcttttcctgcggtatagcccattacttccgcaccggagagaggaatctggatatctataaattcattgtgtgtttccagtttggcttgttctttagctttaggggtagtttgagctacgtttacaaccaggtctttacctttcagttcggttttgccaacttccattgcgttcaagtcatgtgattgcaagaattcaatagcttgggcgaacaaggggttcaacgatgcatatttttctaaattttctaatctatctactaccatagctttaatgttttaagttagttatattattatcaaattttattcaaagtcgtcaatcgtgtaattcaggaaatcagcaaaaggtttcatttgcttgaagatttccgctgtacgatccacacaatcgggtgccagaaagaagctgtccggttgattgcagtaacaggtatattccttgcatttcagatattgtacatattcaaaatcctttggaaatcctttgggagctgttttcaggaagtcttcgcctattaccgggaagtattgcttgaaatccggattttcaactataccgcgaaattcgtctatgttatcatacactgcctgtcgcacggctttcagcgtcttaggaggcaggcaatagctaccacctgccaacagacagttgcccggttcaatgtgaacatagtaaccgcagtggtctgatttcttaccgcgggcgttgatgtatccgcccaaatgagttttatacggggtcttgtcctgcgaaaagcgcgtatcacgataaatccggtaagtacagtctttgacttgaacgccacgaatactttcatcgaaaagcgagatacgggtaattatagccgataacaggttctcaaattccccacgggcttcttcatacaagtccttgtgagcattgaaccattcgcggttattgttagcggacacttctttcaagaattgaaaaataacagggatgttcatattggtattttccttattatctgacaaaattacgcataattttcctaacatgctacaaagagggacaaaaaaagcatcggctctggtaaaccgatgctccttacacatttatcaatcaaacagacgcttctgtttttgatgtacttacttatcacaagcgggtacagtctcctttaattaatcttatatctaatactatgaaaaacacaataatataacacgtctccacagaaaaagttcgaaggggtatgtgtgtttttatcatttgtttatatctttgtagaaaaattatacgaacatatggaatataagtatgatgaggaaagtgtgaatgccctgatgaagtgggctgagaacgcacagttacccaaagagttacaactaagtgaggccgaaaagattgtgaatcttagacaatacgtagtggcaaatataaacgatatcaaagcgcattatccggatgagttttacaatccggccattacgcgtctgtacagactgaaggaaaaactggaaggagaaagcaccacggagtaacacagagttccacagagtaataaggattctttcgaataaagattactctgtggaactctgtgttactccgtggtgaaattcttattataacttgattttcaatatctttccactatatccctctacagaaatttccgtagccttataaggcaacaaactaatactttccgtctttccggttaacaaatctactgccggataaatatccatctgcggtatttgcaggaaatcaaaggcatgagaaggcacattgatagctacatctactgaaatgtggtcaaagttcacgataatgaacaataactcttttccagctttgcgcaagaatgtgtattgtttatgttcattgaagcgccagccatttgcgttggcatacatcagatcgaagaattctccttcagtgattgctttttctttgttgcaaagcgtcaggatgcgttggtagatactatagatgtgtttttggtcttccgtcagcatcttgccatcgaacttcccaccattccgccagcgacgaatggtgtccacgctccaataatcaaaaatagtggtacgtccgtctctgccactgaaaccttcgctatccatgcccagttcaccgaattcctgcccgaaataaatcatcatcggattggtattcatacaagctgaaacaatcagtcccggaatggctttacgtggattgccggcaaagaaatcagaagcaatgcgctgttcgtcatggttctccaggaaattcagcatccgtttctcgatgccacccagactttgccaggaacgggtaatggccgtagccgaatcatagccgcaaatcacattgcgaagtgtatcataaagacctaccttgtcatatagataatcaaattttccgcggaatatgtaattctgatattctgccggattataaacctctgcaatgaataacaagtcaggatgcttttctttcacttgcggaatcacccattcccagaactcaaccggaaccatttccgccatatcacaacgaaaaccgtcgatattcttgtctgcccagaaaagaaggatatccagcatctttgtccaggtgtccggagtgggattgaagtgacaggttccaccattctgatagtccactccataattcagtttcacggtttcataccagtcggtgatgttgggataagcatcaaaacgattgttccctgtagccttggcaggacattctttataaggttcagcagccgatcctttcatatcgaactgaccgtgcaattcggattgagggatatagtaaaaattattatatgggctgaaagcgtaattaggatcatcatttgcacccaactgtgaagttccgtcaggttgtgcatccgaatgatattggcgggcaacgtgattcggaacaaaatcgataatgactttcagaccgctacgatgagtacgttgtaccagattttcaaattccttcatacgttcctgtacatcgtttgccaagtccgggtccacgtcataataatccttgatggcataaggagagcctgctttgcccttaacaatagccggatgatcgggacgtatgttgtaacggcgataatccgtttgcgtggcatgttctatgataccggtataccagatatgggtggctcccaacttctttatttcattgagtgccttggctgtaaagtccgccattttaccgcatccgttttctgttatgttcccgttattgatgcagtgattatgattgttaccaaacaagcgcgtaaacacttgatagataatcattttttcatctttccccattctattttttattttatgatttgataattactttcatctttccagatggttccctgatccgctttcaactgatccagaagagtgttagcggcattgtatccctgcataaatatctcttctgctttttccagttcggtattgctgtatccatccaggttatacggttctattaataaatccgctttttcccgttctggaaatgtattggcacggaacatgaagtgataggaacgcatggcaatacttacaatattcatcttatatttgttcgccagtagcgggctaacatttactgccaccactttgctacaaacacgccggatggtagatacaggtaagttcataaacactccaccatctacataatgcgttccttctatttttacaggagagaaaaggacaggcatacaacaggaagccgccacacgttcggcaatattccctttgtggaaatgcaccacacgtccgtgatcgaggtcggttgcagtgatgatgagaggtatttgcaattcttccatcgtctttgctttcagattggttttcaggaaatcaataaattcgcctaactcgaacaatcccactttcggtatgactaatttggtcaggtcctggaacttatgcccggagaagtaatccagtactttatgcggttcgttaccgtctgcataaaacacgcctgccaaagcccctgcgcttactcccgaaaggatattaggtttgatgtcatgttccaacaatgactgcatcacgcccagatgcgcgaaacccttgataaaaccaccgctcaaagcatatcctataggatatttgttcgtaaaccaattatttgatgttgcctccatgtaaaaaatctaccatatatttgttcgccacgaaattagtgattttatcgtaggttgaaagtaaaaagggagaaaaatgtgctaagtatagagaaaaagcaacgcctgcccccaatttatacaatcgaagacaggcgtcagtgggaatcgggaaaatatttaatcaaaagccgaaatcatctacctgaatttcttcctgatgattatcggtgaagggtttagcctcttgctgtacggcatttccttcgatgtatacggcgcggaaaggacgggcagggcagacatattcacaaccgccacaacctacacaaatttccgtatctatatgaggaattgtcaatccgtccttgaaaggaatcatcgacagagcttgcgtaggacaatgttctgaacaagccccacaactggttccgtcgcggtagacgatgcagttctcctcgatgaagacaactttacccatctgtgtcaggtgtttctgctctttcgtcagtggcaggatagctccattcggacaaacatccccgcatacggtacaatcgaaattacagaaacccttttcaaagaaaacggtcggttgcatcattcctcctaaaccatactccataaaagcaggcttcagtacatgagagggacatttgctgacacacaggtggcacgaggtgcaatgtgcctgaaaatgctccagactgatagatcccggcggtgttataggcgtctgacgtttatcacttttcattccggctgccgcagctgctacgttctgggcttgtgccattactttgggagttgcagcggcagttgtcagcccggcaagtaaaaaacggcgtttggaagcgtcagtcacctgtttctctgttttgaggggagtggtataactaagtgcattctggcgacattcacccagacaatcgaaacaatcgacgcaacgactgtagtcaatagtctgttccggactattaatacatgaggctttgcatttagtggcacacagtccgcaatgattgcatttttctgtatcgatgcgtactttaaacagtgagaagcgactcagaaagccaagcagcgtacctaccgggcatattgtgttgcaccaggtacgtccgtatttccatgccagaaagccaatcaccaagaacgtcaacagtccgataataaaggacgagatactcaggagagaagcgtccacctgatagaaagtatagttattgaaacttgaaaatatgctttccagcaaattgttccctaacatatacacaggtttaaacacattgaccgtcatacgtccgaaagcgctgtaaggatcgagcagacctaaaatgaccgtaaatccgaaaagaaaagctatcgccgttacacccaatactccccagcgcagtatattcctggcaggcgagtagcggaaacgtttctttttctttgccgtttttttagaaatccaggtcactatatcctgaaagatacccatcggacaaattgtagagcaatagatacgtcccaataacaaggtaatcagtatcagcactgccaggataataaaactgagtgacatcaatgccggcacaaactgtatatgtgccagtctgtggaaactatttggcaatatttccgcaaaatccagaaaataaaaggttatcagcccgaagataacaacggacaatataatacgtgcttttctcaacataagtgtgtatactttatatcgcttgaattaaagcttgatacgcttcacattcagcttatccaagtccattgttccaatcttcaatgcctgcccgttagcaaggtgagctacgctttcaagcggcatttcgcgaacctggttaaagaatttggtggcagccgtatctacggccacaatatcctgtgaaataaataatcctttggtcaataccacatccgaaacagaacgtccacgcggaccattcgttttcaaaacgcgataggcatccaccacattcagcactgctttcttatccattgtgcagatatcggcaatacattgctgcaagtcgttggaatggaagaaaccgcgatcccagacaatacccatgtggttcttcatggaaatcgtcaagttggcgccgccatggtttttcaggatgggcacattgatccatacatcactgttcagaatagcttcgtgtaccttggcacttttcatacgtacgcctttgggcaatgagactggtttgtagtagctttccagatgagccggcataactttggcacccgcagctttggcagcttcttcaatgccgctattcttgtagcacttctgccagtcatcgcaagtatgatcaaaaaccgtaacttccttggcacctgcggcaagacattgcttcacaatttccgcaaccagcttcggatttgtattaccggccagttcgggtactttatcccaaccgatattcggtttaaccactaccttttgtcccggttttataaactgtttcatgccacccatttctgtaatagcacgcctgaacatcgcttccggttctccacccatcacagctaccagatccaccttaccgccgccagcatttgtcagcttttgcgccagtatgtccattgcttcagaacgttgcacggtcatcaccgcacccgtcaccgccagagtctttaagaaatcccttctatccataggcccttttgaattgttaattgctaattatgaattacttatatgatccacgggaacttaaaacacctctcgtcaaacaaggcataatctgccgtaccattgactgcgaatgtttttatcatacgtgcctcttttagtaattcgcacgccagacgaatggtagagcctgtcttaatacggtcatctaccaataagatgcttttatctttaaaatcaaagtcaaccggagcgagcaactggggtgcatcgtacttcggatgctggtattcatcccgcaaattgatacgtagcagatgcacttctttttgcaatcgctggttgatgatacctgccggaacgataccgccattagcaatagccacgattatatcaaaatcatcgtggaattcaattgtgcggaagcgctccagcacttcttccattgtttttgccatattgttatgggagatagtctattattaaagtttggaaatagctttcagcagagcgtaaccaccgaacaattggatcagcatacccggaataccgatacggaaatcttgtacggccaggaagaagttaccacatatagcccattcaaaagcagtgcctatcacctggtaagcaagaatcacaccaagcaatgcaactaaggatatcttctttgtatatcgtgcggcaaatgcagcggctcctgcaagcaaaccggattttatcagcaacacaggcaatgcagcggcagcgggcataccaaacagtaaatgattaatcaccggagaaagtaaagctgtaagcagtcctacacggaaaccgaatttataggcggcaatcagtgtaaagaaatagataggcagcaaagtcggtccgcccatgggaaccagatggcaaagctgcggcaatgctatatttcctgcaacaaataagaatgcaaacaaataggtcttcacgttactgaacgacaaagagtagagtttagcagatgtttccattattcaatgattagattttaatttgttattattatgtttcttcgagatacaaaagtaggggatgagtgctcattttgtttgaagatttgtctcaatccttacaggttttgtatcgctacatttatattaagactctttcggacggaaaaggtttaaatcttcaccaattcatattgcatattgcccaatccgatcttttccgcatggcgcaatccagccagccagtccgtatccgggtgcatcatgtggaacttgtcatggccgcacaaatcatcgtgctcatgtccggcagaaaggcggttacccgtgtgcagtataggagcctggatcaccatatccgcacacgctttatccagagccaccgggtctgtagaagccagaataccaaggtcgggaacaatggcggcatcattatgattccaacagtcacattccggagatacattcattataaaactgatgtggaagttgggcttatctttcactacggccagtgaatattcggcaatcttatagtttaagcgttcggacgtatcttcatcgcccataatggcgccgtcatactggcacaaggcgacacactgcccgcaacctacgcatttcgcgtaatctatttctgctttgcgtcctgcattcaggtgtacggcgtcgtgtgcacagtgcttcacgcagatattgcagccgatgcaactttccgtatctattttgggttgagaggccgaatgtagttccaattttccggctacgctggcacagcccatgcctaaattctttaaagctccgccaaaaccggcttgttcgtgccctttaaagtgattcatgctgatgataatatccgcatcggctatggcagtaccaatcttaggggcggcacagtactcaccgttcaaaggaatttcccggcaatccgtacctttcaatccatctccgatgatgacctggcattgggcggatataggattataaccgttttccattgcgctttgcaggtgatcgacggcattggcacgacggcctgaatatagtgtgttacagtccgtcaagaaaggttttgcaccattgttgcgcaataggtttgccatgcgagccgcgtagttcggccgaagataagcaaggtttcccggctcaccgaagtgaatcttgatagcgacaaaactgtcttttaagggtagctgttcaatacctgcccgctttaccagacgctccatcttatccagaagattggaagtaggagaggtacgcaggtctgtgtagtagacttttgatgtttccatattacctatttatagttataatatgtgcaaaaataagagatattatccatataaataggtatggaaacaaaaaaagtagcgaagttctttcgctactttaatttggcattatcctaacggatcatcctctataccaccgtcacctccttggttgccgccgctaccgttaccaccggaactgcttccgtccgtataatctgtatcgatgggaagggcgcgggttacactcatttctcccaaagtacgttggaaaatcttccccggagtgaatacaatacgcttacgtactatattgcttgccgtaacaccttctgcggtatccgcgcttttggccttaatggtggggcgaaagatgccgaactctcccaattgaacactttttccgtcatcaatatcctccgccatcatatcaaccagaccgctgactaccaaatctaccacttttcgatggactccgcaaagtcgactgacctttgcacacgttttactaaaactcatttgtcccgaacgtacagattttgctacatacttctcagtctttgtgtcgtcaaagccaaacactctcttggtcactacatactctaaagccataataattaaagtttaataggttaaaaaaaataaggtttactgttgtcatttgtttcagatgactttgcaaaggtactatacggtacaagggagattgtcccctttgagtacctttaaacaggtaattctgataaaaatcttaagacatattcctatttaattaaaattcaatattttagaaatgatgattttattaatctatactgaatttaccagatgtttttgtgaattctctcttctacccgaatatctttctgcttgcatatatgtgcattttcagctgcataaccgatagcaaggaaacaggtgaattcatatccaacgggagcattaacgagatgtttcacgtactccggttcattgccaatgggaatacggaaagcacatgccagtccttctgcagttgcggctaacagaatgttctctacagctgcccaagccgaagcgaaatagttcaaagaactttggtctgctggcttgcataaaggataatccttctgtttgaaaaacggcaggataaggcaattgctttggattagcatacgttgttgtttgggcaatgcatcggtaaacatggcatgttcgtccttgtccatgatgcttgcggtggcttcaagcccagtttgttggatgtttttggtattttctgccacaggtgctatcaatcgggtgatgttttcctgccctcttacaacaataaactcaaactgccgcaaatggtcgttggtcggagctttaaatgcagcagacaatacctttaccaacacttcatccgttacttccttattggaaaagtcgcggatggttctccttttctctaatacttgatagaaatccataacaatacattttaatagttatacttgttgttttcggcagcaaagttatgccgctttcttgttgtatatttgtggtattgtttcgtagaattgtcgtatatttgcattaaactattttgcatacaattatggaagatatgattactccctatgagctgcccgaagtagagaaccactcattcttttttatagaccaacgaattgaggctcatatagaagccaaactgcatcagcatgatgcatgggagctatattatgtgttacatggacatggcacccgaatggcaggtgatacgttacaacctttttcggcaggtgatgtagcattgataccaccatctatgcatcattactgggaatatacaccttcatcgacagacactgacgggtgtattcattacctgatggttgctttcagtcatatctttgtactgaaatgcatagaagtgtttcccgaattgagaaaccgtttggcaggtcttacatttcctgttaatgcgttaaagtttggcttggaaagtgctcgaatcattcgcaaaatattattggagatgaacgatatggacgaattggaacgattgtgcgagatgtttcgcttgctacctgtcatattcacttcatccgatcatacttttgcaggtaaacctatgaatatagatcgggatgtgagacgtatgcagcaaatttgcacctatgtgatggcccattatgtccatgctatctctttagacgatattgccgcagaagtaggcatgaaccgttctgcattttgctcatacttcaaacgatgcaagggaatgacattttcacaatttgtgacccagtatcg

SEQ ID NO: 6311 - DNA, 66616 bp, Unknown
  gut microbiota DNA sequence
cataattaataaaatatttaaatttagttccgagccctgaatgggcgaaaataaagaaataaaaataaaatacctggttacacccatttcgggcttaaattgaaatatgtattattcacttcatttttatcctcagataagcacggtcatcaaaagagcaattgcctttttgcacgcctttcgtactcttgtacaatcgcatacatagaggatctttttccaaaatatctgcaaggtaacactctgactcatgcaatgtagagtataaatgcggataaccatcggaagataaaattatctcatctgcatttcctaccggaaagacattaacctgtttcatttgtataggaaagccatcgaatacaggaaatgcaaaccgttgcccttctatcgggcagttttgcaaaagagcttgtttctgtaagaaaggataaataaaatcccgtcctaaatcatgagcttcaagtccttccattgtggcgccgttcagcaaagcaacttcattgaaagcagcacgtgcattcgccatgatagcatctatttctttctcgttagaagaatacaagtttccaatgatacattgacaatcgcctacctgccatacctcatttcgggtataactataaatcactccattagcagtaaagcgctttcccggttcggttttcaattcatcaagtaagttgtgttctacataaaactggtgtattttttctgtaattctacgaagtgcttctgttgcatcaatatccttgggaaattcacgaatagcctccaaagcaagttccatagccagacggcctgttttcttgccatcatgagtgaaagtagatttagcggtagctccatcaataacggccgcgaaataaggagtgacaatgatgccatcttcattcgtctgcggactttgctttcctttcaagaaactctcttcaatagtaaaattcgatacagaaggagcttgatattcattctctgattttaaataagtccaatcgcgatcacaattcataacttttgctttatatttcaaatagtcaatcaagtatgccggacggtctgtctgcaagatagtagcacccagattatttatcaggtaaccatagcctttatccttatttagcagtgaacaatcatcgtcgtgtccaccggcatgtgtatcccataacgtattataccatatatgagatttaccagccatgatttttttaacctcatagggcaacggatttgtatcataggcaaacttaaactcaatagccaccggtttcaatacccgaagataatcatttaacttctgaatagcgtctttatcatccaaattaacctttggcataaaaactactttatccaagtattttccataatcacgcttcacatcttcagccggagcattacttttcattattaccagattagtagttcctgttttttccagtaattcataaacctgatcgaaatagtcaaaagctttgtccagattaagcatcacttttcccttagccagcaatagagcttcctctaatgtgggaactttataaatagtcttaatatgacagccatttcgtaagcgcaaatcttttatctcagctaaagtatgatcttcaacttttccttttccggtagtagtacggtcaagtgtctggtcatgcatgagaatcaaatgcccgtctttagtccggccaagatctacttcaacaatgtcaactcccatatggatagcgttttcaatggcttccagtgagttctcgcaagcatttcgccagtcaccgcgatgagaagctaccaatacacccgaactattcggatcaaacagtttagcacgtatctgtgccagtcttgtaacctctattccggatatttcaagatatttctttgcgtaacgttcacctaatattttttgtgactttgcatcgaaatggaactcatcaatattagtcagctcttcagacgaaacaagactcgcgtaagaaatgctatcaggaatcgcagcaatccgtttcacaatatgcgaataatccggattccactttcctatttctcctgcaataaagggtaaatcgggaatacctaaatcggtacgcaaatctgtaaccaatttattcaaatgattcagatagttctgataatcatcccggtttgattctccctgatgccatattatggcttccggtttcatatcggggtacgcacgcaatgcttgttttatacggcttaatgtttttttataatagccggccggatccttcttcatgaaacgctctaaagctgtacctccacgtgcattgactacaagatatatagtatcctgcaactgctcggacaaagtcttagcaaaatggtagccgggacctaatttttgcatcgtaatacccttacggatatttgagaaacggttcaatggatttcgggcaacttcaaaacgtccgtcggcatccagcagctttaccaatggtaaagctgccgtatccgcattttctataggtgccctccctgacatattggattgcccgagcagaatgaataaacgcttatgagtatcctgctgcgcataggtcaggaaagagaccaatagaaataataatagtatcggtaattttttcattcttctatctattaatagtatccttcattttgttcttcctcaatcttgcctgccggtttcaaacggtcgatatgattttgaggaataggacgtaacttatggaaaggtctcatggttccggcagctttggcttctccattgaatttcataacccaatcatacagaaccccgcaacgtaccaagtcttcccatcgataaatttcacctaacaactcacggcctctttcatccaagataaaagtgacaaaatcgctcttcaattcatccggtgtaacttttatcaaatcgtaggtactgttcatgtcattcatttcgccaccttcttctttccaatattggggagctttcacttctttatcagcccatgctgcacgcttcctaactacattgatatattttgctgccaactcataatctccttttctaccagcagcttcggctgcaatcagataagtttctcccaaacgcatgcgtacccattcccgtgcacctgcttgcgtatttttatccggacgtgtaggatcaagatgtttaaccagtacgggatgaccctctatatcgtgcatctcataaggcatatatacatatttaaagttagcgagatactttttcagctctaatgttcctggttgcaagccacatttctgtacagaaaaataaatggctatatctcctaactcaattttattcttaccctctttttgtccttttgcgggatcgggagtaaaatagacttcaccattataggataaagtttcccatttaggcaatgtctttttgttattcgcataaaaaaccattttgaaactcttatagaaacgagagtcgtttttacgatcgaaaagagtgagtaaagtcttatcagtcggacgaatcattccataaggacgtccatttgcaatatcacgtatcatacccggttgtaattcatacatggctgcattccaataaagatgaaaccagtttccgtcatcattatacaacggattatttgtaaattgcactgcataaattacttctgagttgccctgattcttcatatcccataagtccgcatagttgctcattaatttgtgcgtacctccattctccggtaatacactctctgcataataaagacaactatccagatcggtaggcttcatgccacgaatatctgtttccgcactggcacgagtcaaatacaccttagcaagaaggtgtgcggctgcatctcttgaagccttgcctccattcgcgggttttgttggaagcaacggttctgcaattctcaaatcactaacaatctgattatagatatctgctacaggtgcccgtttataatcagtcctcacttcaaaattaccctttgtttccaaaggtattttgccaaactgctgcactaaatcaaaataaaaataagcacgcaaaaaatgcaattctcctaaactcagttcttttttagcttcggataattcagtacttttttctacttggtttatagcaatattcgccgtactgattgctttataatgattttcccagaattcatataaaaccttcaaagaaggattcataaaaccggattcataacgattaaaagattcgcgagtctttccgtcacgtgcttcagtaaacaaatcaactcctaattcagtcatcatattatatctggccttattgccggctccccatctcatatatgaataagtggcaactaatgctgcatctattcccttctcagtagcataaaaatcatatgtcagctttgaagaatcatcttcttgcagccaatcgctgcaacccgaaaccaagaaagcaaacaacaacataatactaatatatcttattttcatatctcaactattttaaagatttagaactctgattaattttagaaagaaagatttactccacccatccatgtcgaagcactcggcgctgtatagcctcttgctccttcaggatcaattccagagaatccggtaataacaaatggattgtttgcagaaagatatacacgtattttacgagcacgtatttttttcaataatttctccggtaaagtatatcccaaagttatatttctaactctgatgaaatcggccttttcatattgaagtgacttcacataagctggtgaagcattgtcaacacttgggcgtggataggcatttgtcggattcgtcggagtccagtaatcaataacaatactgttagcacgtccgggtttattcaaatactcaatattattattaagcatagctcccacactggcatacaggaaaatagaaaaatcaaatcctttatagctgatactattcaccatacttgcaatgaacttcggactggtagaacctaatattttacgatcagcctccgtaattttcttatcgccgttatcccatatctttatatctcccggtttaaagttggcaccattcttattaaactcttccatttcagccaaatcttccggtgtattctgccagattcctattttctcataatcataatgcacattaataggatgtccgataaaccacttattaccaatatcatctactttcccattatacagtgattcgatagattctttatttgcatagaacatcacgtcggtagtccactggaaacttttcgtattgatattcaaagaagaaagtgaaatctcaatacctttatttttagtttcacctacattggaaaggacactcccaaatccggacacgacaggtatctgacgttccagcaaaaggtcagaagtgtgttgaaggtataaatcaacagtaccacttagtctgttattaaagaaaccaaagtctacacctacgttccattgttttgtggtttcccaagttaattcactatttgccattatcttaggtgcatatcctaatacttcagaagctccattatcccatacatatgtagacaagccaagaccgcctctcgtcatataaggatcaatagaagaattaccagtctttccccaaccagctcttaactttaaattagaaaggaaattctgcttcttcataaaagcttcttcactgacacgccacgccaatgccactgatgggaaagcaacccatttgtgcccctctgctaaacgggaagagccatcataacgtactgaaccggtaaagagatatcttcctttaaatccataattgacacgtcccataaaagacgccatagtccacttcgtcaaattactacctattttatctataatagaagaagatgccaagtcgttgtacagcaaatcatctgaagtaacatcctgcactccaatcttattcgattctgtcttatcttcctgaatagattgcagcaaggtcacccccaaagtatggtctttaccaaaatcgcggttatagaacagcatgttctcaagagtcatcatcgtgtatttactcataccattataagcataagatgttcctaactggcgggtacttgtgttagaggaatagaattgataatcttgtttagtgcgggcatcaagtcctaaattacttttgaatttcaaaccctttacagggaaggtcacttccacataataactacctaaatatcgactaactttctcaggtgcagatactgctccttcttcaagattcatcaaagggttccacatctgagcatcagaggctaccaactgagtgggagtaccatcctcattgcgtaatgagcctaaaggactgatgcggtacatataagcatcaccttccatcccactaccacgctcctttacagaatgtgagtattgcgtttgaagtccaaatttaaaccactggttgatttcatgattcaagttcaaacgtatagaataacgttcgtaactctgatctttcatgataccttcattcttattataagtagcagatgccaaaaaatttgttttggcatttccaccattgacgcttatctgatggtcggttataataccattgcgtgtaacatgatcaaaccaattatcagaacgtacttttgaagggtcataatttccattttcatcataagccatcatcaatgattcaagtacataggcgtcctgtttgaacatgggatttgccatatccgctgttttatcaggatagtccgtaggatatttgttcgaactatttgtattgcggtaagcctcacgcacatattctgcatattgggctccattcattaattccagtttattctgtatagtttgaacaccaaagtatccggaatagtcaacctgcgttttaccatctttaccttgtttggtcgtaatcaaaacaacgccattagcacctcttgaaccataaatggcagtagcggatgcatctttcaagacttccattgaagcaatatccgaagggcttatttctcgaagtccgcctgtaataggtacaccatcaactacatataacggttcattactggcattgattgaacgttttccacgaattaacactgtaggcgaggtacccggcgcccaattatcctgagaaaccaatacaccggaagcacgtccttgtaaagcttcagaagctgaagttacaggaactgaagctatcttcgctgcatctacagaagccattgcacctgttacatctctctttttttgcacaccataacccactactactacttcatctatcaattcgctatcttctttcaaagtgatatttgccaaagttttatcattagcagcaaaggttaacgacttatagcctacaaatgaaatagtaatcatgctattctcagggacattagccaaagtatattcaccatcaatgttagtgatagtaccttgtgaagttccttcaattatgatactggcaccaatcaccggctcgcctttatcatcaactatggtaccagagattgttttaacttttcggctttgctgtacatccgaagttggcttttctttcaaatagattttcttctcaccaatttcaaaggtcacattcgtacctttcattaattgagtaagtacttgggaaagttcttctttattagcttcaatagttacaattcggtcaggatcaaccgtaggacgactgtatgctacagttagccctgtttgttgagtgatagcatcaaagacttttgctaacttaacttgccgaaattgcaaggttaccttctgggcagaggctgtaaacgcaaccatcaagcctaaaagaagtacaagtaaaatcttgtgtttcataacttaaattttagattaacattagtataaaaattcgctttatactaagtagacacataagatttcggagcgggtgagggaaaaatacttttttgtaaaataaattaagaaaaggtcttctaaagactaagaatcgtcattggcggttcaaaatgtagctcgtcatcttgcttttatttatatttgatacagtctgaagctatttatttggtcgcaaacagataaaaaagaattcgcatgaggtataaggcatggataggaaagcggctaaacagctcaaattgtattgcaaagataatgtgtttttttgataggataaattgttcctcatgatttcttgagaaaacattgagcttcacaacaaataaaaagcaaatagaacttgctacctttgcaaaaataaaaggctgacaatatggaacaattagatgtatttgattgcttgaatgtgcttatagcgagctatttcaccgatgaccggggatgtgcccacgaaaacagggagcatacgcttatttatctatgctccggcgaattggaaatagaggaacggggaaagaaaaccgttctgcatccgggagactgcgctttcatgcggcgtgataaccggatgtggctgcaaaaaaaggttgagaacgataagccctaccgctccgtcgtgctgaaattcacaaagccttttctgagggagttttaccatacactcaaccaacaacagataccggccgactccaagcgtgaaaaagcaagtctgcgtgtattaccgagtaacagacccgacattcggtcgctgttcgaatcggttatcccttacttcgatgcgggcgaaaagccttccgaagatgtactgaagttaaaaatgaccgaggggctgtatgtactgctcaataccgacaggaacctctatgcttcgctgttcgatttcgtggaaccatggaaaatagacattctcgactatctgaatgagaattacatgtatgacctctcgatgggggaaatcgcgagttatacaggacgcagtctggcaaccttcaaacgtgattttgccaaagtgagcgatttgacaccgcagaaatggattatcagacgtcgtctggaggcagcgcacggcctgataaaatcgggcaagaaaagagtgacggaagcctgtttcgatgtaggcttcaagaacctgtcgcatttctccaaaatatataaggaagcctacggtgtagctccgtcatggtaaaatgaacttcaggacaaaattaattgagcctcgtagcaaagttgttacgaggctctcttcgtaactttgcaccagaacattaaacgaagcatcattatgaatgaaatttttgcaagagacttgaacggagaaattgtttccccgtcggatcaaggatacgacgagttaataaactccatttgggatacaatgaaaacagcgtccgaactgaacaacggctaccatacaccggaagaagtccgccggatactgggagaaatcattgggcaggaagtggatgagtccgtaaccttactacctccgttttatgtggactacggcaagcatataaagataggtaaaggctgctttatccaacagtgctgcacgtttttcggacgtggcggcattacactcggcgaacatgttttggtcggtccgaaagtaaacatcattaccatcaaccatgactccgatccggaaaaccgcagtgcgacttacggccgtcccgttgtcattgaggataaagtttggatcggtatcaacgccacgattctccccggtgtcagagtcggatacggcgctatcataggagcaaacagcgtagtaaccaaagatgtgccgcccatgaccgttgttgcgggcaatccggcaagaataatcaaggaactaaaaaaataaatagcatgaaagaagaaaacaataaaatgaatatcagccgtcgcggatttctcaagacggcagtgctggcaggagccgcattggccatgcccaccggactggacaaggtatttgccgctgaaacgaaacaaacggcagcatctgataacaatagcgatgtcgcccacattacaggacatcgtatattgggtaagggcaaggcagctttagaagtgtcggcactcggtttcggcgtgatgggcatgacctacaaccgtagccagcatccggacaagaagcaatgcatccggttgctgcacgaagcagtggatcgcggtgtaacactcttcgataccgccatcatctacgggccgctgaccaacgagaatttagccggagaagccctggccgagttcaaagaccggattaacgtaacgactaaattcggacacgaagtaatcgacggaaaaggcacgggacgtcaggacagtcggcctgagaccatccgtcgctattgcgaagagtcgctccgtcgcctccgactcgattcgcttcccatgttctaccagcaccgtgccgaccccaacaccccggcagaagaggtagcatcgactattgccgacctgatgaaagagggtaaagtacaacactggggcatgtgcgaagtcaacgccgagaccatccacaaggctcatgccgtttgcccgctgacggccatccaaagcgaatatcatctgatgcaccgtctggtggaggaaaatggagtgctcgacgcctgtcgggaactgggaatcggctttgttccatacagcccgctgaatcggggatttttgggcggctgcatcaacgaatacacggttttcgacccaaacaacgacaaccgacagaccctgccacgcttccaagcggaagcaatgcgggcgaatacacgcatcgtgaatatgctgcaagccttcggccgcacgagaggcatgacctcgacacaagtagcactcggctggttgctccaaaaggcaccgtggatcgtaccgattcccggaacaacgaaacttgcacatctggaggagaacctgcgcacactggaatttacactttctcccgaagagtggaaagaactggaaaacgctgttgccgccattcccgttgtcggagacagatacaatgccgagcagcaacggcaggtaggtcgctaaaacaaaacacattgagcctcgcaacaaaaacgttgcaggtctttgcttttatctttgcatcaaagaaacaactaaaaataacagatatgaaaatgaaagttttattttaatatgtaagaagctatgaaaaagtacctatatttattattcgccgtttttgtagcggtgggattgagcgcctgctctaccgatagtaacgaaccggatggtccgcagaccgaagttccaacacctactcccgatcctgatcctacccctgaccccgatccggcaacgggtaaaacccttatcgtgtattacagtttcacgaacaatgtgcatacgattgtcagtgacttgcagacacagatagaagctgatgtggtaagagttgaaccagccgaagagggactcgactatgccgccaacaactatgctatcggaagcgcgttgattcaggcaatccggaaccagccgaatgacgcggcatcttatcctgcaatcaaacctgtggaggtgaatatcgccgattacgaccggattatcataggcgcacccctttggtggagcaatatggccgccccattgcaaacattcctgtttcaatacggcaaccggatgggaggcaaaagtatcggtctgatcgtatcaagcgcaagcagtggaatcagcagtgtagagtctgatgccagacggctcattccggaaggcaacttcctgactccaagtctgtggatacgctcttcacaaacatccaactgccattcgctaattgccggctggctgaatcaaatcaattaaaatacagattatgaaacggttatttatatctttattgctgttcattccggtaatgacttttgccggatgcagatattagcaccataaataaaaaaataattcaaaacggggctgaaacacttgacttcgcctttctgatgtagtatctttgtagaagtttaaaatgaaactctaatataaacctaaaactttcgtaaatgggaaaaataagacctttacaacgaaacattaaacagtgcataaaattgacaatatattcagctaaagtaggagttaatccatataatcaaccgatggtttactcctaagctattcaggtggattatagttaatacgggtgactttcatcccaaacaatgacgggtataaaagataaaaaggcggtcattctcatgaagaattatcgccttttttgtatacatatattctattttagttttaagatcgatttctacgctgttaataaacgtcggcaacattcttaaaaaacattcctcttattctttaaaaacgttgttcacggttattaatgggacatacagaatagtcttgaattattaccaatctccatttacgtttaaatatcatacagttcaatatttaatatagtcaatgcgcaaaacaaggatactttctgtaatgcgcaagtttaatatagcgtaaactacctgcaatacgcactttactgaacggaattttacctgcaatacgcacttttatttcacatattgtttacaactcaaatctacagaatcaatgcattatacgggaatcctctttttttcttgtgactatcacttccttttcagcctctttatattcaaaccgtaacggcgcaatcttttccagatcacccagaactttttcgagaagcgtattctcggatgtaatcgtaaagtatacatcccaagctgactggtcttctatcttgaagtccacatcataccaacgattcagcactttgataacttcggccagcggggcatccttgaaagctatcacattctttttccacaaggaagacagatgaatatcagcatgtcgggtaatggtgcaatgctcactttccttgttatagacaagtttctcaccgggtttcaacgggtatttcttatctgaagcaagtgtcagattaacacgaccttcgtccagacagaccgtgatatccttattctccggataagcctgaacatcgaacgaagttcccagaacatgcacggcaggcccgttaagattgacaatgaaaggtcggtgggaattttttgagactacaaaataagcctcgccctccagatagacttcacggctggacagcgcaaatttctttggatacttcaggcgtgaatccgaatttacataagcacgtgtgccatcctgaaacatcatttgcaggcgctcacctttgggcacatagatttcttcgtaaccggaatcacccagcagatcgacacgggtattcacctggacaaacagccctatcagcagcacaaacggaatgagtacggctgccacacggaaggtaatcctgcggatgcgtttctgtcggatgttgcggcggatacgggcaaacatctcttcggacgggatttcgtgattgacatagagttcttcgaatccttgtttgatctgtacggcatcacggtccatacttttagccagataggccgcaccctcatcggtagcaaaccaagccgctacgatccgggcaacttcaggagtagatgtccctgccagcacttcctgtatctgtttttctgtaggtgtattcatattctctgtactcatactgttaaatagacacttaaataccttaacaaggtgaggtacgtaacaaaaattagcaattttcccaaatggacgcgcagcagtttcagcgcatcggaataatgggttttgattgtattgatagagagtttcaggcggtcggctatctcttggttggagagttcttcacgcaccttcatcagacagatttcccgcttctggggcggtaacatatcaactgctttataaaagatggacatcagttctttcttttccagactgtcgacaagggtatcttcgtaagcaggagtgccctgagctatctcataattcttggtaagggcggtattctcattgcgtatcacattgagtatatgatttttagtcattgttatcaggtagtttctcaggctgatgcctacccgaagctccgaacggaattcccagaaacgggtaaatacgtgttgcacagcgtcttctgccatcgcggaactcatcaaatagcgataggccaatgcgtaaagcagtttgtgatatttattgtaaaccgcagtaaatgcctctacatctccccgctccactttagcaaaaagtgtttcatcgtcaatatcagatgtttgcggggctttacgctgcatttaaactgtgtttttaaggttaaaagatggaatgatgcgggcaaatatactcattttggataaaggtggggtatggatgggagctttttattatattttctaaaaagagaatactatatttagtattttacatcaagagacttgcataattagcacatgtaagtctcttttttatgataaaatacgaaaatccactaaaaaagaacagcctaaaagacattaatcttcctcttttcgtatatttgaggagtcaaaataaaaaacatccaaaaaggctacaaaatacagagctatgataaatacactcacctccttacggtttatatttgctttgatggtgtttggagcacattgctatactatagataaattctttgacacccatttcttcaaagaaggatttgtgggtgtcagtttcttttttgtgttaagcggctttatcatagcttacaattatcagaaaaaattcagtgaaaacaagatagccaaacgggctttttgggtagcacgcatcgcacgtatttatcccctgcattggctgaccttatttatcgccgtcgccttaggaaactatgtcattgcgtcaggagcaatagattggctcaaacacttcttagcttcactcacattgacaaatgcctacattccaaaagccgactactttttctcattcaacagcccttcgtggagtttatgttgcgaacagctattttacctctgcttcccattcctgatacccatagcaaaggattataaaaaattgctctgcgttttcttagtttctgccatattgattgtaatcggcatgcattttacgccggaagctgatataaaaggatattggtacgtcaatccgattacccggttaccagattttttagccggcatgctgctgtttcaattgtacgaccgtttgaaaggtaaaaacatcactgcatatcaaggaagtattattgaaatagcatccatcgccttatttttagctttttatctctatgcggctgaaatacccaaagtgtatcggtattcctgttactactggcttccggttgcatttcttctgatcagcttctctctacaaaaaggtatagtctcacgcctcttatccaaccgtattttagtgattggcggagaaatcagttacagcttctatctgattcatctttttgtgctgctgtcctatgcagaatggcaaaaaggaagtaactttcatatagcatggtatatttcaattccgatcttattctgtatcatcgtcctattaagtttactctcctactactattttgagaaaccgatgaataaacgaattaaaacattactaaataaataattcatggaacaactaagcaacaagaatcctcgcatcgaggtagtagatgccctacgaggctttgccgtaatggctatccttttggttcacagtcttgaacatttcatttttcccgtttatcccacagattcaccaacttggctaaacatattggaccagggagtattaagcggtgttttcaccctatttgccggaaaatcttacgcaatcttcgctctcctgttcggatttacattttacattcagagcaataatcagaagaagcaaggcaaggacttcggttatcgtttcctatggcgtttagttctgctggctgcatttgcaacattaaacgctgctttctttcctgccggagatgtattattgctatttgtaattgtcggacttgtcctgttctttacccggaattggagtgataaagctattctcatcacttccattatcttcttgttacaacctgttgaatggtatcattacatagccaatctgatcaatcccgcacatcagctaccggacctgaaggtaggcgaaatgtatgcggaagtggcagagtacacccaagccggcaacttttgggatttcatctgggggaacgttactttaggtcagaaagccagcttattatgggcagtaaatgcaggacgctttttccaaacagccggattattcctcttaggcttctacatcggcagaaagcagcttttcgttacgacggaaaagaatctccatttctggataaagatactgattatctccgcaatctcttttgctcctctctatgccctgaaagagttgattatgcagaacagtacaatcatacagcaaacagccggaactgcattcgacatgtggcaaaagttagcttttactttcgtactggtagcttcattcgtattgctttaccaacgtgaaaagttcagtaaagccgtcagcagcctgagattctacggaaaaatgagtcttacgaactatatatcccagtccataataggagcattgatttacttccctatcggtttgtatctggctccttattgtggatatacgctcagtctgctaatcggattttgcatgttcctgttgcaagtgaaattctgtaaatggtggttgagcaaacataaacaaggtccattagaacatatctggcataaatggacttggatggggacaaataaataagcaatagttccctataaatagccttctggtgagtgcgaagacgaagttcgtatccgccagaaggctttaatatgaaagatgtctacttatgacaagagttgtaagtttatgggaaaagatcgtttttaaattgccccacacaaaattgacgatatctgagatattaccctgtaaactttctcataagaaacagctatgttttgcttcatcatatgctcaataaggcggctttcttcttcaagcgataattcatgctccaatatgttatgataatactctaattgtacaggagtgagaatagacacgatatcataccccaaccagagggcaccagctacggacaaatcaaaatcatccatatcataaacttcctgatgataattgatttcaatgtaatgttcctggcaagcatcaaaataattttcaatgatataccatagatcctcaccatctttgcttgtttccagattacgttctatccatgcattcaatttcaaaagaaacaaacccggtaaagaaacaacccgtatatcaaattcaccgtccaccctgactatcatgaaatctttcaaggcttcatcaaaaccctgaactgacattttaaattcttcttcaggcggccaataaatgcacttatcttcttttgcaacttcgccaaatgggataatatctatctcatatactttcttataataaaagcgttgcttttgactcaaagacttctcaaaaccatccatctgcgcaataccgtttgagatttcctcaaacttttgccaatcggctatagctatagcaatatccaaatcttgcgtatgtctgacagatctctgttgcaacagcttctgcataatgatgtcacgagctgttgcccctatcacataaaaaggaagcttctctttttcgaaatatcggctaagtttttctaacaactcttttattaagagattatcaaactcatcactggagatattgtaattcattattataaattctttgagcagcttcaatattccggctgttgccgcttcccattaaatctgcataaattagtaatgccggagtgacctgactttgctcaacactactccagaacttcttataaacgaaaacttcaccctcatcatccggtctgaggcctgcttttacccaatcgcccatagtaccgccataaatggtaaataactcaggatacagataaccatcaaccaagttagcggcaggttctcccccccaatatatgtcagatggcaattttaaatcagcccaattcttatgaagctctgcatctttgaaagtcattctccttattagctgtttaggcttcaaaatttcattgtaagcaaccacccagcgttccaatagctcctgcttattctttaagaatttccctttgttcgtcttcaacaaatatcctgattctaaaagctcgttcattataacagttattgaacccaaggaaacattggtagatagttgcatctgccgataagacagatttagccaatccggctctaacaagatacgaaatatgattcttattccggcttcttgaaacaaacgacttctattggcagatgttgcctgaaacttaggaggtacttttcttccttcaatatgcattagcaaatcaccgaccttaatcctacagtttcctacactatctaaacagttaattccctgatgggcaaattcatccatcaaaagaggataaatgttttgtgctacaagcaaaatcggcttatctgtgttttcttgccatgtcctcaacttcatttgtatgctaccgaaattacttctcgtaaccgtctttttaacttcacatagaaattcataacctctgatacacaacatccagtcaaattccggaatcggacttgcttttacataaacattgcttcgacctactatttcaacaagtttattttcaacttcatgaatcagttctttttccatttcagtagcatcttttgttcactaataaaccctgttcacaaacaatgaacatacaaatatagtgaacgcatcgcatacctacaaataaatgagtaaaaagaaagagtatgaatcagaatcggtaaatcaactcccaccccagaatatgcctgtccagattactctcgtgctggtagcaatagaaaacatctgccgaccaagaggacgacagtttagcttccaccccaccgcgggcacggaagcgggaggcacgaaaccattcatctttgcccagaccgtgatattgctctaaagagacatacggtgaccatgtagttaccttataagcagctttcaggcgggtgcgaagacggaattcatccgctccgcgtccgtcgaaagtatgctgaaaacgttcgcgcagggtgaacgtccattgtcgttttttgagagtgaaagagacacctgcatgataacggtgccgggatttccaaccgtcttcaccacggttgcggtagtgatattcgtaaccaccctcagcttttagaaacggaagaagaagaacggaagtacctacgctgaagccccaacggtctatctcatccagtgcgtcacgggtacgcatctcgacatctccgtaaagttccactttggaggatacatcgtgccgggctttcatcttgttccaggtcacgaaatcgctgtcctgtgcctgcaaaggaggcagacagaagacaaacagtcctacacataaaatgacgaatccccataatacagaatatttctttagcatattatcctcaaaggtttacttcaacttattttcttagaagatgcaaagctaaagaaagattctgtaataaatctgtaatactcctgtaatatcaagaaatcacttgattttatcgtattgctgttcggccttgatttccgtatacttgggtgcgtcaatcatttccaccaatgccctcagcaccgggccttctcccatcggatcattcttccactggggacggttataatagaatgacaaagcaggcattatgcccgtacctgcacagatagccgttacatcaccttccggagtaatcttggtgagcatgcctttcaacccttcccatgccacatagatatagtcgggatgcagccacccttgtttcacccctctggcaatgccgaagacgaacatggcggttcccgtgatttcttcataggagtcttccttatccagaagctgatgccacaatccgttcgcaccctgataacgaatcagtccgtccgcctgcatacggaagttccgaatgacatcttcacgcatcggatggtcggcgggcattcgtgccaacaaatcggcagtagccatgaaaacccatccgtttgccctggaccaatgggcaacgccatgcgctttgttatccgtgtgatagcaatgatagtacaatcctttttcggggcaccacaggtagcgggtatagttcagtatctgattggctgcatcatcaaagtatttagcatcacctgtcgcctctcccatcctgaccagaaaagaaagggccataaaggcatcatcggcccaaatggtattgacatgcggccataaccgggcaatagtgccatcggcaagacgaggttcggacaccatcaggtgatgatcagtctggtcgatatacttctggaaagcctgttccggatgacggcggttgagcacaatcagactggcgcccatagggccattatcatccagacgtttattccggtaaatcatgtgccaattcacatggttcacggctctccaaccttcctgctccaatgtttggtcatacaggcgatggaagtagtcctggtttgcatcgtcgaaaatgaaattcatgttcttcagaacatagttctcgtacttcgaagtacctaatttatctcccaactccatcagggctatgttagtgactccatttgtgtaatgccaatccaggtatttgctttgtactttcacattcttatttaaaggtacgtttttgagcgatgtgtagatcttgccacttttcttatctacaaaatcataggttgttgacttcagaatgcggtcggcaatcatcacagcagtttctctggctttctcattggtctgcgcaatcaatgaagtgctgcacagcagggcgaatgagaagataaaataagtatatatctttttcatttgtttatcaggaatatgtagttttcaatattagtatatccgttggaagctatcttcatagcgtcagacggatcatttttatcaagtccgtatgtatcttcaaagtcgtcgggcataccatcattatccgtatccagtggtttggtccccgactttatttcaccggggccttgtgtaggcaggtccatctctgtgagaataattcctcccttcttacccaatgaagttaattcttcaacaagatagccatctacctgatcacgggcgggtaatgaggctccgccatgctgcacgatccattcgtaagcatcccgagcggtcatcaaaccttcgacagtgggatgcacatccgacggtttatccagaaaagtaggagttatcacaacttcagtaccagactcttgtttccgtttcgtgcaatcttcacgggtcagttcgcgaccattcagcactccatccttattttcatcataatagttgccggataaatgggcacggaaatgttcgttatagcgcgtgaagggagcagtggctcccagcgttttcccatcataatttaaagtagcacccactatgaaatagttattccggatatcggcttcggaagtctgttccgtatcacccatgatataagcaccgccattaccccagttgtaaacgacgttgtttacaaactgattcaggcctttcactttcggattacgggttttgttgtcgatatacaggttacggtataaggtcactccattttcagccgtagtctggataagtcctccgcaagaatgtggttgcaggccttgccctataaaggagttctgaatagttatattccggggctgatcgcccggtttcttcggatctccattgatggaaaaacattcatcacgtccccaggtgaccgacatgtgatcaaaaatcatattcgctccgtaagcgacaccggcggcatctttaccgtctttcccattcactcccatccgtatgcgcagatagcggcaaatgagattgtcggccccggaaaaagaaacatgatttccataaatgacaattccgtcaccgggagccgtttgtgcagcaatagtcagattcctggaaaaagcaagcggggattgcaggcgaatgattcccgcaacatcaaaaacaacgattcttccgggtttactcaccgcatcacgcaaagagccttttccagagtcagcaagcgtagtgacgtgatagacctcgccatgtcttccgcctaccgcattgcgtccgtacccttctgctcccggaaaagcaagtacttctccataatcagggaaaggaacagacggaccggaaacctcctctttttcatcacaggccaacaggccccatgccagaagaagtattccaattgtagcatatctcattattctaatctcctattttaatagtgtatagtcaataggcggcccgtatgaacgaatcaaaatccgtccatactaagcacagccctcttacagaatcttacactttctgttttttatcaataagttagtattcggaaaccgttatccagcgcgggtcaccatattcctgggtataaaccgtagacccggtattgataatcgtaaagtcaccatccttagcattcctgaaaaatgaagaatccgacatacccaaatctatcaacgtcagtccagtatcggctgcctgctcaaagtctgtggtgcaataattattctttcccgtcagattgacttgtcccggaaccagagcctttcctgcactatatccaaaaacacaggcattaacagatagtggcaatgcaacagacagtttagagaaattgccaattgccgtatacgacgacttgcttgtagcccaattatagaatgtacaatttgagatagacaccttagcgttagccgaaatcggcacatcggcggtaagcactccaaagacacccggtgagatataaaattcatagaaggtggagttcgttacagaaacatcattccagacattggaacctttattgatggcatgtatgaatccgaactgtttcgttacatatttggtgtcattgattccggtaaccagacaattatcaatccggatatggttgatggtcgtcattccttcgctggcatcgctcatcatcagaacggtagaaggcaagacaatatcggagttacggatttcaaaacggtctatcgtgatatcagttccggcatcgtgcttgccgatattcaacaagcgtgttttgctaccgccacttcctccggacacgattggctctttgacattcacattctcaacaataaaatagttgatttcaggaatattattcacttccggtttaatgatgaagccacctttacgtatatagagcgtaggtcgatctccgggattagccaggaatgcaatgcttttcgttagtttgatgtcaccggtgctactttcgggaagtccgtctgccgacagataataatcaaccccgtttttcaattgaaagatcaaacttgattggctgtcatcagccattccctcttttatcttcgatagtaaatcagcaccatccgtcaccagaacggcaccggaaggcataccggctgttgtgaatttctgccggttgtacttttccgcaccttcgggagctttgctattggtcaatgcaacatagtaggacgtacggggagccaatcctgaaattacatatttgcctgaagctatttccgatccggacaagtcaaaatgcttttcatccgttccattttcctgttgccagatggaaacaccgtccacaggattcaggtcagagactctccattctatcacagccgaattctccgttatctggtgttcatccaatgcataaagtaccttgggtatgatacgtgtcaaagtggtgataagagaagaatattccgtccagtttgaaatgatatccagactctcattattagctcttacccgggcataataacctgtttcataacgcaaacctgtaaaagtgcatttaccgttgtttacggtctgcgttgcagcgggttccgactggaaagtttggtcacgcgaaagctccaccgtataagaggtcgcttctccggatgttctccaggcaagggtaatcgaattaccttccgcaaaacaggaggaggctataaaggaaggtctgaacaggcggggcagctcttccgcctcatccttgcatgaagtaatattcaatagacaaaatgccaatacaggtatcaaatatatcaataactttttcatactctcttttttaatatccataataattcttcaacagtccctgatggcttgacaatgcatcgggaggtataggtaccagatagcggaccggatcggtttccggattcacagttgcggcattcgattcattgatatagccgtaaaaggaaaacaagacagcaggggcaggaacccattgacgcggattcgaggtattcttgacctgcgtgcaatattgattacacatattaataagtgtatatcccgtaggtgcctttgaaggataggattcaaaagcctcatcataagagttcttgcctccttctttataccagtctatggtctgcgatacacatacggcagccggattcacggcatcgaccattttgtaataagcaactgccggataagattcaaaacgttcatcataagtaggttcctcaaatgcagtggtcgtattctcatattgcttggtacgggcaacttctcctaacgtaatccaatcaaaatacaagttatagagggtctttccatacagattccaacgcgccagatcatatcttctatgcttttcacccccaaactcccatgcgcgctctttaacgattgcatcaaagaaatcttcttttgaagtaagtttatcgacataggtgtctaccatttccggctgatcttccgccgcgaaagcacggttgcggactttcttcagagcctctttggcttgaggtgtaggaccgttatgattctcattggcagcttcggcatacataagtagtatgtctgcataccgcatataagtgtaattgattccggtacctttattggaagtactgcccagaggagttgccataaacagacggttccattttccacaataaaccgtaagggcggctatcggtttctgaactatattagtcattcctgaattttcataacgaaacatctcgcacgtaaggtcgcggcgcaagtccttattatcaaacgacagcatataggtaagcgccagtttggaacctcccgaagaatatccatgcggagcattagatgcattctgtccctctgaattcttttgcgaaacgatgtatgtcccccaggaatatcccaactctccggagcctcctacctttgccggtacatcgaagatattatcatcattcaccggaacaatccaactacattcgtccacccaaacctgacggaatgagcgattcagcgaatgtttgccttcattaatcactttacctgcatatttctcggctatctcatagtatttctgccagtcatcattgcgctgcattgaaccgatagcggcagggttcgagtaatccggacgcagagtccatcctcctctatacaatgccatgcgggcaatcaatccctggcaaaactctcttgatgccgcttccactcccctgtccgattcttccgcataccacatgaccggttcaacttcaatcaggtcattgatcatgtctgtcaatatgatgtcacggtcagttgcaccgataaacagttcatccttgtttcctgccggtttccgtctgtaaggaacgtctccccaattcctcaccaactccagatagtacatggcacgcagaactttcgcctcaccataataatgcattaaccgcgaaggcttcgttttatcagcagcctcaaacagaggactttgttcaataccttctatcacgtcattcgtcctgttcactccatcatacatccctgtccagatgctgccgtacgaactgatgtcacctgcactcggttcgaaagcactctctttcagattggacgacgtagtgaccgtagtaaactccacatccgtattaaacagcattttctgggccaggttacctacccatcccttaccactgaccataggcacgtacatgccattgacggcagtcgcaatctccgattcactggtaaatatataatctttatcaaaagtggaaggcgaatttacattcaggtaatcttcacaagatgtaagtatcatcaatatgataactggaatataaaattttctcatggttcaattctatagtattaaaaattcaaattcattccaagcgtataaacacgactgcgaggagtcacattattatctatacccggcgtcaaacctttctgtatattcacttccggatcatatccgctatatcccgtcaaagtgaacaggttactaccggagaagtataggcgcagactcttgactcccaggcggctcaaccagcgttgcggaaatgtatatcccacagtcagcgtactcagacgcaggaatgaaccgtcttctatcaaatcgctcattgtgataccctgtgtaacggacatccaggaataagtggcggcattctgatttaatgcggccaatgcaaccggatcactggaaacattgacaccggcatcatccacatagcggaaacggcgtgccaaattcatattggtagacagattggaatagttgcgacgaacagccgaattcaaataaagtttattgacgttgaatacatcaaaatcgcacatataattaaagaacgcggtaaaatccaagttcttccaactgccggaaaggcccaaaccacctgttacctttggattcgtgtttccaatgaccgtcatatcttcttccgttatcaagtctgagtcggaatcagacagtttcttgaacttcattgctcccggtttaaagctaaagttacctgagctgaatgaagaattatccggaactcccggtttcaaagtccacttcttcgtcgtttcatcaaaattaaaatcgtcaaccgtataaaaaccatcattcacaaaaccatagatgagtcccatacttttacccacttccattttataattgtaggttccataccagttggacaaggaagcttttgttttccactccgtctcaccagaagaaagcttatcgactttgttcttattaaaggccacattgaaactggcagacagattaaagttctttgtctggacgattttaccgttcaatgaaagttcaactcctctattggaagtccggcctacatttgtcatctgtcgcgagtaacctgatgaattaggaatgattgacggcaccaacaaatctttagttgtattccagtatacatcgactgtaccggttaaacggtttttgaagataccgaaatccaaaccgagatttcgtgtaatggtagtctcccatctcaaatccggatcatacaagtaagtttggtcggcaaactgatagtaattatattcttcattattgaaaccgggagcacttgatccgctatacacacgatagatgttatgccacaaatcatcactgatacggttgttaccagccaacccgtaacttgctctcagtttcagttctgaaataaacctgaccgatttcatccatttctctttggaaagtctccaagctatggaaccggcaggaaacacgccccattgcttaccgggtgcaaacttcgtcgaaccgtctgcacgaaatgtaaaagtggcataataacggcttttgtaatcgtacaagccacggccaaagaaagaggctgttctgtccggagcagctttatagctggtgctctggtgtggagtgcccagtgcaaagttttcaagagccgcttctgccgtaatggaaaccgggaaataacgtgcactcataaaagtattgttattctgcgaatggtttatttcctgtccaagcatcaggtttacattatgaattttacggaacaaattgcgataagtcagcgtatttgccagtcggtacgactctttatgtgttttagtacgcttagccgaaggcatattattcattcccgcagcagacgctgtgctggataaagctccataaaactgatcatcattcgagtccgttgtgctgatgccatattcggagcggaattgcattcctttaaacatatcccacaccaaagctgctttgaggctgattgcagtttcttccctttttctatagttctgcttattttcctccaacggggtgtatctctgatttaaggaattaccatcttcatccagattttcatcatcatcatccggatcaagggatgcgccggaagttagtccgtttgtgggacggaaacgaagagccgtgacaatgttggttcccgatgtacctgctccgtcaatggtacgggtgcgatatgtagcattcgtctccagtttcaggttcctgaacagttcatggttcagcttcagaataatattgttacgtgacagaccggaacctatcagctgtccttcatctttattgcggttataacttagattaaatttcgtcttttcactaccgccgctgatagtcagattatagtattgtgaaatcggattgcctcccagcacttcatcctgccagtcggtagagtccgtatatttgtataagtcaatatcgtcataataaccaaaatttttaataaaagtatcagccgatcctttacgtatcatctggtactcgtactccgccatcacaaattcatagttgttcattaccggtaacttccctgccagtgtacgtgtctgtacatagctattgaactgaaccgaggtcttccccattttcgggttcttcgtggttacgatgactacaccattcgcacctctggcaccgtaaacagcagtcatagaagcctctttcaagacatcaatagactcgatgtccgtaggcggaataccactcaaatcgtcaaccggaaagccgtcgaccaggaacaacggtgaattgtcctgagtgattgatcctccaccacgtacacgaatactgatttcagcatccaatgcaccatctgttgtggtgatctgtacacctgccatctttcccgccaaggcatcggccacagaggcagaggcaactttagagatagattccgaggaaacagacgcaatagatcccgtcacatcactacggcgaatattgccatatcccaagactacaacctcatccaataattcgctgttttcttttaatgtaatttttgccagttccttactgccggactttagttcaacggtctggtaaccgatataggaaattaagatagtagcaccatcaggaacatcgttcaacgtgtaatttccatcaagattagtggttacaccattagtagtgcctttcaccattacagtagcaccgattaccgactcacctgcttcatctaccactgttccctttatagctcttgtcttcgacttcagggcatcgttcccgattttttgtttgcctacagatattgtattattatccctattgaaaaacaaattggtttgctccgtaatcttgtccagaacagtctgcaggggactattctttactttgacagatatgcgcggagcagtgttcacaacattttgatcataaaagaatttcaagcctgtctgcttgcccaactgaacaaaaacattctctacagtttcattctgaacgttcaacgttacagttttttccttctgagcttgcgcctgatcaggcatcaatgacaagcatacgaatagtaaaaaagctaaaaacgaatgtatatttctacttttccttttggaattaggaagattattcatttatttgtgcgttttagtaattgataaaattaattagaacaaaggagtaatttgcgatacatgattcacgcgggtcgaaacgaatgaatacctgttcgcattacgagataggggcttctctgtgagacagctcctatttttcttagaggagacgctaagtgggtgctttcatattctatattctcttttaattaaaggttaaacatattaatactcacatatattataacacacatccgtttaccagccggacgtatatccatgcttttctgctacttgaataagaagatatgatttccttcttttctataccggatgccactggtatattccattgattggagtactgcctccaaacttttattttcatgttctccggaaatcaggttgttgaactcctgtccttccgcaaacgtaatgcgacaattatacatgcgttcaagctctttagccacatcgcgcaccggagtgctgctgaaacgtaatccacctttgcgccatacggcaacatcacgttcttcgcaccgtttgctgtattcaccggaaagtgtattgatcgacacttgttccttagcctgcaaacgcatcatcgcttcaggcagatccacctgtactttgccactctccacatctacagaaacaacttcatccgaagaataagctttcacatcaaagcaagttcccagaacccttacatcaaaacgggcggtcctgacaataaaaggttgcttttcgtttcgttgaacctgaaaataagcttcgccttccaattctatctgccgttcatcttctacaaaactgttcgggtagcgaacacgggaacaggaatttaagatcagctgtgttccatccggcaaccggatttgtctggattcaccataagaggtagaggcttccaaataagaaatctgccgtttatccatataacccagtagattgattcccccgaaaatgagcagtacaacagcagaggcacttgccaccgtcaggactatccgccgaaaccaggtgcgtttcttatgttcgatgcgtttcagtaaccgactggcttcttccttatatttttcacgttccatgctggtggtgagctcttccatagcggcttctttccagacatctgttgctagttcatccagcattggggcatgaatatcatctttcagtcgggataataatccacgtgcctcttcctgggtgtacatatcatccagataacggcgcattatagatttgtctgttacatcattcttcattgtgcgggctcttttagtataaaggtcatgaaaacttttcctttacatagagtaatacacagtaaaggaaaacatctagggtataattaacatttattatgtattaaggcaaatcagcagcaatagcaaatccacatattcactgcctgaatacttaatgagataggtacgaatcaacttaagggagatagatatatgctcctgaacggtgttgacggagatgcccaacttatctgcaatctctttatgagagagctgggcttcacgactcatctcaaaaatctcacgctggcggggagtcagttgctgcaaggcatgggaaatgagggatttcaaatcattcagcataacttcacgtttggtatcttccgtgtagtccaatgcctgtgaaagaatactctcctttagtttttcctcattagcagcattgcgcaactggttcagtatccggttgcgcataatggtgtagagataggaagaaaaggaagcatcgggattaatgaaacggcggctttgccaaactacagtgaaagcatcctgaaaaacatcttctgcatactcccgcgatttaaggaaacgcattgcaaagtatatcagacgatttttataagtggcatacaattcacaaaaggcgtcctcatccccctctatcaagcggagaatgagtgaacgttcttctgagaaattatctgcacacatatagcaatctttagctttttcgggaaacaaaagtttaatagatgctgcaaacgtatgtaaaatccgggaaataaaaaagggaaaagataaaataagaaaaaagcatagcttacttattctatcaatttattcccgtgaaattcgtttcaggtgttcttctatcttttgaaaaaatgatgccagatgcgaaccatctacaaaggcatgatttacataaatggataaaggaaataccagacgcccctcgcgggttaccgctttaccggaagtcatcaaagggtaactgcaaccattgccggcttcggccagcgtataggtggtggcagtgaaatacattttggggacagcgcttaaatgcactacatcataatctccctgttttgccaactcctcttcggcaccataaggattgccatcttcggggatattggttatcaactcatacgcttcggcataaaagcgtttgaaatcttcgtggtaaggaatccgaaccgtataaaaggtctttcctggaacagctatcggagaaatgatatccacttcatcatgaaaaataacttgtccgttcttgtcggtacgataacggagttccggaacttcattcgccgaacgcactacggcatacagataatagagaaaaaaggaatggcccgaggctctcgctgcggcactggcttcggtacaatcaatctctgtggtaatggaataccaggaatttacaaagccccggaagaaattgtaattgtcccggcgctcccatgtctcgatgtctacaatatgtctcataaagttattgattaatcaaaaatgcccggtcgcatgatatcagccgggcattcgttcgtttattttcctttcttatagttttccaatcctgtttgcaagaactcgatatacttaggaatgtcctcgtcatacgaataagatttattcaaagggcgaccttcattatctatcagcacatagaagggctgtgcattggcaccgaatttaacgcgttggagataactccacttatcgcctactgtacgcaatgtacgttcccggccgttttctgtcactttaacaggtgaggtcaacggggttttattatctacataaagtgtaataagtacgtagtcgttgttgataatgtcacttaccttggagtctgtccatacggcaagttccatcttacggcagtttacacaaccatacccggtgaagtcgagcattacaggtttgccatgctgacgggcatattccatacccagatcgtaatcatcgaacttggcatgcacttcattattatagaggttgaagtcctgagtctgcataggcggtgcaaaagcactgaccgccttcaatggagcaccccacaaaccgggaaccatatatacggcaaatgccagtgagaaaagtgccataaagaagcggcccactcccactttcgtatcgtcatcatcgtgcgggaatttgatcttgcccaacaggtagaagcccagtaaagcaaacagaacaatccacaatgccaggaacgtttcacggtcgagaatgcgccagccataagccaagtcggctacagagaggaacttcagagcgaaagccagttccaggaaaccgagggtaacctttatgacattcatccaaccgcctgatttcggcatagacttcagccaggacgggaacagggcaaacagtgtgaacggcaatgccaaagcaatagcaaaaccgagcataccgatagccggagctaccacgctacccgttgtagatacctgtaccaataagaagccgataataggacctgtacaagagaaagacaccagtgaaagcgtgaatgccatcagaaagatactgagcaaaccgcttgttgcttccgctttactatctactgcattgctccatttagagggcagcgtcagttcgaaagcaccgaagaaggaagctgcaaacacaaccagcatcaaacagaaaaggatattgaacacagcattcgtggaaagtgcgttcagcgcactggcaccaaagatcaacgtaatggccaaacctaaagttacgtaaatcaccacgatggaagcgccatacgtccaggcatcacgaatacctttctttttatctttggaacgtttcaggaagaaacttactgtcatagggataataggccacacacaaggggtaaacaatgccagcagtccaccgaggaaaccggtgataaagatatagaaccatgacatatcttcttgtgaagtggtttcaccataagattgcagatcattaatgacaggtttccacaagtcaatattacctgccacatttatatccgtcggaccatctgcaccacctatgatgccagtagaagctgtatccgcaggtgtttctgtttgagaagcaggctgagtttccggtttcgtgtcctctgccggaactgttaccttttcagcaggagttgtaactgctgcacctttagcagcttccgctttacctgaaaaattaaattctacttgcgtaggaggcaaacagttttcatcattacaagcaccgaattccagaaaaccttctatcttataatctcctcctgtgagcttcagtttctgaacaaattgtgccgtagactcaaaatagcgcacgttcatctcgaacaacttatcataagaagctatttcttttcctttcggctgcaactttcctacaactgtagcaccggaaatcttctctacattgaaggtagccgagataggaccaccgtcacccaggtcggtagaatatacatgccaacccttgtcgatagtagcggtaaatacaatttccgcctctcccgctgcaagcgtcttcagttccgacttaaacttgacgggctcctgtatctgcgcttgtgccacgacagcaatcagcaacagacaaatggatagtatttttctcatccttataatctataatttattattaaatctcgtagtcaacacaagcgcgattctcctttacatcagcaatcagcttgcctgctgccacatgctcgggatgagtagcataaaatttcacgtcgtccagcgtatcaaattcgctgtagagggcaatgctccaagtttcgccgggattcatattgagtccaacttctatcttacgtataacagagattttagctggtaaagcctcgatagcggccttgaattctttcattgctgtcagctttttgtcagccggagcttcgtcttttaatttaaataatacaatgtgtttgaccataactttgcaattttaatgatttatctatatatttgtcaaccgaagcgattaatattaaccgcaaaaatactcgttttgttttaaatatacacttaaacggatgttaataataggaattgcaggcggaactggctcgggaaaaaccaccgtcgtacgtaaaatcattgaaagcctgccggcaggtgaagtggtactgttaccgcaagactcttactataaggacagtagccatgtacctgtagaagaacgacagaacatcaactttgaccacccggatgccttcgagtggagtcttttatctaaacatgtagccatgctgcgtgaaggaaaaagcattgaacaacccacctactcgtaccttacttgtacacgagagcccgaaacgattcatatcgagccacgggaagtagtgattattgaagggattcttgccctgtgcgacaagaaactgcgcagcatgatggacctcaaaatctttgtggatgctgatccggacgaacgtctgattcgtgtcatacaacgggatgtagtggagcgtggacgtacggcagaagcggttatggagcggtatacccgtatcttgaagcctatgcatctgcaattcatcgaaccgtgcaaacgatatgcggacctgattatacccgaaggaggaaataatcaggtggcaatcgatattctgacgatgtatataaagaagcatctttgagaattaaaaattaaaaattgaaaattaaatgaggggaactgctaatcttttcctgattgccttgttatgtctgtgctgcctgtcggggtgcggaaataaacggcatggttccatgcccgatgaagctgtgggcgatttgcaacagataaaagatagcggtgaactcgttgtactgacgctatacagttctacttcttacttcaactatcgtggccaggaaatggggttccagtacgagttgagtgaacagtttgccaaaagtctcggggtaaaactgcgcgtagtggtggcaaggaatgtacagggacttataaaaaagttactggcaggcgaaggagatatcattgcctacaatgtccccatcacgaaggaattaaaagatagtctgatctattgcggtgaagaggtcatcacacaccaggttattgtgcaacgcgcaggtgggaagacaaaaccgctgacggatgtaacagaactgataggtaaggatgtatatgtaaagcccgggaaatattacgaccgtttggtaaatctggataaagaactcggtggcggcatccatatccacaaagtgactaatgacagtatttcagtggaggacctcatcacacaagtatcccagggaaagattccttatacggtggccgataatgacgtagccagacttaacactacgtattaccccaacctgaatattaaactatccatcagtttcgaccaaagagcttcctgggcggtgcgcaaggatagtccggaactggcagcagccgctaataaatggcatgaagagaatatgacttctcccgcctacactgccagtatgaaaagatattttgagatcagtaaggcaactccacacacttctatcctttctcttcgtgagggaaagatttcacatttcgacgaattattcaaaaagtatgcttcggaaatagactgggattggcggttgcttgcttctctggcatatacggagtcgaactttgatacgacagccgtttcatgggccggtgccaaagggctaatgcaactgatgcctgctacagcacgtgccatgggactccccgaaggaaaagaacagaatccggaagagagtgtgaaagctgccataaaatatatcaatgctaccagtaagagtttctcttcagtaccgaaagaggagcggctcaacttcgtacttgcttcctacaattcaggtatcggccacgtacaggatgcaatggcactggctgagaaatatggaaagaacaagtatgtctggaaagacaatgtagaaaacttcatcttattgaaaagcaatgaagaatacttcaccgaccctgtctgcaaaaacggatacttccgtggaatagagacatataactttgtgagggatattatggggaggtatgagacgtataagaagaagataaagaaatagtgattaggggttatcactaacccctaatcactaaaataagttcagcttattcttctgcgcctcctccaacgaaacagtcttcggtgcttgcgtaacgctcttctcacgcaaccgttgatattctgaacttaatttttcttttaattcttctttggctttcggattcatcaagcgggcagctactgttgcattctgcgaagcatctttcagatgaactacaggagcatgatagacaggagctattttcaatgctgtatgcagttgagaggtagtagcgccacctatcaataaaggaatatcggcacctaccttttccagttccatagccacgtgtaccatttcttccaatgatggggttatcagaccactgagtccaatcatatccaccttttcttccaaggcacgctgaacaatcgtttcggcagttaccatcacaccaaggtctataatctcataaccattgcaggccatgaccacagaaacgatatttttgcctatatcatgtacatcacctttcaccgtggcaagcaggacttttccggcggaagtggagccttcttgtttttccgcttcaattacaggctgaagaatggcaacggctttcttcatggtacgggctgttttcaccacctggggcaaaaacatctttccggcgccaaagagctcacctacatagttcatacctgacattaaaggaccttcgatgatatccacagctttcgggtaaagtttcagggcttctgccaagtcttcctccagatagtcaccaattccttttgtcaaagcatgtttcaaacgttcttccacacttgttccattacgccatgaaagaggggcaacttgtttatcagtggcattacctttctgttgttcggcagcagctttcagttgttcagcagtttctatcaggcgttcggcagcatcgggacgacggtttaaaaccacatcctctatacgttccagtatatcggcagggatatcggtataaagtacagccgtagccggatttacgattcccatatccattccttcacggatggcatgataaaggaacactgcatgcatggcttcacggatataattgttgccgcggaaagagaatgaaaggttgctaacgccaccactgacatgcgcacccggcagattcttacgtatccaaccggtagcccggatgaagtctacagcataattattatgttcgtccatacccgtagctacggcaaggacgttagggtcaaagataatatcatgaggattaaagcccactttttcaaccaaaagctgataagcgcgggcacacacttcaatcttacgttcgtatgtatccgcctgtcctttttcatcaaaagccattactacggtagccgcaccatattgcctgatcgtgcgggcatgttccagaaacttttcttctccctctttcagagagattgaattcacgatggactttccttgcaggcatttcaatccggcaacgattacatcccatttagaggagtcaatcatcacaggaacacgggcaatctcaggctcagaagcaatcagattgaggaaagtagtcatttcagcctgtgcatccagcaggccgtcgtccatatttacatccaccacctgcgccccgtcttctacttgctgacgggcaatgctgagggcttcatcgtatttcttttcattaaccagacgcaggaacttgcgggaaccagccacattacagcgttctcccacattgataaagttcttctcaggagtcacttccaacaattccaggccggaaagccaaagactttcgggtttcagagcaggaacatggggaacagcaccgactatcaaggcaggatattcggcgatgtatgcatcggtcgtaccacagcaaccgccaataatgtttatcagaccttcctgaatatactctttcacttcatgcgccatatcggcaggcgtctggtcatattgtcccaggctgttgggcaatcccgcattggggtatgcactgatataataaggagcacgggcagcaagctgttccaagaaaggtttcaactggcgggcgccaaaggaacagttcaagcctaccgaaaagatattggcatgctgaactgaggcaagaaaagcctccaaagtctgtcccgacagagtacgtccgcctgtatcggatacggtaacggacagcataacaggaacttgaacgcctgtagcctccatcgccttttccgcagcaaagatagctgctttggcattcaatgtatcgaatatggtttctatcagcagagcatctactccaccttccagcaaggcttccatctgttcccgataggcatcggcaagttcatcgtaagtcagcgcacgcatggccggattattcacatcgggactcatggagcaagtcttattggtaggtccgatagaaccggctacaaaacgtggtttatcaggtgtagaaaattcatcagctacttcacgtgccagtttaacggcagccagattcatctcacgtacatattcctgcacatgataatcggccatactgacactggtagaactaaacgtattggtttcaatgatatcggcacctgccataaggtatttacggtgtatatcctgtatcacatcagggcgtgtcagacaaagcaggtcattgtttcctttcatctgcccggggatgtcagcaaagcgctcccccctgaagtcttcctccgttaagttgtaccgttgtatcatggtgcccatagcaccgtctaaaataaggatgcgctcacgcaccaacttttcaatagaaaccatttgtattcagtgatagaatgatattatctcttaaacatccgcgccatatcgcgtttatcatctttctctttcaacgcttcgcgcttgtcgtattgctttttacctttggcaagagccactaccactttggcaagccctttttcattaataaacatacgaatgggaaccattgtaaaaccggggtcttttgctccacgcgccagtttatcaagttcttttttagtaagtaagagtttgcgctccctgcgtgccgaatggttattatacgaaccgtagaagtattcggaaatatgcatattcttcacccacaactcgccattggcaaaataacagaaggtatctacaaggcttgccttacccatgcggatcgatttaatttccgtacccgtgagcacaatgcccgcggtataagtgtctaccaattcgtaatcgaatgtagcacgcttattttttatattaacaggagcttgtttcatgatttcaaacgttaattaagcaccatcgtcagcttgttgaatataaactgaatgatcataggacaggcaatcagtaggatggaagaaatgattgtaaaccgtaaccggtctttttcttctactttcatcaacgtggaagccccctcccacaccacatacacaatatagaactgcaacagcaatccgatgatattaaagtccggcaatatgccgataataatctggagcaagaaaagaacaaccagcgcatagcccgcaaactgttgcgtcaatggcatgtcgctgtccatcataaacattttaacgcgcatcccatttatgagatacgctgccagaaaatatcctccaaagagggatactgccaccgcgcaacattgcgtcatggcatattgaaaactctcgggaccgccccatcccttcgccagcaaagaaccgatgaagacggacaatccacataaaccaatcataggatagacaaaagcagtaaatacttttcgcctatcctcttccaaacgaatttcctcccaagccttggccggagaggaaatcagtaacattgctatatggaataatgctttataatccaaattatttaactgtatattcccacacttgttcagtagctccttccaaagaattcttcgaagtgttaacctgaccaattactttaatcttagtcggcttctgccctgcttttagtccaaacatatttagtgcagaagttaatcgatatgccttgcttgtagaagtatatacattacgtacaaccggatcttcactcgtttcagttattacatgattcaaagtcaagacaaattctgtatctccttgctttacactttccaaatcataagtaagtacaaaagcatgttttgccaattcttctttctgcttttcatcactgctttcctgcttcacccaatacacaggagttacaattatgtattcattatcaaaaacaacaatcggatctatattcacagtaccacttgaaaaagagacattaccggaaaatgcatagaaagctgaatttgcctttgtagattcagaagcacttactggtccttcattaccctttgcatttatagaaaccggctcaatgccattataaagtgtcactgttatagaagctgcatcaggagattgcaattccgaatcaaattggtaatagaaaccataaatttcccccatattaaaagttgttgttgaagaacccgatacaaccaatttctgtccattaaataattggaaagtaggaggataaaaatctgtacacttgccataagcaaatcctgtgactgtagggtcattatcgctattaaagcatgaagttaaagaaacacccattaataaggtaagggcaaccatccagattttaaatttagccattttcattgttctataaatattagagtttgcaaatttagataaaagaattgagtaacactgcactctcctcattttttcattgtttttaagagtaaatgaaatattaatctaaatactgcaccccctgcctcctatttaacatcaattcacaaacaacgtaatatcagagaaaggaaaagtgtagcaaccaaacagtgtacttgtggcgaacatcttcccaacaacagataaatagcaataaagttaaagtaaaacattactttgccttaacctttttatcactatgccttattctaatctttgttttccaattgcgggctgttcagcccacaattggaaaacggatagcccacagatgaaaaccaacgggcccacaattgggggatagagttttagtttagacctaaccagattttaaattaagggtgtatacttttagaagtaaaggaaaagagatctttctttagtcatttacggataaatcctaaagaagaaaggggggaaatacgattttgataagaagaaagccctatattagagataataagacccaaaaacgctgctttttcacacaaaatacctctattcagcatttatcgaattatcaactgtcagacaagaagataagttttttttttgtaaatattctacaaaaagtggtgtagacaaacagtttatctacaccactttttcagcttacctacacatgcctccccctcccatcagcaaagggtttcaggcacatggatgtaggtgtgcagacaagattgcccaaaaactctcttgtcagacgattttagcaaacagttccagatgttcatctacataactggctaccatagctgtgattccttcctctttttccaaaaattcttcttccaattcatcgaaagcttcatattgctcgtacatagccatgaattcatcatctgtacgttccctttccagatcttcgcgatgggcatcataaatctttttagctctatataccagttttccgaaatcttccgctccccacagacgcatcactttagcaaatggattggcaaaaatataaccaccatacccattctgtatcaactgacagaagccaccatccattacttcatcacgaaatatctggtatgcaagtaaagtgtgctgctcacctgtcagtaatggcatggattcagcagttagttcaccacctatcacttctttatatctgtcggtaaatacctgaataaaagtatccattccctcgcctgcggctttgcgcaaggcggcatcagtaatttctatcatagtcttcttattatgcctttttctaattattacgacaaagatatggaattaaaagataaaggtataacaagaagactaaaaactatgaaaagtgttcctacaatttccgcaggacacctttatcacctaccacaaagtaagtatccttatcaatcaataatgcacggccacgtttcttcttctgattttctttattgtctacattgacaccgataaccttgccatcataaaaagtagaaatatccttaaagatggtatgccctacgataatgtgtttggctttatagcgttccatcaccatttgcaggctatcctgtgccattggatgatacttggcatccgtacgcacaaggccacgataccagatggggccatcattaccatacagaaatgcggtcaatggagaaagagccctacgttctttcttattcataaaaagggctttgctcatttcttcattcacggtaggaatgcttaaattacggtcatagaaattcttgcctaacccggcatgaacataaaggtcgctaccaatggtctgcatcgtattacgagttcctaaccatttacccaattctgtatcgggtccaaaaagtttagggtaatccatattcaatttctgtgccagcactttatatttatctttcgtatagcgcaagtcattggccaataccaacggctcatgattccctaacaggaaagaaaccgttccacctgcttttgcggcctcatcttccaacttataaaacagccagaatatttgcggtacatcttttccacgatcgaaaatatcgccgataaccatcaggtgattactaccgaagctccaattgtagtttttatcgataaccccattaccctgcaacaagctaataacacaatccaacctgccatgcggatcggacataacaaacactttctccggttgccgatattgccaatcgggacgtttcaccggatgcaatttcacatcaaatggaaatcggcctttatgatctaccacatgcaaggtaaaatctttgggtagtgcaacataagtcgtgtcgataatcttccctttcttatcgacactgatgacacgcgttttaccatcaggctgataaagcacatacggtccgtcagctgataactcttcttttttctctttgtctttcttcttaccgtctgaaccaaaagttccggcgtttaggccggaactgatgaacattagagtaaatgcgataagaaagtacttcatgaaacttgtcttactcgtcatatatcatttatttaaattatcttccaccatattcaggattctgttccatattaggattggcatccatttctttcttaggaataggaagtacaatcatatagaaattccagtcatacgtcatatacttcgtgtcatgcttggttttactcagattactgtcttttacatccttacgttccactgtcaatccatttctgataacatcatacatgcggtgtccttcggcaaccagttctttacggcgttcgttcagtactctctccaaagttatagtctgtcctaccactgtgttgtccggattagcacgcttcacaatcgggtcgagatacttaacagcagcgtcattatcattctccttaacagcggcttcggctgcattcagataagcctcggaaagacgaattaacggaatattggcatcttcgatattctcttcacgttgcggctgatacttatttacataagcataatatttcttatcgaaactcaacaactgaagacgtatatccttcgggtcttccttcaggaactgatagaaagaacaagtgatacacatatcatcgtaaccgtcataagagttgagataacccatactttctttacccgggctgtcagtagtgagatttacgatttcgaacaatacttcacccggtttggaggctgaagcatcttctccccaagcagtggggtaatcttcattggtccataaagcgtatttattcttttctgctcctataatagcatcgctcgccattttcaaagcattggcattttcacccttgtagagataaacacgactgagaagtaccattgctccccatttgtttattttgcccttattgaatttttcacccaataaagagagactttgggtaagatcatcgattatcttcgtatagcattgagccacagtgttgcgtgtcggcttgctatcaatagtggacagaccttctataataggcacacccagtgatgccccgtcatctttcaaatacggataaccgaagatacgggtcagatcgaacaatgccagaccacgaatggccagtgcctctcctttcaaatcatcccgatatgccttgtctccttcatcaatcaccagtttatcaatgttcatcaaaatcagattgcaattctggatgatagaataaagataagaccaatgactggaagggttatcatccttggtaaagttaaaacggtaatagttagctacacgcttagtagagctaacagcctgcatatcatcacccgtcacatctccataatataccaggcgtccggagtaggcatccgaactctgcatcgtactgtaaatgccattcagagtgaactcaacatccgacaatatcttaatgctggtttcagtatctaccgaagtggaaggttccaaatccaaccaactgttgccgcaagaagtagcgacgaacaacatggaactgataaataaatattttaatggtttcataatatctcgtttttatcgggttagaaatttacatttataccaaaagttacagtcttcaaaggaggagtcccccaaatggcagtaccaccactcactgcttccggatcgtaatagtcgtatgccgcccatgtccagagattattggccgatgcatacaaacgtacattctcgataccgattttccgtgtccagtccttcggaacagtgaaaccgaatgttagcgttttcaaacggataaaatcagtactgtgcagacggcgggtagtcgttactttattcattgctacagagggcttttcgtaaaataactcatactttgtaacatctcccggcttcttccaactatctttatagtaggacgggatattagcttccaggtcattaccaccatgttcggttttctgtgcccagttgtcataagagtaaccaccaaactggtaagagaacataaagttcagatcgaaccatttatagcgcaacgtatttgataaaccaccgatagcattgggctctgcatgtttatcaagcacaatggcatgagctttattgatttcttcggtgatgtctttaatgtagtttccattttcgtccacatcgtttgtatagaactggggagcaccggtttccggattgatacctgcaaattcaatcatatagaaagtacggtatgattttcctactttacgaatttgagaaccgctcttgatttccgtctgcatgccatccaaggttacaattttattcttgttatgcgaaatattgaatgttgtattccatgagaaatccttagtctggatgttggttgagctgatttccagttccacacctttattctttacttcaccgatgttcatcaggtaactgctgaaaccggtagtcatagagataggacggtccatcaacaaattcttggtggtacgagtgtaatactccaaagtaacgttaatacggttccaaagtgcgaagtccagacccagattcaggttatagtttgtctcccactgcaagtcgtcattccggagttgcgactgaatgatgcccggttgttccagataaccgttagtcaggctgctcaatcccatatatccgaagtaatcggaaggaagggtaccattcacaccataagatgcgcgtatctttaaatcagtcaaccaatccttagttggagacatgaattcttcctcaataatacgccaagcaccggatattgaccagaaactaccccaacggttatctctttggaaacgagaactaccatccgtacggaagctaccgcccaaatagtatttattcttataatcataattcaaacgagtcaggtaggaaaccatacgtgtacgggtatcattaccaccaaccgattccgtcttcataccattactgatttgatttttatcgtgagttgcaaagttagtggcatatcctgacagataatcgcggtattgatcgtctatttcgtaacctaccagcgcatcaatgtgatgatctctggcaatcgaagttttatagctcacctgattggcccataccattttgttgtattcataatacttcttactcataccaccgttgatatcatcaccgttggaagtacgcgggtcactccagtctttaccttttgtaatgacatagtcatagctgaaagtagacttaaacttcaggtccttgataaattcatattcaccatagatggtgttgaatgtacgggtcacgtattcgcgttgataatcgtaagttgccgacaacaatgggttacggtcaccaatacgaatcaagtcacgattccagctaccgtcttcattgtatataggatcagaaggtaccacagcattgcgtgaagtgtagaaaggagaagaataagaagtcccttcactatatacatcctggttaaccgtagcaaacaagacattggctcccaatttcaacttgctggtagcttgaaaatccacattcaggcgtccgctgatacgttccagacctgagttgatggcaataccgtcttgcttcagataagaaagtgaagagtaatatttgaacctatccgttcctcctgaaagagaagcctcataagactggtgatttcctttcttaaacagaacatcatcccaatccgtatatccacaccagggaaccggagcatagtcatcaatttctccatcggcataagccattgcatcggcttcactcttacccttctttatctgcccggctaccaaaccatcatagatatactgacgacgctcttctccacccataatcggacgataatccatagcaaaatcagaactaccccaatcggccttcaatgaaatggaaggctttcctgctttacctttcttcgttgtgatcagtacgacgccattagcagcacgcgaaccgtaaagagaagctgcagcggcatcttttatcaccgtaacactttcaatatcggagctattaatggtagacataatatcaagaccggcatccgaactcattgtattgatggtacctgagcgcattggcactccgtctattacataaagaggtgagttgctggcattaaaagaacccataccacgaattctcaaagaagaagacgcccccggctgaccggaagaagaagtgaactgtacgcccggagcattaccttgaagcaggtctttaaaagaaattgccggaacatctttcaaagtctctccttttacactggcagcagaaccggcataagcagatttcttgaaggtaccataacctgtaatgacaacctcatccatcaggttattatccggtgccatctccactttaatcgtctttgcagaagtaaccttgatttcctggcgggtataaccaatataagaaaccatcaaagtggcaggaaggtgatctacatcaagggtaaaatgaccgtctaaatcagtagtacaaccgttagtagtgcctttcactattacattggcaccaataatggcttcaccagtttcgtctacaacagtaccattcagctttgtcttttgctgtggtgctgccatttcttcaaccttagaaacaggtttgatggcaatgacaccatcatgaaccgtataagtcagcccactacctttcaggcatttatccagcacattagcaatcttttcatgattcacaatcaacttttctacttttacatttttcacctcttcagtgctatacacaaaggtgaaatctgtttgtctctgaacttcccacagcacttcgctaagagtggcattcttaaaggttgctgtgacagtggtttgtgcaaacactgcattggcagcctgcataaaaccggtaactgtgaaacagaaaaacagcaacgttatccataaacgtctactgcttttttcagcttgattcttgtgtcctttcttgttcatagtaatcatttttgggttaattatggaatgttattgtattaccttcaattttcacatgcacttcttccgtcttttccagcaacttgacgaaaggagttatttcttcataacgattcaggttacaaccgaaacgtatattcttaagtccttcattttcataaaccacattcatgtcataccagcgggaaagtatcttcataatgtcttccagacgctgatctttgaaattgatctttccttttacccatgaagtatagaacgaagtatccaccgttcgcacttggatggaattgccacccgaaacgatggtggcctgttgcgacggtttcagaataaggctttcacccttttcggcactgaccctcaccgaaccgttgaccaaagttgtctgatattcttcattgggataagcggagatattgaaggttgtgcccaatacttcaacttgcataccattgacgtttacaataaagggctgcccggttttactcacttcaaaataggcttcaccttgcagttctacttctcttgtacccgtagtaaaagcaaccggaaaacggaggctgctcattgagttcaaatgaacctttgtcccgtcactcagcaccaacgcatactcaccgccacgtggaatttccaccttattatatacaggtttcggccgggcagatgtgctctgtgccaaccgatagtttaaagtggtcgaatctacctgaatatgcgtaccttctatcttccgcaaagcatccgctgtttctttattcaaattgattgtttccccattgtccaaagtcaatatagctttggcagcccccggcaatatgggctgggtaatcagcacggacttatcagaagaatggtcataatcagtatacttcagcgtaatgcctacaaaaaagacggggactaaaacagcagcggcataacggagtattttcatcatccgttcccggttattgcttttcctaatacgcttttgtacttccagccagccggttgcgacatcaaatgacacacctttctccacatgttttttaagattctctttactgcatattttctggaagagggcttcgtgggcagaatcttcctttcgccaactctccaattgaacgctctcttcaggagtgatttcaccggataagtgcctggctataatattagctatataaaaatcctgttttatcataaattgaacttttttcgttgtcttttataataaaacaggagtaattaaaatcatggtgaatcaaaaagcactttttttttaataaaccggaatttagcgtatttttgccgcttaaactcaatatataaattttatgccgatattcttcattattcttattaccgtataccttggcggaaatacctatatattttacaggggtatgcaagcgttatccggtcttccctgtggaattaaaatttcattggccgtattgttctggctcgcgactttatccatcgtaggaactatgctaacccgcaatataaaaatgccggttttcttatcccataccatgtatgaagtagggaccggttggctgatcttcactctatacatggttttgttcctgctcgcgtttgatctgctgagactctgccgtgtccccttcaactacggtttcatcctctctctaatattcacggtcgtcttattaggatatggatactataattaccgtcatcctaagacaaatacaatcaacatcgccctcgacaaacctttagccggtgacgccaaaccagttaagatagttgccgtaagtgatctgcatttgggtaatggaaccaggaaaacagccttgaaacggtatgtgaaaatgattaatgaacaaaatcccgatttaatcttgatcgcaggagatttaattgataacagcgtagtacctctttacactgaaaagatgatggaggaactgtcggaattaagagctccgttgggtatttatatggttcccggcaatcacgaatatatcagtggcattaaagcaagcgcccgattcatacaagatacacccatacagttgctgcgcgattcagtagtcacgcttcccaacggcatacagctaataggacgcgatgaccggtcgaacacggcccgccgctccttgcaagagttgatgatagggatagataaaagtaaacccatcatcttgttggatcatcagccgtataaactgaccgaaagcgaggcagccggtgtagatttacagttcagcggacatacacaccgtggacaagtatggcccatgaattgggtgacagactatatctatgaacaaagccatggctatcggcaatggggaaacagccacatatacgtctccagcggattatctctttggggaccgcctttcagaataggaacggaaagtgatatggctgtattccatttatcgacgaaaaaataaaagcttctcataacccgaaccgtatctgctccgtatcatctccgtatctatacgaacggacttagtacggacttggtacggagatgacacggagatggtatggagatagtacggagatactacgggccggttgtagaaagaaacctgaaacgatgtttatttttaaccggccgcttacaaatagaagaaaataaggaaatagtaatagtctttcagatatatacgaagctttttataggcaatcttcttaagagtatgtaccgtttcaacggatacatttaggtactcagctatttctccattcttttttccttccatggccaatcgcatgatagcccgcatttgatcgggaagcttatcaatggcatccgtcagcatccgacaagtctcttcttcgactactgcatcatggaaaaaagaatctttccttttctcaattactttctgagcatattcaaataccactttagaatgttccagttcattgagagccttattacgtacggcagtataaaggaaagatttgacctgatgcaaatagaaaaaatcttctctgatctgccacaacttagcaaaagaatcctgcacgatatccgcagagacttcctcattctctgtatattggtttgcaaacaaacaaagcgccacataatatttatcaaaaacattatggaactcccgttcatcaagcctaatactaataaatgtataagaagtttctgtaaccaccagctttttattttctctattctaatgcgaaaataggaaaaatttattaaaaaatgacacagtaagacctaaacttccacatagaaaaagaatttatcgacattcattgctcagaaaacgcatacttttgtcccatcagaatataaatcataaaaccatgaaaagaaactacgcatttctatttatcattcttttatgtgcagtctttgcacaagcccaaacaactcccgcctttcccggcgccgagggatttgcccgttacaccactaccggaggacgcagcggagatgtttatcacgtcacaaacctaaatgatagtggaagcggctcactacgcgaaggactcaaaaaaggtaaccgcacgattgtgttcgatgtatccggcactatcagcctgctcagcacccttgaaattaagaatgctaatatcactattgccggacaaacagcacccggtgatggcatctgtctgaagaattactcagtggctgtgaaggccgataatgttatcatccgttttatccgctgccgcatgggcgacgagaaaaagacggaagatgatgctttgtggggacgtaaccatcagaacatcattatcgaccattgcacgatgagctggagtaccgacgaatgttcttccttctatgacaacaagaattttaccatgcaatggtgtattctcagcgaaagtcttaccaactccgtacatggtaaaggcggccatggttatggtggtatctggggtggcgaaggtgccagtttccaccataatttattggcacatcatagcagccggactccccgtctttgtggcagccgctacaccggtactcccgatgcggaactggttgacctgagaaataatgtattctataattgggggcctaccaatagtggttatgccggagagggtggcagctataactttattaataactactataagcccggtccttccacttctaccaaagaccagcttgtgaaccgtattttccaaccgaatgcagacgacggtacacaaaaaaacaccaaaggtgtctggggaatattctatatagatggcaattattttgataatacctgtcctcagatacaaaaccacaaaaagaaagataagttgcttggtttgatagccgatgccaacgctgataactgggaaggcattcatcccaataccaaaaatgcagacttaccggacgggagtaaagaaagtatcaaaagtaacgtcgagttcactgtatcacccgtaagtacccatgcagccccccaagcatatgaaaaagtactggcttacgcaggtgccagcctgaaacgggatgccatagaccagcgtattgtttctgaaaccaaacaggggaattatacctacgaaggaagcaacggcagcagcaacggattaattgactcgcaagccgataccgaaggatatctcctatatagcagcgaagaaaagccagctgattctaataatgacggcattcctgatatctgggctgctcaatatcttcccgtcggaaaaagctatcgggatatagaaccgacaaccggatactcttatctggaactttacatcaatagcctcgtagatcatttgatgaaggcttgctatgaaaatagtaataactccccaagtagcaatgatttcaatttatatggtactactactggcatctcttttccctcctccaatgcaacggatgcagtgaaatgtatccgacaagaaaaacgaattgtccttaaaggactctccgccggagcacgtatcgacatttatgatttatcgggacgaattataacctcacatcaaagtcttgacgaacaggccgaatacgctcttactgaacctgccgtcatcaaggtttattccggagggaaaaagtacagtttcaaaagtccccgttaattttattgtaatgtggagattgcaatacacagaatcactgtctcttattatttatttttataaaaaaagtcagataactcgatttgcataaataaagaaaaggagtaactttgcgagcaattttaaaaagtggattacgttttttaatttatataacttaaaaaaagagctaattatgacttattcacacgaagtggaacacatgtgtgttgtaaagaagggtcctaaccacggaccggctcccatacccgaagaaggcaaatgggtaaaatcaaaagaaatagttgatatttcaggtttaacacatggtgtaggttggtgtgctcctcaacaaggtgcttgtaaactgactttgaacgtaaaagaaggtatcattcaggaagcattggttgaaacaatcggctgctctggtatgactcactcagctgctatggctgccgaaatccttccgggtaagacattactcgaagcattgaatactgaccttgtttgcgacgctatcaatacagcaatgcgcgaacttttcctgcaaatcgtttacggacgtactcagtccgctttctctgaaggtggtttgattatcggtgcaggtttggaagacttgggtaaaggtctgcgtagccaggtaggtacactgtacggtactttggcaaaaggtcctcgttacctggaaatggccgaaggttacatcaagaatatcttcttggataagaatgacgagatctgcggatacgaattcgttcacatgggtaaattcatggatgaaatcaagaagggtacagatgctaacgaagcattgaagaaagttaccggtacttacggtcgcgtaacacctgagcagggagcagttaaacatattgatccacgtcacgaataatataaggaggaaagaaattatgattagagaagtaaaatttgaaagtcaagaccgtcgtatcaaaggcatcattgaagccttgaacgctaacggcatcaaagacatcgaggaagctaacgccatctgcgacgctgccggacttgatccttataaaacgtgtgaagaaactcagccgatctgtttcgaaaatgcaaagtgggcttacgtagtaggtgcagctatcgctatcaagaaaggctgcaagaatgctgctgacgctgccgaagctatcggtatcggtctgcaagctttctgtatcccgggttctgtagccgacgaccgtaaggttggtatcggtcatggtaacctggcagctatgttgctgcgcgaagagactaagtgttttgctttcttggcaggtcacgagtcatttgctgctgcagaaggcgctatcaaaattgctgctaaagcagacaaggtacgtaaagaacctctgcgttgtatcctgaacggtttgggtaaggatgctgcacagatcatctctcgtatcaatggctttacttatgtacaaactcaattcgactactatacttctgaactgaaagttgttcgcgaaatcgcttactctgacggtgaacgtgccaaagtaaaatgctacggttgcgacgacgttcgtgaaggtgtagctgttatgtggaaagaaggcgtagacgtatctatcactggtaactctactaacccgactcgtttccaacacccggttgcaggtacttacaagaaagagcgcatgcttgctggtaagccttatttctcagttgcttccggtggtggtacaggtcgtactcttcacccggataacatggcagccggtccggcttcttatggcatgaccgacacgatgggccgtatgcactcagatgctcagttcgctggttcttcatcagttcctgctcacgtagaaatgatgggattcctgggaattggtaacaacccgatggtaggttgtacagtggcttgtgcggtagacgtagctcaagctttgagcaagtaaataattacttaactaaaataataaatccctataatcttattgattatagggatttatatttttaacacaaacacagcaacttaacatattacataactctaaaagtgaagttctataatgaacaatacggtaatatctctattaaattcttgtaatttttgactaaagaaatctcccacacatatagtaaaattgtagattttgactaataaagaagaattttcgaacaataaagcaagaaattagttgtatatttaagaattatacaatatctttgcagttgtttattatgatcattttctacgaacgtcaaccgagcactgatttctcttgcatttgtaaggatcacacatagaccggaaaaagaaaacgcgaattatctctaaacactaaataatatgtggaaaaaattattaggaactactctaattgctgcatttgcattaagcagctgcacagacaaagatgtttatcaaggccctaaggaagatgaaaaagaattcaacaccttccccttctctactgtacaaaaggacgtaaacctaaatgtaaattacgtaaatggtgctgtacaatcaaatgtttattttgaagtgtatgatgaaatgcctgtcgtcgaaagcgaatatggtacttataccaaacgtcaggatgtaaattacctgtttgctgcctatacccaagaagacggtacttaccaaggtaaactggaattgccttcatacctgacaaaggtatatatctattctcccgctttctttgcacaaaccctgatggaggcaaatgttgtggatggaagtatcgaagcaacagataatactagtactgatactcgtacaattactaataccagtactccatacgacagttatctggtaagtaatagatacggaaatgaggtatggaaaacctggttaggtacatacaatctgtataaaaacggggatattaattataagtacaagggaaaattagcagcaactaaaaaggatggtttatatactgcgcacacccgtattataaacactcatacaacttgtccacaagaatatcgcggttattcggatatgtacgtcaacaaggatgctgaagtagtagttacatttctgggacaaaatacttgttggacctgttcattgggatattattattataaaaacggagaacaaccaaagaacttgaatgatgcccatgtaatcatgttatttcctaacacccaagatggtaactggtctaataatcccaatcaagcaaagaaaagtgccggtattgacccactgactgccgtacaactgatgtattatcctaatattgcaaccggaagtaaagaaggcgctactacaaccttccccgcaggttacagaatcggttttgttctggcaaccaatggctggagcaatcatgttggcagctttagcggatacaagaaatatcgcgccgccacctctagcggtttgagcttaaacgatcaaggcgtgaactttgaagaaccgcgtactgctgtttatagatatggtgattggatattgacttcttttgaagattatatgactgacgagaatttcagcgatgttgtcattactttaaaatctaatccggtagatgctatcaccgatattcctgtaactaatcctgatgaagacaagacaagcattgacttcctgaaaggtacatacgcatttgaagacctttggcccagtcagggagattatgatatgaatgatgtagtcgtaagatataactatggcagcactttcgatgaaaagaatctaatatattccgaatcatttactttcaagactttccaaaatatagccagtaaccagaacggcttagcattccgtctcaaaacggaaggaaacatagaatctaccacttactctattcgccaacaaggtgaaaaggaatttacagaaaccacatttgaatacgagcctcaggataatgtatatcttttgaccacaaatgtgaaagaaaatatgggaacagaatataaggttaccgttaattacagtaagcccatttcaaagcaatctgaagcccaagcttttatattcaaaaatgatgaagacggtttgcgatgggaagtacatattcctcaggaaatgccgacatccaaaataaacaagaagtattttgggcagggagacgatgcatctaaccccaatcagagtatatactatgtacgtaaaggtaattacccatttgcctttttcctgagccgggcaacagaaagcgatttaagtaaattgctggacagtgctaatgaaaaaacagctatcaatctgttatatagtggatatgacggttgggtaagcagtaatggagaaaagaacaaagactggtataagaaataaaaaaaattaaagaagaattgctcactatgtctcaaagaaaaaactgagaacatattagaaagtataaagagagtgtctgcttgctagctgacactctcttcatatttacacagatcatgaatttcccccaaaggacattctttattcagcctggcttattcattgaaccaatcaatttttttagagaaatacatcaccatagccaatatcacaaacaatccgagactaccggcaagcaatgcaaaagtctccaactgtataagaatgaaaacataaatatagagcacactgagcagacctgccataataaacgccggtttctttcttttaataatccccagcatatagcctcctaccagcataatcgtaagcactgatgccaccagatatgccatgctgaaacctatatgctcggacatggacaacaacaaactatagaacagacaaagcgccaaaccgactaacagatattgcaaagcatgaatacgggttttctccattatctccgtaaagaatatcactgtaaaggtcaacagaataatcaggatagcatatttagtggaacgcatggactgctggtactgttctaccggcattttcagattaactccgaagttagagttctgaatatctttgatactggcattctgataatttataaacacttgcggataatttctgttcaagttcagcacttgccattgcgcagagaagtctttctccgtaatctcccgcttctccggcaggtaattaccatcaaaacttggagtattccagtttgctttcagggcaactctcgtagttttacccaagggagtaaaataaatggattgagatcctttcagctttatcttcatttcatagggtaacttccggtcatctttcagagcggaaaggtcgacaatggcatgaacacccatactttcaatgccgcgtccatccatccccggctcaaacatataaacagaatcgttcaaagttatgctaacctgttcgctgagaccacgcatatcagtcagattcaagcatattgccgctctttgatattgaagtacatccatgtctacattactcttacgaagttcttccgaactaaaaaatcccttgattaccaactccgactgatatacattcaccttataaattcctcgccgaagaatctccgtactcaactgtccgtctattgacaattcgtcaggaagcaatgtaacatttcccatagtcaccttcttcgtaccattatcttcctgtgtgataggatacttcagattgatgtaaggtcctgtaattgtctgcgccagactccacttctgaccgacttcggcaatagcatccgtctgtgttcgcccgcgttccgaaatcatatcttcgatcataaacatcggaattagcagcaacagaataaggaaagcaatgaccactgccttgatagatttagagaaacgacgcagacaaccacttgcctgttttctcgtttcattcagattctctgcaagatctccattgaaatcttcgttcaaattgtcattcaaattgtccataataaaatagtattaagtaagatatttagtattgtccggttttgtgtgaagccaaacatctatgttgatttcagaaaattctccaatgcttctatgtgagttttgaaagctttctttccttcggaagtagcccggaaagatgttttcggcttcctccccacaaagctcttctgacaaacgatataacccagttcctccaaagcccttgtatgacttgccaggttaccgtccgtcagtgaaagtaattccttaagagtattgaaatcggcatcttcatttaccatgagaactgccataatacccaaacggactttactttcaaatgccttatttatattttgaaatgcttctatcatctattatttccttctttcgtactgtaaataaaacaacatgccatataaaatatgaaatccgccaaaaccaattgtccaaaacattaaaccatgcccctcaaagaaacaatctgcaatacccaagcaaagaaaagcatatcctaaccatgctacattggaataagtgaacttagacacattgaccaaagaaagtccatagaaaagtaacatcacagaagataccagtccataatgttcatgtagcagtaaagctatacagaacaaccctcccgtcaacaacggcaatgaaaaattccatgcaatacgataggttagtttactgaatagcttttgttgcatcttcttggccttataccaggacaagatacaggcggtaacaactgaaaaaatcaaaaccagtgaagcaaccattatcagtccttccctattatcttctgatcttaataactgaccggccacataagcgccggctaatgcatacactccggccaatacagccgtcattccactgagagatacgaacttagaagatctttccatcaattcttttatctcatttactgattctattgctttatttctgtccatataaaaagtactttgtgttgcaaagtaaaatataaaaaacgaaaggagcaaagaatatcgagaaaaaatgtattcaatgagattaagccgcataagaatcactatatttgcaatcaaccgaatatcaacagtcatagcctaatgatgaaacaattaattgcttgttgcggattagattgcgaaagttgcgatgcccgcatagctactgtcagagatgacaatgagttaagagaaaaaacagctcaactgtggagtaagctgaataatataccggagattacggcagataccattaattgtatgggctgtcgtgtggatggagtgaaaacgatgtattgcagcgatatgtgtgcaatccgcaaatgcgtaaacgaaaaagggtttaacacctgtagtgattgtaaagaattggataactgccagatagtgggtccaatttttcagcatactcccagtgctaaagaaaatcttctataacattttatcgcattcgtcagctttacaacctgtatatcatcttatctttaaaataaaaaaacagcatttgagatcctcctatgctgttttcttttctcttatttgaattaatactgtcttatcgtgataccctccctgatgtatttccttgcatcaggctctctacttcttccaccatcacatgattaaaatcaccgtatacggtattctttaatgcagaagcagccaaagcatattccaacgctttttgatcattatccggatacgttataagaccataaatcataccaccgacaaaagcatcaccggcacctacgcgatccacctcgcactcgatatcataaataccagtatgcttcaatgtgttatcagaatagagaatggcagccagtagattatgattggaagtaatggaattacgaagttccagaaaagccttctggcaacgaggaacaagctccaccacccgacgaccaaagtcttcaaaagcaggaagatttgcttcaaacgtagtatcctcagcatctacggctttaaaaccgacaggttgtatgccaagtatctctttatattccggttcggcaccgaaaatgacatcactgtattgcaccaaaggctgcatgacttcggcagcggaactcccatagttccaaagtttcttacggaaattcaaatcacaggagatagtcaatcccatacggtcagctatttcaagagcctcacggcatgcatcggcaccatcttgtgacaaagccgcagcaatgcccgaccaatgaaaccagccagcatcggagaatatcttttcccaatcaatcatacctggacgcaatgtggcaaaagaagaaccctcacggtcgtaaaccacattggaattacggaatgccgcaccactttccagaaaataaagccccatgcgcttaccaccaaaaacaatgccttccgtacctaaaccgttagcacggagtgaagctatgcaggcacgtgccacagcattgtccggcaggcgggttacgaattctgtaggaataccaaagttagccaacgaaacggccacattagcttcactgccaccgtaagtggctatcatttgattggtttgtgaaaaacgaaggaaatcaggagcagtaagcctcagcattacttcaccaaaagtgattactttcttatctgtggcaatttgtttcttgtacatacgttgtcaataataaagtttaactaaacaccaaagttgtatttttattccaagtaaacgcaaagatataataatatttattggcggaaaagcagggataaaacataatcatcagatttgttgtaactttgcaaagttttaactgatataacaaacagaatgagttcattgaaaaaaattccctctcctttagtttccctcctacctatcgtgctattggtaggaatgttatttgccaccatacatacattcggaagtgacgcactggaaggaggtagccagatttccctactgaccactactgctttttgcgtattcataggtataacattctaccgtgtcccctggaaagattacgaactcgctattacaaataatatttcaggagttgctacagcaattattatcttgctgataataggtgcactgagcggtgcatggatgataagcggcattgtccctacccttatatattatggtatgcaaattattcatcctgacttttttctggcatcaacctgtatcatctgcgcactaatctctgtcatgacggggagctcgtggacaacaatcgccactatcggtatcgcactgatgggtattggcaaagcgcaagggttcaacgaaggatggatagcaggagctattatctccggagcatattttggtgataaaatctccccgctgtcggaaactacgatacttgcttcctccataacagacgtgcccttgttccggcatatacgctatatgttaattacaaccactccatcgttgattatcacactgattatctttacagtaatgggattcgtcatcgaaacaaactctacagcgcacatggcggactttgccacatcactgaaagataccttcacaatcactccctggttactgattgttcccttggtaaccggaatacttattgctcgaaaagttccgtccatcattaccttgttcatatctactatgctggcaggtatttgcgccattatcttccaaccggatttgctacgtgaaatagcaggagaaaataacatcttcaaaggggtaatgatgacattctacggaagcaccggtctggataccggcaacagtatgctgaccgaccttgtgtctacacgtggcatggctggcatgatgaatacagtctggttgattctttgcgccatgtgtttcggaggtgccatgacagcaagcggtatgctgggtagtataacttcagtctttgtacgtttcatgaaaggaagagtcagcgttgtagcatccactgtttgctccggactgtttctcaatctgactaccgccgaccaatacatcagtattatcctcaccggaaacatgtttcgcaatatttatgagaaaaaaggatatgagaaccgattattgagccgtactacggaagatgctgttaccgtgacctcccctctgataccctggaatacctgtggaatgacgcaggcaacgatattgaacgtatctacgctgacctatcttccttattgctttttcaacattatcagtccattaatgagcatcctcgttgcggccatcggatataaaattgtgaagcgtcccgtgaacaatcccgaataaaggttgttttgcaataaacgaacaagaatcgtaaaacctaaacattaaagaattatgaaaaagtttattgcattagtagcattagtgatgatgagtgcggcaacaaccgccatgtatgcacaagaaagtagagcggaacgccgcgcagaccgtaaggctcaaagagacgctgaacgcgcccgcctgaaagctgaagaacaagtagccgacgcagtatcgtatgatgacgctgtagccgcattgaaagcccaccaattcgtactggaagccgaccaggtgatgttccgtaacggacagacagctttcgttaactctaacaccaacttcgtactggtaaatcaaggacgtggtaccgtacaggtagcattcaacacggtatatcccggccctaacggtatcggtggtgtaactgtagatggttctacctcggatatgcagattacaactgacaagaaaggtaacgttaactgccagttcagtattcagggtatcggtatctctgcacagattttcatttcgctgactaacggtggaaacaatgctaccgtaaccattagcccgaatttcaactccaatacgatgacgctgactggtaatctcgttccattaagccaatccagcatctttaaaggacgttcttggtaaagccctttacaatatatatatttccactccgctgcaaattgccagaaatgtgtacatttgcagcggagtttttatatttttgcatccaaatatgagagaatttatcattgcagacaaccaggacatcaccaaagcaggtatgatgtttctactcagtagtcagaaagacacagccttgttactggaagcagataacaaagccgaattagttcagcaactgcgtctgcatccgcaagcagtagtgatactggactatacgttatttgatttttctggtgcggatgagttaattgtcctgcatgagcgttttaaagaagcagactggctccttttctctgatgaattgagtatggaatttctccgacaagtattattcagcagtatggctttcggagtagtgctaaaggataattcaaaagaagaaatactatcggcattgcaatgcgcttcgcgaaaagaacgttttatctgtaatcatgtcagtaatctattgctgtccggcagcaatgcatctcccgtacgccacacgctgaaagatgatttactgacacctgccgaacgaagtgtactgaaagaaattgctctgggaaagactacgaaagaaattgcggcggagaagaatcttagctttcatacggtaaacagccaccgcaaaaacatatttcgtaaattaggagtgaataatgtgcacgaagcgacaaaatatgctatgaaggcaggaattgtggatttagtggaatactatatataaaaagactattcaaataccaatctctccactgccgatacatattcgggaagcttcatcatatacgacaccgaattgtccgggagcaataccctgcaaattttcagaagatacaatacgatagatctccccttcccgtatcagttttcctttcataaattccggtgtatggcggattttaaaagttacatcgacttcctgattatgtaaccagggattttctgtaatgaaatgaaaatcatgaatcttaaattcacgcccgtactgccattgggtgtcatatccccgtgagacataaagaacatttgcctcaacatctttccgaatgacaaaccaaggaccaccactcaatcccaatcctttgcgctgtccgatggtatgaaaccagtacccccggtgtgtaccgattttctttccagtctccaattctataatatctccttgccgctcaccaaggaaacgacgcacaaagtcattgtagttaatctttcccagaaagcaaataccctgactgtcacggcgacgggcagtaggcagtcctgcattgcgggcaatgtcccgtacttcctgtttcatcaatccaccaagggggaacatcagtttggagacttgcaaataatcaatctgcgcaagaaaatcggtctgatcctttactggatcgacagctgtgcccagccataccttaccatctttatggaccgtagtggcataatgaccagtagcagtaaaatcaaactctttgcctaccttctgttcaaagcaaccgaacttaatgaagcggttacacatcacatccggattaggagttaatccacgacgaattttatcaatggcataagcagcaacttgttcccaatattctttctgcaaatctaccatttccaaaggtaatccgtaacgatgtgcaatagtcgtagccatctcccaatcttcttcagcagaacaatccatataatcggtgtcgtccattcctatcttaatataaaacagagacggccgatacccttgctcacaaagaaggtgtacgacaactgaactatcaacacctcctgataataaaacagatatattcattcaaaacagtttagaatattacttacaataaataaatattagaagcacaattgtatatttagcctatctcagtcgtatacttagggtacctcagtatcatacttaaggtatctcagtataggactgagataggaacattataacagcactgataaccaagcaattacaaacctccctttcaacattaataaatcagaacaaacaatcggaaaaaaataagaaatagactcattactgtagggttatgagttaaatgataaataatcttttagacgcggatgacacggatgacgcggatcttt

SEQ ID NO: 6312 - DNA, 47287 bp, Unknown
  gut microbiota DNA sequence
ttgtgagtagttaaatcgtaaaattataaataagattatgttattaagaattgcagtacaagctaaaggtcgtctttatgacgagacgatgtcatttctgggagagtcggatatcaaattgaatgcagtgaaacgttcattgctggtacaatcgtctaattttcctgtagaggtattatttttgcgtgatgatgatattccgcagtcggtggcaacaggtgtggcggatataggtatcgtaggcgagaatgaatatgtggagaagaatgaaaatgcagagattgtaaagcgtctcggattcagcaaatgccgtttgtcactggctattccgaaggatatcgaatatccgggtgtgcagtggtttgaaggaaggaagattgcgacgtcgtatccgggtatcctcagtacattcttgaaaactcagaatgtgaatgcggagatacacgtgattacaggttccgtagaagtggcaccaggtatcggattggcagatgcgatttttgatattgttagttcgggttctacgttggtgagtaaccggttgagagaggtggaagtggtgatgaaatcggaagcactgctgattggtaacaggaatctgtgcgatgagaaaaaggaaatcctgaaagagttgcttttccgtatggatgctgtgaagacggcggaagataagaagtatgtgctgatgaatgcaccgaaggaacgtttggaagagattatccaggtgcttccgggtatgaagagcccgacggtgatgccgttggcacaggagggctggtgctcagtacatacggtgctggatgaaaagtgcttctgggagattataggaaagctgaagtcgctgggggcagaaggaattttggtgctgccgattgaaaaaatgatattgtgatgtacttttcttttgtcttgagacaaaagaaaagataccaaaagaaaaactcaaggctgcacttccggagctactccggtagcattttcagctaaagggcaggaactcgctacgctcaaacagcctgcccttcttgacgctgaaaatactacctgcgtttgacgctcctacagtgaggccggagaccattcggagtgatagtgtaggggtgatggtgtagaatgaatataaaaaatggaatagggtatgaaattaataaataatccggatagatcacaatgggcggagatactgaaacgtccggtgatgaatactgagaatctgttcgatacggtgcgggggattatagaccgcgtgaagtcggacggtgaccgtgcggtgctggagatggaggcgaagtttgataaggcggagttgacatcgctggcggtgacggaggcggaactgaaagaagcggagacgctggtggatgaaaagctgaaggcggctatccgtctggctaaacagaatatagagactttccatgctgcacagcgctttgagggcaagaaggtggaaaccatgccgggcgtgacgtgctggcaaaaggcggtggctattgaaaaggtgggattgtatattcccggaggaacagctcctctgttctctacggtgctgatgctggctgtacctgcaaagattgcgggttgtaaggagattgtgctttgcacaccgccggataaagaaggacgggtgcatcctgctattctttttgctgcacaggtggcaggggtgagccggatattcaaggcaggcggcgtgcaggctattgcttcgatggcttacggaacggaaagcgtgccgaaggtttacaaaatattcggtccgggaaaccagtatgtgacagcagcgaaacagttggtcagtctgcgtgatgtggcgattgatatgcctgccggtccatcggaagtggaagtgctggcggatgaaacggcgaatccggtatttgtagctgcggatctgctgagccaggctgaacacggtgtggatagtcaggcgatgctgattaccacttcggaggctttgcaacaggctgtgaaagaggaggtagaacgtcagttggaacttctgccccgtaaggaaattgcggagaagtctcttgccaacagtaagcttattgtggtgaaagatatggaagaggccatcgaactgacgaacgaatatgcgcccgaacacctgattgtggaaactgcggactatatgcaggtggcagaacgtgtggtgaatgcgggctccgttttcttgggatcgctctcaccggaaagtgcgggagactatgcttcgggaacgaatcataccttgccgacgaacggatatgcaaaagcttatagcggtgtgagtctggatagttttatccggaagattacgttccaggaaatccgcccggaaggtatgaagaatatcggtcctgctattgaagagatggcggcgaacgaacatctggatgcgcataagaatgcggtaacagtgagattaaaaacaatatagaatgcaaattacacggattacacgagtaagggtaaagatgaaatttgtgtaattcgcgtaatcagtgttcaatactttatcatattatagatcatgaaaacattgcaagaactgacccgtccgaatatctggaagctgaaaccttattcttcggcacgtgatgaatataaaggtgtaacggcatcggtatttctcgatgcgaacgagaatccgtacaacctgccgcacaaccgctatcccgacccgatgcagtgggaattgaaaacggaactttccaagataaagaaggtgtctcccgagcatattttcctgggcaatggcagcgacgaagctatcgacttggtcttccgtgctttctgtgagccgggagtggacaatgtggtggctatcgatcccacttacggcatgtatcaggtgtgtgctgatgtgaatgatgtggagtatcgcaaagtcctgctcgacgagcatttccaattctcggcagataagttgctggcggctgcggatgaacggacaaagctgattttcctgtgctcgcctaataatcctaccggaaacgatttgttgcgtagtgagatagagaagttgctgcgtgagtttgaaggactggtgatactggatgaggcgtacagtgacttttcagaatccccatcgttcttgctggatttagataaatatccgaatcttgttgtgttccagactttttctaaagcatggggctgtgcggctatccgtctgggaatggcgtttgcttctacggaaatcatcggtatcctgagtaagataaagtacccttataatgtgaaccaactgactcagaaacaggcaatagagatgttgcataagtactatgagatagagcgttgggtgaagaggctgaaagaggaacgcgagaatttggagaagcgtttttccgaactgccgttgacggtgaaagtatttccgtctgatgccaatttcttcctggtacgggtgacggatgcggtgaaaatctataattatctggtaggagaggggatcatcgtccgcaaccgtaattctatatcgctttgtggcaactgcctgcgtgtgacggtaggaacgaggatggagaatgataaactgatagaagcattgaaaagctatgagtaagaaagtattatttatagaccgtgacgggactttggtgattgaaccgcccgtagattaccagttggattcgctggaaaagttggagttttatcccaaagtgatgcgtaacctcggcttcatccgtagcaaattggatttcgagtttgcgatggtgaccaatcaggatggattgggcacggcatctttcccggaagaaactttctggcctgcgcataacctgatgatgaagacgctggaaggtgaagggattacgtttgatgaaatcttcatcgaccgtagcatgccggaagatatggcacctacccggaagccgcgcacagggatgttgacgaagtatctgaataatccggagtacgatcttgccggaagtttcgttatcggtgatcgtcctacggatgtggaactggctaagaatctgggatgccgggctatttatttgcaggatgatactgcattgctgaaaccggaatcagaaggtggagctgctgcctgcgaaggtttggaagaggtatgtgcccttgtcacgaaagattgggataaagttgccgaatttctttttgccggagaacggaaagcggaagtacgccgcacaacaaaggaaacggatattttcgtgtctctgaatctggatggtaacggtgcctgtgacattcataccggactgggcttcttcgaccacatgctggagcaaataggcaagcatggcggtctggatctgacaatccatgtgaaaggtgatttggaagtggatgagcatcacaccatagaagacactgcgattgcattaggcgattgcatctatcaggcattgggaaacaagcgtggcatcgagcgttatggctatgccctgacgatggatgactgtctttgccgggtttgcctggacttcggtggacgcccctggctggtatgggatgcagaattcaatcgtgaaaagataggtgagatgccgacagagatgttcctgcatttcttcaaatccctgagcgatgccgccaagatgaatctgaatgtcaaagcggaaggccagaacgagcaccataagatagaaggtattttcaaagcgctggcccgcgctataaagatggcggtgaagagggatatctatcactttgaattgccgagttcgaagggagtgctttaattagtgattagggggtagtgataagtggttagtgactgcgctgtaacgccgcatggtactaatcacttatcactaccccactaatcactaattaccgtccatttctgaacatccccactgtccgataatgaacacccacccctgcccagaagcatcctggcgctttggcacgctctttgcttttctgtttacaactattttttgataaacatgaaaaggaatattttactcgcagcttggatgctatttccgttcgccgcttttgcacagaacgatacattgacaaacgaacgtgaacgtctcatcactttaaatgaagcgatagctttggcacgtacccagtctgtggatgccgccgtagcgctgaatgaattgaagacttcatactgggaatatcgtactttccgtgcagacctgttaccggaagtgaatctgaatggtactttacccaattacaataaatcttacagcagatatcaaaactcggatggttcctactcatttgtgcgtaacaatacgctgggactttccggaacgctctccatagaccagaacttatggtttacgggcggtaaactgtcactggcttcttctcttgaatatatcaagcaattaggatccggaggagataaacggtttatgtccgtccccgtcagcctggaattgtcgcaacctattttcggagtgaacaatctgaagtggaaccgtcgtatcgaaccggtgagatatgcagaagcaaaagctgcctttatcactgctacggaacaggtaacgatgaagacaatcacttattttttcaatctgctgctggcaaaagaaaatttgaaaactgctcaccagaataaagtgaatgccgaccgcctctatgaagtagcagtggcaaagcgcaagatggggcaaatttctgaaaatgacctgttgcagttgaaactgaatgctttgcaaggtaaggcggatgtgacggaagcggagagtaacctgaatgcgaaaatgttccagttgcgttccttcctcggtttgtcggaagatgagaatctgaatccgatgttgccgaattcggcaccggatatgaagatggaatataatcttgtattgagcaaggctctggatcggaactcgtttgcacagaatatccgtcgtcgccagttggaagcggactatgaagtggctacggctcgcggcaatttgcgcagcatcgacttgtttgccagtgtgggttatacagggcaggatcgtgatttgacttccgcttacaaggggctgcttgataatcagattgtgcaggtaggtgtgaaagtacctatcttggactggggaaaacgccgaggaaaagtacgtgtggcaaagagtaaccgtgaagtggtgctttccagaatccggcaggaacagatggacttcaatcaagatattttcctgctcgtagcgaacttcaataatcaggcacaacaattgggtattgcacaggaagctgacggcattgccgagaaacgttataaaaccagtgtggaaacctttatgatcggacaaatcagtacgctggatctgaacgacgcacagaaatcaaaagatgaagcaaggcagaaacatatttccgagctctattattattggtactatttctatcaaatccgcagtctgacactttgggattttgaacggaattgtgaactggaggcagactttgaagaaattgtgagagactgagtttgagttatgagttatgaataataacttataactcataaccgtttttcgcttgttattgaaaaaaacagtgttattctgtgctttctgtgtgaaatcgtttatttttgcaaaccataaaacaacgaaatcttatgatactgataatcgacgatgatagtgccgtacgttcttccctcagttttatgctgaaacgtgcaggatatgaagcgcaaactgttcccggaccgcgcgaagcaatggatgtggtgcgtgccgaggcacctgccctcattttgatggacatgaacttcaccctttccacaacgggagaagaggggttgactttgctgaaacaagtgaaaatattccgccccgatgtacctgttatcctgatgacggcgtggggaagtatacaacttgccgtgcagggtatgcaggcgggtgctttcgactttatcacgaagccgtggaacaatgccgctttgctgcaacgtatcgagacagcccttgaactgactgccgtcccgaaagatgcaccggaagaacagagcgagacgctgaaccgcagccatatcatcggaaaatctcagggattgatggaagtgctgaatacggtggcacgcattgcgcgtaccaatgcctcggtgctgattaccggtgagagtggaacggggaaggagttgattgccgaagccatccacatcaacagccagcgggtgaaacagccgtttgtaaaggtcaacttgggcggtatctcgcagagcctttttgaaagcgaaatgttcggtcataagaaaggggcctttacggatgcgacaacagaccgcgtaggacgctttgaacttgccaacaagggtactatctttctggatgaaatcggtgatctcgatccttcctgtcaggtgaaactgctccgtgtattgcaggatcagacgtttgaagtgctgggtgacagccgtccccgcaagacggatatccgggtggtatccgccaccaatgccgacctccgcaagatggtatcggaacgtacgttccgcgaagatttgttttatcgtatcaacctgataaccgttaagttgccttcccttcgcgaacgccgtgaagatattcctttgctggcacgccactttgccgaccgccaggcagagcttaacggactgccccgcacggaattctcggcagatgccttgaacttcctttcccgcttgccttatccgggaaatattcgtgaattgaagaatctggtagagcgtacaattctcgtcagcggaaagtcgacgctggatgcttcggatttcgacgcacaatatctgcgtcctaatgaaccggtgaaggcttcggacgcatcgtctctggcaggcatgacgctggatgaaatagagcgtcagactattttgcaggcgctcgatcgccataagggaaatctcagtcaggtagctatgacgctcggcattagtcgtgccgcgctctatcgccgactggaaaagtttaatataacagtcacagaaaagtgagaataaagttctatttctccatacttgtccttttccttctgggtttaggtggtgtgcttctctacttggcaaaggggatgaagccgttgcacctttacattgtagagggaatcattgcatttatcctggtgttcctgtttatcttctatcgtaagattgtgaaaccgatgaatattatcggcagcggtatggaattgctgcgcgaacaggatttcagcagcaggcttagcaaagtagggcaatacgaggcggaccgcattgtaaatgtgttcaaccgtatgatggagcaattgaagaacgaacgtttgcgtctgcgcgagcaaaaccatttcctggacttgcttatccaggcttcgccgatgggagttgtcattaccacactgaacggtgaaatatcccagcttaatccgatgggattgaagatgatgggagtacgtctggaagagattatgggaaagaaaatagagaatatagactctcctttggctgaagaactggcgaatatctcaaaagatcagacggcagtggtgcgtctgaatgacgcgaatatctataaatgtacccattcctcctttatcgacagaggttttcatcatcctttctatctgatagagaagatgacggacgaggtgatgcgtgctgaaaagaaagcgtatgagaaggtgatccgcatgattgcgcacgaggtgaacaatacaacggcgggtattacatctaccctcgataccgtggagcaagccctttccaccgaagaggatatggaggacatctgcgatgtaatgcgcgtttgtacagaacgttgcttctctatgagccgctttatcacccgttttgccgatgtcgtgaagattcctgagcccgccttggttacgggcaaactgaatgaactggcttccatgtgtaagcgctttatggagggtatgtgcaacgaccggaatatccttctctggctggaatgtgatccgaagttggaaccggtacgctttgatgcggcactcttggaacaggtattggtgaatattatcaagaatgctgcggaaagcatcgaacatgcacccgaaggaacgatccagcagggtagggttgtagtccgtacaatcgctcctaccacgattgaagtggtagataatggccccggtataacaaaagagactgaagcaaagctcttcagtcccttcttttccaccaaaccgaacgggcagggaatcggtctggtgtttattcgcgaggtgcttacccgtcatgggtgtacgttctctttgcgtacgtacagtgatgggttgacacggttccgcattatttttccgtagtctttttccacgcctttgcgtattcgtcaagaatccgcttgatgccctggccgatgaccacatagtccttttcgttcaggttggcaagcgaggcgcgtatgctccattccggaccatcgaaaccaccgccgttcagcaggacgagagacgtttctttcgccaggcggaatacgacgttcagcgggctgtaggtacgtttcaggtattctacgaaatcatctccatagaatttctttgcccataccagcatgtcgatctctgtataataccctacgcggagcggatcttttatcaatgtgaatcccgtgttatcccacaaggcatgcagacgcttttcaatgatttccatcatcttcagtttatatttgttttccttatccagcagggcgaaggaagcgaataaactcatttgcatctgttggggcaatgacaggccagcggtatggttcagtgcaacctgtcggctgtcggctaccatgcggtcgatgaacttcattttttcgggatgcagagtcaggcttgagtaacggcggttcagtgcattgcgtttatcttccggcaggcgggcgatttgcttgtcgtagatgttgtcttcgtgcagggcgatgacggcatcacgccaaccggtagctccgaaatatttggagaaggaatagacacaaagcgtattgtgcggcagttcagccatgaatgagcggaagtgtgggctgaatgtgccgtatacatcatccgtgataaccatcaggttggggttatcattctttacgatatcgacaatgcgtgccatcgtctccgggctgagggcgtaactgggcggattgctgggattggtcacgaagagcgctttgatggcgggatctttcaggcggtcgatgtccttgtcattgtattgccagaggtggaatccgtcgtccgtcatgcggtcggcatgcagttctatcatgttgaactggtagcgactcagttgcggaatttcaatgtagggggtgaaagcgggcaccatcagggcgatgccgtcacctttatccagcaggaagttctcctggagggagtcgaagaggtaacacatggcggcggttccgccttcggtggcaaagaggtcgaatgtgcctcgtggagggcggttatcacacatttcttgcgacagataatcttgcaccagtatttcggtgaaatgcaggatgcggtcgggcacaggatactggtcgccgatgacggcttctgcccattcatgcaccagggagtcgggatcggcggcatgttgcattaacaggtagttataagtttgctccaggagtttgacaccgtgggcggcgttgttctttttgaggaaggcttcgaaacgggaggcaatgccttctttttgagggatgccggcgatgccttcggggaggttcatgacgcggcgacattcttccagtccgaactgtcccaggaggaagaaggcttcgcgaggggtggtagctatccagttagggttaccacgtccggcgttcagcatcgtgcgggcagttttcttcaggctttcatcggccatatcgatcaattggtttttcagctcgaatgggctgatcgtttccattttcttttctaagtttttggtatccatatcgttaagttttaattgttatcatataatcttttggttcaataaactaatcctgggaatgtgataaactaactctcgggatgcaagaatctattttcggaaatgcataaaattattcatactataattgtttttgtatcttacaacagatgtgttactttcttacgatagatatgtttatttcttacaatagctgttgtaagaataataatatgcattttgaagattaattcttcgcatagcggtgattagtttcttgcatacggtatatcatatgctatatccgctaggttaaatcagcagtacgatgacgacaccccatattattaataaggtgttgcccacagcatacgttaccgtataacccagcgcaggcgtttcgctttccaccgcatcttgtattgctcccagtgcggctgtcgttgtacgtgctccggcacagcatcccagtgttattgcagggtggaacttgaagacgtacttacccagtagcaaaccgatgattaacggcaaggtagtggctatggcacctacaatgaataaactgagcccgacatcccggaaaccctgtacgaaactcggtccggcagctattcccactacagcaatgaacatattcagccctacattattcagtacccacaaggaagcttcgggaatacgtccgaacgtaggatgcttgctgcgcagccaaccgaagaataatccggctatcaatgcgccaccactcgtactcagactgatggggacaccaccgatgtggatggataatgcaccgaacaaaccacctatcagaattcctaatccaacgaatatcatatccgtttggtgggtaggtcgatccacatatcctatttgtacagcggcactttccacttcttgcttggtgcccactacttcgatgacgtcgccggcatccaatttggtctgtgccaatacgggtatttcaattcccgcacgcttgatgctgcggatgctgacaccatgcatgaatttgtgccgacggatattcgccactgtctttccggcgaacgttttctttgtgaccgtgacaggtaacgtctctgccgggaaatcgagcaattgtgcgtcctgtatttcattgcctatccagtcctcttcgccgataacgaattcacggcgtccgctgagaacgacttcgtctcctatattcaatacggtattcggggatacatcccgaacgactccttgcttacgcaggcgctctacgaacaggcgtttgccatctttctggaagtacatttccaagtctatcacccgacggccttgcttgaaccattcgttttctatcttgtaggcacggaaggttacggggcgtgcggcgtgcatgaaacccggttcgtctgcctcggaactacccattttggcttccagttctttgcaggcagcttttactttctccagtccgcccaatagttttggaccgagggaggagagtacccaggctgagcctgccgtaccgaaaacgtaagtcactgcataagatacggggatgatattgatataactttggcgttgcgcttcgtccagtcccatgtttgccatggtgtcttcggctactccgatgacggcggagatggtttgcgaacctgccagtaatccggcggcttcaccgggattgtagcccatcacgagggcgagaagccaggttaccaccaataccgatacacacatcagcacggcaaagcctacctggggaagtccgtcttttttcagtccgcggaagaactgcggtcctactttatacccgacggcgaacaaaaagagaagaaagaacacggatttgatggggcctggcacgtcgatcttcaactgtcctaccaatacgcctacaagcaatacgcttgtgaccgtccccaagctgaacttcccgatgcgtagcttgccaagccagaaccccagaaacagggtgaggaatatggcaagttcggggcgctccctgagctggtttattatccattccataattaagttgtttaggttattaattggttttcgatgcttttcgcgtcgtttaagatatatacaacagcctgcaaaaggaagtgtttcgtgcaaaagtggttttttagaacatttattcagtaaaactgaactttctaaaatagttttcttgcgtacctttgcgggcgttaaagaagaaggaatgattatttagcgaagatgggtacgcggacgacgcggatgaggcggacgaacgcggagtataagtacttttttaggcgcggattacgcagatttatttcttgatcatgtaagcgtagccttcaatccgtgaaatccgcgtaatccgcgcctaaaaaatacagcacaacgtagccttcaaaatccgtgttcgtccgcctgatccgcgtcgtccgcgtaccaattgaccccctgaattctcattcatctttcaacattataaaaataggtatgaggtttacttttttaaggattttactgttcatcagcctttgctggatgagcttccccctgcaagcacaatatgtggtacaaggtgttgttacagactcgttaacccgtgagcctctcccatatacatctgtgtatctgaaaggtactaccgaaggaggtatgaccgatgacaaaggacagttttctttcaagacctaccgcccccaagccgtgctggttatttctgccattggatataatgaatacacccgtcttattcatccggcacaaggtatccgtcttaccatcgccctttcgccggcaacgtatgccctgaatgaagtggtggtaaagcccaaacgggagcgatataagaaaaaagataatcccgccgtggaatttgtacgacaaatgatagaacatcgggatgactattcgcccaaagagttggacttctggcaacgggatcgttatgagaagatgacctttgccatcaacaacttcgacagcgtaaagcagcagaagtggctttatcgtaaattcaagttcctgacggactatgtggatacttccgccgttacgggaaagcccgtgcttgccgtctccaaccgtgaactgctggctacggactattaccgcaaatctcccaaaagtcagaaacagcgcgtacatgcccgccgacaggctggtgtggatgagatgctttcgcagcaaggcatggagcaagccatcagtgtgacgatgacggatgtggatatttatgagaacaacatcacgctgtttaccaataagttcgtaagcccgctctcttcactgggcccttcattctataaatattatctgatggatacgcttacgatagcgggccaaccttgtgtggacctgacgttcgtacccttcaattccgaatccttcggttttacgggacacttgtacgttactttggacagtacttatttcgtacgtcgtgccaccatgaactttccacagaaaatcaatctgaattttgtggattatatgtctcttgaacagaactttactcgtggggcagacggtacgcgccagttggctgacgaacatatcaccaccgaattcaagctggtggacaacagtgacggtatctatgccaagcgggatgtatattacaggaactatgtgtatgaaccttctgcggatgccctttcggcctttaagaagccggaaaaagtgattgagccggccgaagcaacgcatcgcacagaagcttactgggacgataaccgtcaggtggaagtcagcaagaaggaaacttccgttgataaaatgatggcgcagcttcgcacgtatcctgtctattactggacggagaagaccttgaaagtgctgtttaccggatatatacccgcgcctaaagagaaagaacccctgttctatataggtatgatgaataccaccataagcggtaatacgctggaaggtgtacgtctgcgtgcgggaggtatgactacggcgtggctcaatccacacctattctataaaggatacatggcttacggtttcaaagaccatcggatgaagggaatggctgaagtggaatattctttccataagaagaaggagtatgccaatgagtttcctattcactctttgaaagcacgatatacctcggatgtaaaccaatacgggcaacattacctttataccagtcaggacaacgtatttctgagcttaaagcgccagaaggacgaccggataggctatcagcgcaaggcggaactgacttacaccaatgagttccattccggtttttcctttcagctcacttcccgctttcggcaggatgagtcttcgtatcttatccctttcctgaaacaagatgagatggcaacgcccgtgaagaatatatcgaataccgagtttgaagtaaaattgcgttatgcgccgaatgaaaaattctttcagacgcaatggaaccgctttccggtatcgctggatgctccggtcttctcactttcgcatacgatggctgcaaaaggagtgttgggcggtgattatacctatcaatatacagaggcaggttttcagaaacgtttctggttttcggccttcggctatacggacgttatcctgaaagccggaaaagtttggaataaagtacctttcccgttactgattatcccgaacgccaacctctcttataccattcagccggagtcttactccctgatgaatgccatggagtttatgaatgatgaatatgcttcgtgggacgttacttactatctaaatggctttttgttcaaccgcgtacctttgctgaaaaagttgaaatggcgtgaagtcctttcgtttcggggattgtacgggaatttgagcgacaaaaataatccgacagtcagcaatgacctttttcgttttcccgtcacaacctcttatatgggggataccccttatatggaagtgggtgtcggtgtagagaatattttgaaggtaatccgcctcgactatgtatggcgattaacttacagaaatctgcctggaattgataaatccggtcttagaatcagtctgcacatgacattttaacttaaatcttactaacagaacattaaatcggataaaatgacgagtctcaattgaacaaaatagcctaaatttgagcaattttttaaactttaaaagatacaatggcaatgaaagaaaacattaagccggcaactggtcgtttgggtgtactggtagtcggagtgggtggcgcggtctcaaccaccatgatcacgggtacattggctgctcgtaagggactggcaaaacctattgggtctattacacagatggccacaatacgcatggagaacaacgacgaaaagctgattaaggacgtagtgcctttggcagatttgaacgacattgttttcggcggatgggatatcttccctgataatgcatacgaagctgcgatgtatgcagaagttctgaaagagaaagatttaaatctggtaaaagaggaattgcaagccatcaaaccgatgcctgctgcctttgaccacaactttgcaaaacgtctgaatggtacatacatcaagcaggctgccacccgttgggaaatgatggagcaactgcgtgaggatatccgtaacttcaaggctgccaacaactgcgagcgtattgctgtgctgtgggctgcaagtactgaaatctacgttccgttgtgtaaagaacacgagtcgcttgctgctttggaagaagcaatgaaggctaataatacggaagtgatttctccgagtatgtgctacgcttatgctgcaattgcagaaggtgctccgttcatcatgggtgctcctaacttgtgtgtagatactccggcaatgtgggaattctctaagaagatgaatgtgcccatctccggtaaggacttcaagagtggacagacgctgatgaaaacagtgctcgctccgatgttcaagactcgtatgctgggtgtaagcggttggttctctaccaacattctgggtaaccgtgacggcgaagtgctcgatcaacccgaaaacttcaaaacaaaagaagtcagcaagttgtctgttatcgataacatcttcgaaccggaaaaatatcccgacctctatggtgatgtttaccacaaggttcgtatcaactactatcctccccgtaaagataataaggaagcatgggataacatcgacatcttcggatggatgggttacccgatggaaatcaaagtaaacttcctgtgccgtgactctattcttgcagctcctattgcactcgacctcgttattttcagtgacctggcattgcgcgcaggtatgtctggaatccagacttggttgtcattcttctgcaagagcccgatgcacgactttgagcatgaaccgatccatgatctgttcactcaatggagaatggtgaaagaaacaatccgtacgatggtgggtgaaaaatcaccgagctatctggattaataaataataataaggtgataaggtggtagagtgataaagtggtgatgtagtattactttaccgctttaccactttgtcaccttatcactcttttatatcttttttctatgaggagaccttccttcttccctgtcctgataggcacgggcttcggctcaggcttttctccctttgctccgggcacggcgggcgctttactggctacgctaatatggttcggactttctttactcatatcagaaacttgtctgttgtggacgactgtcgcattgatatccctgttcaccgtagccggtatttgggctaccgaccgtctggaaccctactggggtgaagatccgtcgcgcgtggtggtggatgagatggtaggtgtgtggatcacgctcttggcagctccggcaggtcatatctggtatggattggcagcatttgttttgttccgcttctttgatattctgaaaccgctgggcatccggcggatggaaaatctgccgggcggagtgggagtgatgatggacgacgtattggcaggagtgtatggtttcattgttttaattgtggcgagatggttgatggagtagaagaacagagtcggtttgctggttggcgcagggaagtgtggctttttatgaaggcgcagctttctgcacagatagctacggtgatcgattttctgataactattcttttggtgaaattatttggtatatattatttgtatgccacatttataggttctgtggttggcggtattgtcaattgtgtaatcaactatgaatgggtatttaaggcggaagactgcaagaaaatacatgtggggctgaagtatttcatagtctggggtgggagcatccttattaatacatggggtacttttgctttgacggaatggctggcaggaatgaaatgggtgaacgggttgctgggatattacgtctatgatgtgtttatcctgtctaaaattacggttgccttgctggttgcatttttctggaactattatttgcaacgggttttcgtctaccggaaccacaacttaaaaagatttctgaaacaacgtttggagaaaaaaatagaatgaacatgaattacagagattggctgcaacaggtgatatacaagattatcaatcccgttgtgcgtggcatgattaaaattggcattacgcctaactttattactactaccgggttgatacttaacattgtggctgccggtatatttatttatgcagggttagtgacagattcggaagaggatctttctttggtgggatggacaggcggactgatactcttcgccgggctgtttgacatgatggatggccgtgtggcgcgtcttggcaatatgtcttccaccttcggggcattgtacgattcagtgctcgatcgttacagtgaactgtttaccttgttcggtatatcctattatctcatcttgcagggctatttcgtgggttccattatcacttttcttgctttgatcggttcgctgatggtaagttacgtacgcgcacgtgccgaaggtctgggactggaatgtaaagtaggtattatgcagcgccctgagcgagtggtgctgaccagtctgggagctctgttctgcggtatattttccgattgcacactcttcgacccgatgttgattctgattgttcctatggcaatcattgccgtattggctaatctgacggcttttgtccgtctggcacattgctataaacttttgaataaatgataaatagatatttccctccggtgagagagacagtattgctggtagtcattacgttggctttcctgttgctgacagctacttgtatcgggcttcgtacggagcattttctaatgacgggcttgttcctggttctgttttttgcaggaaagacaacccgtaagctggcagtggctttactgccttttgttgtttttgcagtttcctatgactggatgcgggtgtatcccaattaccaggtgaaccctattgatgtgcagggcttgtatgaagcggaaaagtctcttttcggtatatccgtgaatggagatacgctgattccttgtgaatactttgccatacatcactggccggtagccgatttctttgccggagtgttctatctctgctgggtgcctgtgcctatagctttcggtttgtggctttatctgaggggagatcgccagatgtatcttcgttttgctatggtcttcctgctggttaatcttattggctttgccggatattatattcatcctgccgctcccccttggtacgctatgaactatggatttgaggcgatgctggatactccgggaaatgtggccggactgggacgctttgacgaactgctgggatgcacgatcttcaactctatctatgggcgtaatgcaaacgtatttgcagccgttccttcgctgcatgcggcatatatggttgtggcattggcttatgctataatgaatcgctgtaagggctggctgatagcattatttgcgtttattatggtgggtatctggtgtacggccgtttattcgggacatcattacctgattgatgtattattgggaatattctgtgctctcctgggtatctttgtctttgaaaaagggttgatgaaatggggggcgttcaagcgcttcttcgaacgttatagtaaatatatccgttaatgaataatttcgtcttttacagtcctaccgaatttgtattcggtaaggctacggaaatgcaagtcggtgcactggcgcggaagcatggtgcgcggaaagtgatgatcgtgtacggcggcggctctgttgtacggagtggtttgctggatagggtgaagcaatccttgcaggaagcagggattgaatattgtttgatgggtggcgtgcagccgaatccggtagatacgaaagtgtatgaaggcattgaattctgccgccgtgaacaggctgatatgctgttgcctgtgggtggaggctctgtcattgatacggccaaagccatagcggcaggtgtgctttatgagggtgacttttgggatttctatatcggaaaggctaaagtgactaaagcgctgaaagtagctgttgtgctgactattcctgctgccggaagtgaaggttccggtaatacggttataacgaaactggacggtttgcagaaactcagtctgcgtgtaccggaagttttgcgtccggtattctctattatgaatccggaacttacttatactttgccgccctttcagactgcctgcggtgtggctgatatgatggctcatatcatggagcgttattttacgaacactcaggaggtggaaattggagatcgtctttgtgaaggcactttgatggctatcatcaatgaagctcccaaggtaatgagaaatcctgaagattatggtgcgcgtgccaacttgatgtgggcgggcatgattgcgcataatggtacctgtggcgtaggttgtgaggaagattgggcttcgcacttcctggagcatgagatcagtgctatctatggtgttactcacggtgctggattatctgttatcttccctgcctggatgacgtggatggtagagcataatgtaggaaagattgctcaatatgccgttcgtgtatggggcgttcctgaatcagaagataagaaagcggttgctttggagggtattggtaagctgaaaaccttctttacttctcttggtctgcctgtgacatttaaagaactgggtgttgaaaatcctgatattgaccgtctggcggatagtctgcatcgcaataaaggagaattggttgggaattatgtgaagctgacaaagcaggacagtaaagaaatttatcaccttgcatgtgtaggggagtgatgttcgcttctgtatagagggtgagtttcttttagatatcggccaatgattttgaaaagttggtgaggaaaacaaaaaagacggcgaagtttctgatttacttcgccgtctttcttatttaatttcgaattcttccttcatgtcaatctcttccccttgcgggtcgtagaatacatattccaggaacgcgagtttctggcttggaataatcttgataccaaatccgtatttcatctgccatttccgtttcagggaaacgagtccctgattgatgtaagcagcaatatacgggtggatgtgtaacgagaatttcttaatcttcagtttgttgactaagtagtcaattttactctctaaagtgtccgtaaagaggatagaggacttgatggtgccttttccgaaacaggtgggacagatttctgtggtattgacatccattgccgggcgcacacgctggcgggtaatctgcatcagtccgaatttgctgagcggtaggatgttatgtcttgccctgtctttctgcatgttggcacacatacgttcgtaaagcttttgtctgttttcggcttcgttcatatcaatgaagtccaccacaatgataccacccatatctctcagtcgcagctggcgagccagttcatcggcagctcccagattcacttcgagtgcgttggcctcctgcccgttggcattcttggtgcggttaccgctgttcacgtctactacgtgaagcgcctcagtatgctcaataatcaggtaggcaccactcttgtatgaaaccgtcttgccaaatgaagacttgatctgcttggtgataccaaaattgtcgtaaatggggagttgtcctttatacagttttacgattcctgcccggtcaggagcgataagagttacgtaatccttgatttcgtggaacacagcttcgtcattgacgtggatgttctcgaaagaaggattgaacaagtcgcgcaataagcctacggcacggctggtttcttcgtaaatcaatgtcgggaatttggtagctttctgtattttggtgacagcatcttcccagtgctttaataaaactttaagctctccgtcgagctcggctacgcgtttcccttcggcaacggtgcggacgatcactccgaaattcttcggtttgatactcatcagcaattgtttgaggcgggcgcgttcttcgctcgatttaattttttgtgatacggaaaccttatcgttgaaaggtatcagcaccaaatatcttccggcaaatgagatttcggaagtcaggcgcggacctttggtagagataggctccttgacaatttgcaccactacttcttgtcccaccttgagtgtattggctacggtgccatccttttcaagatcgggaagtatggttgctttggtgatttgcggtagtttctttttatcgcttaaagtttgctttacgtacttctctaacgagttaaattgaggacctaagtccagataatgaagaaaagcatctttctcgtaacccacgtccacgaagcaggcattcaggccgggcatcaatttcttgattcgtcctaaatacatgttgcccaccgagaaagaaagatttcttccttcgctttgaagttccaccaggctcttgtcttcgagcagggcgatggagacctctttgggctgtacgtctacaacgagttcgcttgtcacaatttttcttgcttttttaggttctaaagtcagcgaggatataaatagccttgccgactacaatttgttacttaaacaaagaacaaactcgcgagacaaatagcttcacaagtttgttctttatttctgtcctccagactaaaaattactttttgcttttatgtctgttctttcttagtctttttttacgcttgtgcgtagacattttatgtctttttttcttctttccgctaggcatagcttcaataatttaataggttaatactcttgtttattatttcttcacggagatggtgaatgtttttgcaggcttaaatgccggaatgttgtgttccggaatgataatcgtagtattctttgagatattacgagcagttttctgtgctcttttcttcactacgaagctaccaaacccgcggaggtaaacattttcatcttttgataaagatgcttttactgtgtccatgaacgcttcaaccgtagtaagcactgttactttgtcaatcccggtgttctttgtaatttcgtttacaatatcagctttagtcatttttctttaaaaaaaatattattactatagtttcctaattttttggactgcaaatatatagctttttacgctctctaaaaaatatattctggacaattttctaaaaaagtcttttgattaaggtttgttgggggaaaaagaactatttttgtgctgtaggaagggctacacccttttatattagggatatagccatgaattacaaagaaggtagctgtccgaggcgaaagacgttgccctttttagacttttataactatctgtaatagagatgaatatatttagtgagaaattgatagcctggtatgccgaaaacaagcgtgaattgccttggcgggataccaccgacccttatattatatggatttcagagattatactgcaacagacccgggtagcacagggttatgattattttttgcgttttattcatcgttttcctaatgtgacagccttggctgaagcaccggaagatgaggtgatgaaatgctggcagggactggggtattattcccgtgcacgtaatctgcatgcggcggcaaaaagcatgaatggtgtttttccggctacttatgaaggggtgcgtgcgttgaagggggtaggggactatactgctgcagctatttgctcatccgcttacggtatgccttatgcagtggtggacgggaatgtctatcgtgtgctttcccgctatttcggcatcgatacgccagtggacagtacggaaggcaagaaattgtttgctgctttggcagatgagatgatggataaatcgcagcctgctgtctacaatcaggcgataatggatttcggtgccatacaatgtacgccgcaatcaccgaattgcctgttttgtcctttggtagacagttgctcagccctgaaggagggtacgataacgaagttgcctgtaaagcagcataagacgaaaaccaccaatcgttattttaactatatatatgtacgtgtgggcgcgtgtacctatttacataaacggaaggaggatgatatctggaaaaatcttttcgaatttccactgatagaaacggaagcacctgtgacggaagaagagtttcgtgaattgccgcaggtacgtgcattttttgcagatggggaggtttcgggattgcgtttaatcagtggaaatgtgaagcatgtgctctcccacagggtgatttataccaatttctatgaagttgttttaccggaaaattctacttctttttctgcctttctgcgggtgaaaatagaggatttggagcagtatgcagtctctcgcctggtgcatgcctttctggagaaatatctataaaagttgcgctaactcttgcattgtgtgattattctgtttaattttggcagcaaattcaaataaaaagaaaaggcttatgtcagtaaataaagtaatattgattggaaatgtaggtagagaccctgaagtaagataccttgattccggtatcgctgtggcttctttgcctttggctactacagaccgtgcatatacattggctaacggtacgcaggtacccgaacggacggaatggcacaatctggtactttggcgcggactggcagaaacagccgaaaaatatgtgcataaaggggataaactttatgtggaaggcaaaatacgtacccgttcatacgatgatcagaccggcgcaaagcgctatgttacggaaatctttgtggactctatggaaatgctgagtcccagaggaactgctgcaccgggtgctgccgctcagcaaccaggtatgttacaaggtgctcctgcacaacctatggcgcaatcgcaggcaacccctgcacaagataatacaacggacgatttaccgttctaattgtttaactaaaaccaagatctttggacccagacgcttatttatgccagttggcaaatgtttttaatggtatatccgtacatagccctactatttcggcaatcatcgccattgtgttggcaggcttgctgttgctcgtatccggctttgcctcagcttcagaaatagcctttttctctctttctccgtccgacctgaatgccatcgacgagaagaaacatccctcggacgagaaaattcgtaaacttctggatgacacggaaaggttgctggcaaccatcctgataacaaacaattttgtgaatgtgaccattatcatgctctgtaacttctttttcatgagcgtgtttgagtttcattctcctattgcggaatttctgatactgaccgtcatcctgaccttccttctgcttcttttcggtgaaatcatgccgaagatttattcagcccagaagacgttggctttctgccgcttttccgctccgggtatctggatgtttcgttcccttttttatccggtagcttctatgctggtgcgttccacttcgttcctaaacaagcattttgcccgcaaaaaccataacatctcggtagacgagctttctcatgcccttgaactgacggataaggcggagttgaaggaagagaataatatcctggaaggtatcattcgttttggcggtgaaacggcgaaggaggtgatgacttcccgtctggacgtagtcgatctggatattcgcacgcctttcaaggatgtattgcaatgcattatcgaaaatgcttactcccgtatccctatttattccgagaaccgggataatatcaaaggtatcttatacatcaaggacctgttgccccatttgaataaggtggatttccgttggcagtcgttgatacgtccggcctattttgttccggaaactaagatgattgacgatttgctgcgtgattttcaggccaataagattcatattgctattgtggttgatgaatttggtggcacgtcgggaattgtgacgatggaggatatcatcgaggagatagtcggtgagattcacgacgaatatgatgacgaagaacgtacgtatgcagtgctgaacgatcatacgtgggtgtttgaagccaaaactcagttgacggatttttataagattacgaaggtggacgaggaagtctttgatgaagtggcgggtgattctgatacgcttgcaggattactgctggagctgaaaggtgaatttccggccctgcatgaaaaggttacctatgatcactatgaatttgaagtcctggagatggataaccgccgtattcttaaagtgaagttcaccatcaacactcttccgtcggattccgataagaaagattgatttatagaataatatgtctcttttcatacaacatacgtatccttcatataagtggggagtctggaagatggacgaaacactggatgaattgctgagcatgcttccgcaacaggaaacatacctggagggattgcaacgtttctctgctgaacatcgtcgtttagaatggttgtcggttcgtgtgttggtattcactctattgggagaggaaaaggaaattgcttactatcccagcgggaaaccgtatctggcagataaatctgcgtcaatcagtatttctcatacacgtgggtatgtatcggtgattatcggtgaagccggtaaggaagtgggcattgatatagaacaatacggtgaacgggtacataaggtggcgcataagtatatgcgtactgatgaacctctgtcttcgtatcagggaacggatacctgggctttgttgctccattggtcggccaaagaagtgatgtttaaatgtatgaatacaccggaggttgatttccgggagcatctgcgtatttttccttttacggttactgaaaaaggagttttttcggctgaagagtacagaacaccggaacagcgtaaatttgagatccgatatctcctgcatccggactttgtgctgacttggcaagtcgattaattttaaaaacatgatactatgaaactacaacgctatttatgtccttttcttttttgcttgcctctactggtttatgcacagtcggataagactgttacggtaagctatgaacggtctgccaagggggaagtgactttctattccgaaactcagtcgcatacgccttatacggtatctatgactttttcccggctgagtaatacgacctcttctgaaggagaaatttatgatgccgttattcattatggcaaaacacgtctgttgactttgcgtccgtctacggaaaatgttccgattggattctcatatcgctatacctataaaaaaggaaatagccgcttgaagacggataccagttttgtgtatctctttcctctggcacaagggaaagtggttcgtgtgaataagatggtgtctttagataattttataggaaaggaaggggagaagcgtatcacgggacttggtttctctacgactgccggagacacgatctttgctgcccgtggcggactcgtgacggaagttgttgacaactccgcttccacttctgaaaacacatcgttccattcgacggaaaattatctggaagttttccataaggacggaacttttgcccgttataaattatttcagaatgaagggatctttgtctctccggctgaagaggtgattccgggacagccgcttggcatcattggcggagagaactacaagcagggttcccatttgcgtttcagtatttattgccccgatcggccggatcactcatatgtacctgatttttatctttttcccgaggaaacaggtaaacctgaagagcgggtgatgtataagtcctggcatcctgttgaaattatcatgaaggagatgagtaagaaggagaagaagaaatttctgtcaaaggaatgatttgttgacaaaaagacagtgaaacttttgcttaatcctgtataaatgcttatattcgacccgtagaaattcttctacgggtctttttgttaactaaatgtcaaaataataagcaagcactatggaattaccttttgcagagtcttggaaaattaaaatggtggaacccattcggaagagtacccgccaggaacgtgaacaatggctgaaagaagcccattacaatgtgttccagctgaaatccgaacaagtatatatcgatttgataactgactccggtacgggagcaatgagcgatcgtcaatgggcagcgatgatgctgggcgacgaaagttatgcaggtgcttcctccttcttcaacctgaaagaagtgatcactcgtctgactggttttgaatatgtcattcccacccatcaggggcgtgctgccgagaatgtgcttttctcttatctggtacatgatggagatatcgttccggggaactctcactttgataccacaaagggacatatcgaggggcggaaggccattgctttggattgcaccatcgatgaagtgaagaatactcagttggaaataccttttaaaggtaatgttgatcctgcgaagctggaaaaagcgttgcaggaatatggtgaccgtataccgtttatcatcgttaccattacgaacaacacggccggcggacagcccgtatccatgcagaatcttcgtgaagtccgtgctcttgcggataagtataataaacctgtattatttgactccgcacgttttgcggaaaacgcttacttcatcaaaatgcgtgaagatggctatagcggtaaaacgataaaggaaattacgaaagagatgttcgacctggcggatggtatgactatgagtgccaagaaggatggtatcgtcaatatgggaggcttcattgctacacgaaaaaaagattggtacgaaggtgccaaaggcttttgcgtgcaatatgaagggtatcttacttacggtggcatgaatggtcgtgacatgaatgcacttgccacaggactggatgagaatacggaatttgataatctggaaacccgcatccgtcaggtggaatatctggcaaagaagttggatgaatatggtattccatatcagcgtccagcaggtggacatgccatctttgtggatgcaacgaaggtactgacgcatgtaccgaagaatgaattcccggcacagactctaacggttgagctatatcttgaagccggtatcagaggatgtgaaatcggttatatcctggcagaccgtgatccggttacccgtgagaaccgttttaccggattggatttattgcgcctggctattccccgccgcgtatatacggataatcacatgaacgtgattgcagtagcgttgaagaatgttttcgaccgtcgtgaaagtattactaatggagtccgcattacttgggaggctcccctgatgcgtcatttcactgttcaattggaacgtacataactactttctttttcataatacaaatgaggttacccgaattcatgtgttgaaggggggtaaccttatttcttttatttatcttctttctcgttattcattctgtaacttaatgctcccgacgggcatttcttgatttgagcgatcaattcttccgtcgttgcattttcagccgttatccacggtttttcttttggatgatacacattcggaagggtcttggtacaaatgcctgcatgttggcacaggccgggttgccagatgatggtcacttccccgttcgtatattctttctttatattcataactatttattattgaatgtgaatacctttcattacaattcttttccattcgggatgtttgtgaatgtatcccgctacaaacgggcagagaggtactaaccttagtccttgtttttctatatcttttaatgctttttctactaactggctgccgatgcctttaccacccaattgagtgggtacttcggtgtgtgtcaggtaaatctccccattcgttgattttatatactcaatctttggagtatatttatcgacatggaactcatattggtgacgttcttcattgtcgatcagttcataatttgcttccataactcttcgtattaattgtttactgtatgtataacacgcggatgatgaaatttgttttgggaaagttacagaataaaatgtccgggcgaaatcccttcgaccggacaccattcaaataaacttggcagagtttattgttccttactttctttgaagcagagtggatgaatgaaatgatgggacgatttgcccgtttcattagactcaacgctttttcctcgaaagcagtgataaaaacagtgcatggcaggtcttctgacttgtttctgttgccaggcgccttcccggaagcggacttccagtggctattggtagtttgcctgcaacctatcatgaaacttacagcagcgggactgttcaggatttgcacctgattcccttttaattaccgtctccgaacaaagacagtaaaccaatgcatcgcaaagataaggaaaaaagtgattagtggttagtgataagtgattatttttcttttgccagtgtgaatacgaattccaatccgccaccttggttgttcttggccgaaatggtacctccatggatgattaccgagttctttacgatagccaatcccaatcccgtaccgcccagtttgcgtgagcgtcctttatccacccggtagaagcgttcgaataagcggttcagatgttcgggagagacacctacgccggtatcggcaaaactgaaatagtagaaattctcgtcttcgcggaaacaactgatattgatgcgtatatccgtgcctgcataggcaattgcattgtccatcaggttgcggaaaatggagtatagcagggaatagtttcctcgtagttgtatctttggttttagggagttgactacggtgatatgcttttcttccagttccagggatacctcgtttacgatattacctaccaacaggctgatgtctattttctccatgtcgatcatgttggcggcttcgtccatacgtgttaatacggagatgtcgcgtagcagtcggctcaaccgattgctttgagcatagcatcgctccaggaatgtctgcatcttctctcgcgaaatgttttcattgttcacgatggtttccaaatagccctgtatgctgctgaccggggtcttcagttcatgtgcgatgttctgtgtcaactggcgtttcaggcggatctgctcttcttcctgggtgacatcattgatggatatctcgaagcttaagtcttggaatataatacattccacaataaacatacgtccattcttattgatgctgatagacatacgcttttcttccttgcccggacgcttgggagtcttgttgatgaaatccgtgattttctggaactcactgatagagaatatttcctctgttgtttgtaggttggagtctgaaatcaggttgctgtactgtgtgaacaggttgttgaccaggatttctttcttgtccttgttgaatacgcccaatccttcatgcgaggtttgtaagtgggtgatcaatttctcccgttcaatgtatagtgcctctttggtttcccgcagtcgcttgtatatctggatgatatgctgtgaaatctctcccagttcgttgtgtggaaaggcagactgcatatctgtttccacaggctcattcttatcggcacgtttggcaaactcgcgtagctgattgatggctgtccccagtttagaggtgaatttatagaagatgaaaattaatagtaatgatacgatgagggtaaaccagatgtagtgctggtctgctgcaaggtgtcttgcaaggttcaggtcataggggagggcggaacgtataatgtagccttcatagagtgtggcagagtagaagtagggtactcctgttgtttcggaagtacggcgtacatcatatccttttccttctgccagtgccttttgtacttccgggcgattgacgtgattgcctaacttctgattctcgaaactgtcatataatacgtcaccctgtacgttcactaccgtaatacgtaagtcctgtttgacgtacttttgcagatatcgttccaaagtcttatcccacagactgtctggaatgtgagtaagttcctggtgtagtcgttcattatagtcctgtagctgtatatccagcagatctatcttatattctttttcacgctggtattgatatgccaggaagcatccggcaaataccagaaacagtgaaatgaccgaaagaaataacttccggctgaacgacaggaaatgtgtggcattattcagcttcgaagcagtatccatatcctaagcgagttacgatgcattttccataaatacctattttcttacgcaaacgggtgatattcacatcgatggtgcggtccagcacatagacctcgtcgctccatatccgtgccagtatatcttcgcgggagaatacgcgtcccttgctctggaggagtaaaagtaatatctcaaattcttttttggtaagaggggcttcttccccgtcgatgcttactttcttttttacaatatcaatgactaatgtcttgtagctgatttgctccggtgcccgttccggttctccctgttgggtgcgacgcaatacagctttgacgcgtgcgatgacttcacgcagagagaaaggtttggagatgtaatcatcagctcccagattgaagccggttaccgtatcattttccgtatccttggcggtgatgaatataataggtacctgagcggtcttcttatctttctttagtaagctggccattttgaaaccggatatttctcccatcatcacgtccagcagcaacaggttgtagctaccgatatccattttcaacgcctcttcggcagagttggcagtatccacttcatacccttcattctcaaggttgaatttcaggatctcgcaaaggtcctcttcatcgtctacaactaaaatacgataatcgttcattgctttttctaattaatatgaggtattcaaaacaaattctcctaccacaaagttatactttatttcttttcagcgacaaaggtgcggtgtttttgttacgggaaagtgaaacacgtgttacaatttgattacatttttgtatgtgctgaaggtaatccggtacataccaagtccataccaactctgtgtcagatccataccaactccgtgtcagatccgtagaaactccgtaccgggtccgtattaactccgtattgggtccgtatcaggttcaagcgtataggcacggagatggtacgaacctgacgcggagttggtaaggctttgacacggttttggtaaggtgaagaactgtaaactattacttttgcattccagtttttcagtttttatacttacctttgtcttaatataaataacattggtatgaaagagttgactaatataaattttcggcgatataaatggcgtttgcccgctctgatagctttattggtggttgttgtggcaggttccttttggctgaatacggctccgttccgttccgggtttgagataacggatgagttgggaggcaacatctttccttccagtattctttctgttgcgacgacagatgcgcaagtcattgttccggctgattccttatatgtgggtaattctaaatcctgcatttctatccggattcgttcggggaaggcgtatagcagggtgcgtattgaagttgctgaaactccgttcttttcccgttccgtatctgagtttgtgctggctaaaccacggacggaatatacgatctatcccgatattatctggaattacgaagcgctgaagaataataaccaggcggaaccggtaagtgtggctgttaaggtagaaatgaatgataaggatttgggccagcgagttcgtactttttctgttcgcagcattaatgaatgtctgttgggctatgttacgaatggaactaagtttcatgatacaggaattttctttgcggcatacgttaatgaggaaaatccgatgattgataaactgttgcgtgaagcactgaacacccgtattgtcaatcgtttcttgggctatcagggtggcaatgctgaagtggtggacaagcaagtctatgctttatggaatgtgcttcaaaagcgtaatttccgttacagctctgtttccaataccagtttgtccagtaatgtggtcttttcccagcgtgttcgcacatttgatgatgcactggagtcttcgcagattaactgtgtggatggtagcgtgctgtttgcttccttgcttcgtgctattaatatagaaccaatattggttcgtactccgggacatatgtttgtggggtattatacagatgccggtcgcaagaatatgaacttccttgaaactactatgattggagatgtggatctggatgatttctttccggatgagaagctggattcaacgatggtaggtaaatcacagaatcaaatgtcacgactgacattcgataagtctaagcaatacgctaataataagtataagcaaaatgaagaaggaatacattccgggaaattgaattacatgtttttggagatttctaaggatgtgagaaggaagatacagcctattggaaaatagaagataccaagaggttagttattaagaatcgctgcttttttgcatattaatctataaaattccatagtttatagaacgttaatttaaatatcttaaaatattgggaatctatatatttcattgattatctttgcgctcggaaacagaaatatgattttctttgaagtttcatagagatttaataagatattgaagactgtaacggtcttcattcatagatgatgattgggacagtcggttcgtgagaatcggctgttttttgtttctgtttgtttgcatatcaacggatgtaatgttacttttgccgaacgaggtcaggtggcctcgttattaatctctgaatagcaatggcacaaagcaagaaatttatctctccgggagcatggttttcgatgttgtatcccgcggactggaatgagtttgaagatggggaaggctcttttctcttctataatccaagtgaatggactggaaattttcgtatttctgcatataaaggtaacgctatgtatggtcgggaagttacccgtcaggaactgaaagacaatccttcggcagtctccgttaaaataggaagcttggcatgtgcttacagtaaggagatgtttgaagaagaaggggcttattatacttctcatctttggattacaggtgtggatgatgttgcctttgaatgttcctttacggtaagcaagggagcatctgtggcagaggccgaagccgttatcgcctcgttggaaatacgtaaagagggagtgaaatatccggcagagcttatacctgtccgcctgtccgaaatctaccagattaatgaggcttttgagtgggtgaccactactgtaaaagaacaactgaaaaaagatttccagggtatggaagaagatttggacagtatgcaacaggtcattgatagtggaactatcggtccgaagaagaaagaagcatggctttcatttggtattgccatctgtgtgattcttgccaatgaagtagatgggttagaatggatgactctgatagatggtaatcgtgaagctcctgtattgcagaatcttactactggagaatggattgaccccatgaaattagtgtggagcaaagtgaaggcaggggaatcttgcaatctggcagaaacctacaaatccttactctgatcatttgccaaccagccataaatcataaattataaatcataaatcttaaactgtgattagttatcttcagatagaaaatttgaccaagtcattcggtgatttggtattgcttgagaatacttcgctcggtgtggccgaagggcaacgtatcggactgattgccaaaaacggcagtggtaaaactactttgttgaatatcattgccggaaaagaaggctatgacagtggaaccatttcttttcgtcgtgaccttagggtcggatatttggaacaagacccgcaatatcccgaagaactgaccgttctggaagcttgtttccatcatggcaacagtacggtagaactgataaaggagtacgaacgctgcatggaaacagaaggacatcctggtttggacgaaatcctggtgcgcatggatcatgaaaaagcatgggagtatgaacagaaggccaagcaaattctttcccagttgaagataagaaacttcgatcagcaagtaaagcatctttctggtggacagttgaagcgcgtggcgcttgccaatacccttatcactgagcctgacctgctgattctggatgagccgaccaaccatctcgatcttgatatgactgaatggttggaagattacctgcgccgcacaaacctcagtctgctcatggtgacgcacgaccgttactttctcgaccgtgtctgtaccgaaatcattgaaatagacaatcgtcagatctatcaatataagggaaattatagctattacctggagaaacgtcaagagcgtatcgatgcaacgaatgttgaaataacccgtgccaacaatctgtatcgcactgagttggaatggatgcgtcgtatgccgcaagcccgcgggcataaagcgcgttatcgcgaagaagctttctatgaactggagaaagtagctaaacagcggtttaataacgacaatgtgaaactggaagtaaaggcctcctacatcggtagcaagatattcgaagcagaccatttgtacaagtcgtttggtgaccttaaaatattagaagacttttcttacatttttgcccgttatgaaaagatgggcattgtaggtaataatggtaccggtaaatctacttttatcaaaatactgatgggagaggagaaagccgatagtggaacgattgatatcggagaaacggtacgtttcggttattattcgcaggatggcttacagttcgatgagcagatgaaagtgattgatgtggtacaggatatcgccgaagtcatagagttaggtaatggtaaaaagctgaccgcttcccagtttctgcaacattttctcttcactcccgaaacccagcatagctatgtttataaactgagtggtggagagcgccgtcgcctgtatctgtgtacggtattgatgcgtaatcctaatttccttgtgctggatgagcctaccaatgatctggatatcattaccctgaatgtactggaagagtatttacagaatttcaagggttgtgttatcgtagtaagccacgaccgctactttatggataaagtagtagaccatatgctagtcttcaacggtcaggcggatatccgtgatttccccggaaattatacccagtatcgtgactggaaggaagaaaaagcccggctggaaaaggagaaagaaaaagaagcctctaaaccgcaggaagataaaaccgctaaagtgcgtttgaatgaaaaacgccggatgtcctttaaagagaaaagggagtttgaacagctggagcaggaaattgctacattggaggacgaaaagaaaaccattgaagctgccctgtgcagtggcaccttatccgtagaagaactcacagagaaatcaaagcgtttgcccgagatcacggatttgattgatgaaaagaccatgcgttggctggaacttagtgaaatagaagaatgatagggtgataagatggttgataagatgataaatgataagatgataaaattatgagcaacagaactggaaatttaacgaactatcatagtcatagcttatattgcgacggacgtgctaatatggaagactttatccgctttgccctgagtgaaggatttacttcttatggattttcttcccatgcccctctgccgttttctacagcgtggactatggagtgggacgctatggatgactatctggccgaattccatcgtctgaaggctaagtatgccggacaaatagaactctatatcggtctggagattgactatctgaatgaagagagcaatccgtctgttgtccgtttccgcgaattaccgttggattaccgtatcggttctgtgcacttgctttatgatgataagggagaaatagtggatgtggatgtgacggctgataaattccgcagacttgtgaataaacatttcaatggtgacctggtgagagtggtgcatctttattatgaccgtttgatgcgtatggtggaactgggcggttttgatattgtcggtcatgctgacaaaatgcactataacgcatctgcttatcatcccggcttactggatgagccttggtataatgctttgattcaggaatattttgatgctattgcccgaaaaggatatatcgtagagattaatacaaaatcttatctggaattgggtactttctatcctaatgaacgctacttccctgtattgcttgaaaagggaatccgtgtacaggttaatagtgattcccactacccggagcgtataaacaacggacgcctgcaagctttgatggccctgcaagcgtccggttatcacactgtcacggagatgtacaataatgagtggaaagatatgccactcctcattcatacataactccagtgactttttcttatatattatttcttctttaacaagaaatcttcaattgccttttggtaagtggctttatcagctgcaccacggaaaagctgaggttctccttccatcggaatgaatacaaagagaggaatgctgcttgcattgaataatgcggcaagttcacgctctttgtccacattcactttgtagatcacgatctttccggcgtattcttttgccagatctttcatgatgggcgctgtcatgcggcagggaccacaccagtcggcatacaagtcaatgatggcgggtttgtcacccttatatttccagtcctgggatttctcgtaatcgaatacatctttaataaacatatccttgttcattacgattacttctccgcttttggcttctttttgttccggttcattgggttgtgcttttgctccatccttgcaggcaaatgtcagtacgctggcaaaaatcagaatggcaaaggttagtactttcttcataatgtttgttctttatgaattttgttcaatgacgcctttcagctcactgcccttaataactccggaatgacgccaaacggcttcacctttcttgaatacgataaaagtgggtaccgcttgtatacgatacttagcagccagttcctcatgttggtctacatcgattttcacgatgcgggcaccatcaccgatttgtcctttcagctcttccaatacgggatgcattgctttacatgggccacaccaagttgcaaaaaagtctactaaaacaggtttttctgattgtataagttcttcaaatttctccataatcttttcctttctgttattaattcattttttttataaatacaatattagtgttgttgtctgtatagtgaaacagtttgtggtgtcttttgttcacgatctattgcttttcatactatttaaatggcatatttgggtattttttagaatactttcaattttgaaacattttccatcggaaaatttatcaaatgattctgatttctttcctgggtgctctgtgggtaactgttatactatggttgaatgaaaacatttcgcccctgcaaacattgtgattgactttagttattcactttacttgcaggggcgaattatggttcacttgaatatccgagtgatatttttatacttccttttatttattccgcaatagtcagttccttgataatatgtgaggcaccggcatacttctctatgataaataaagtgtagcgaatgtctacgcaggctgcacgctgtgaagaggggcggaaggctatatctcctgtaagtccttcataattgcgatcgaaacctgtaccgatgagctcacctttggcattgaataccggactgccggagttaccgccggtgttgtctgtattcacaatgaagcagataggcatttcaccattcggcatggcatagcgtccgaagtccttggactgatacagttgttttaatttggcaggaatcacaaactcccaattgtcgggatcttccttttccatggcacctttgagggtggtatagtaaccatattccactccgtcagccggttcataaggcaacacctttccgtaggtgaggcgcagggtggagttggcatccggataaatgggagtacctgcactccgtttcatgtccatcataccttttacccatactttgtgtgcggcattgtaattcttgttggcgtctgccatagcaatggcggtctgcaacagtccgtctgtgatggaatgtttgaacagtaccatccagtcaaatcccaacttatacgagcccggttttcggatgaacttttcaaagttttccttcttgccgaagatagagtggtcgaaacaagcatcgacaaaggcatcactgttacctttgaaacgtttgtcaatgacctcaaagatgctgatgcgttgttccgccgggatatattgcatataagtctgcaacattttcttggcaactgtacgttccacattagggaaaggtacggaagcaaagtacttgtcagcggcaatctttaagctatcagcggcagcctttatctgtgccttgtccttactttttagggcagccagcatggcagaagtgttggggatgcgcataaagtccaggcctgtcaccaatgcttcctgaatggcctgctgatgatagagggcagggcggcgatgctcaacgatactgcgtatttgatcgaatgctttctggtaagaatcatcaccctgttcacgtccgcgagccaagagttgttcctgctgggcacgtttcgtgtcgagtactttcaggcggataagcccttcgttcatgccaatggcatttttccaataattggcagaagaggcatacttactggcataatggatacgtacagcaggatctttctgcatttgttccatcaatgcttcctggcgaacaccacgtacatgatggcgcatgaaattagtggtttgcatacgttcttccacttcgtcggaaatcatataacgccagttgcgtccgggaaatcccatgacgaaagtgaagtcaccttctttgtatccggcaaggctgatggtaagatgtttcttcactttcaagggaatgttatccttggagtattccaccggatttccgtccttgtcggcatatatgcggaacaaagagaagtcacctgtatgtcgcggccacatccagttatcggtatccgcaccgaatttaccgatagaagagggaggtgcacccaccatacggatgtcactgtaagtggttttaacaaacaggtagtagcggttaccaccatagaaagctttcagttcaagcttgcgtcccggtgtcagggcaatgccttgttcggaagagaagcgctcggctacttctttcaggtatttgggtgacagatagtttgtaccgtttgggtccggatctatcttcaactgttcgttgacgtagtctgttacatccaggatttcatcaatgtaagtaatggtaagtcctttacagggaagctcttcttcgcggttcattgcccagaatccatctgtcagatagtcatgctccactgtactgtgctgttggatagaaccatagccacaatgatggttagtcagtaccaatccttcggcagagatcacttcacctgtgcaaccgccaccgaagtgaaccactgcatctttcagggcgatgccgtcaggattataaatctggttcactgggattagtaatcccagttccgtcatagcgacttcgttctgcttttgcagatcggtcagcatccacatgccttcgtcagcgtgtgcggcgaaggcaagtgatgttatgaatagggataagattgtttttctcattctacaattttcatttctttaatcaaatgttcgcatcctcccagtttttcaaggatgaacagtacatagcggatgtccagattgatacaacgttgcaggttattatcaaaattgatgtcaccgctaagagactcccagttaccatcgaaagcagtaccgattaattcaccgtttgcattcagcacggggctaccggagttaccaccggtgatgtcgtttgtgctgaggaagcaaaccggcatatcaccgtttggcagagcataacgtccgaagtcttttttcagtatcagctccttcagtttggcaggaactacgaattcacggtcctcgggattttctttttccagaataccgtccgtagtagtatagtacttgtaatgtacggcatcacgcggattgtatgatttcacgttaccatacgtcagtcgaatggtaaagttagcgtccggataagaaggaacgggttctttcatttcgcccagtccgcggatatatgctttgtgcagtaatgccagttctttggaagtactgttcagttcctgtgccagtgacctcagtttttcaattttggcgcgtgaatattgagttgccagatccttttcgatagcttttactgtaggtttcttgatgaacttgtcaaagttggcctggtttgccaggatggaattgttatacatggcatcaatataagcattatagtcgcctttaaactctttttcaatatcctgatagaaagccgggcgttgttctgccggaataatttcggcatataccgggaagatagctttggctactttgcggtctacttcatgatcgtaatctttattatggatgtcagcaaagacctctttcaactgttcgagagacttattgatgagagagtcgttcttttcttccaatccctttttcaggttatccataaccatgtacgggctaccgaattcaatggcgccactgaatgcttccatcaggtagtaatactgaccggtcaccggcattgtctggtttacaatggcatctattttttctactacaccttcgtactccggtttacctttagcgaattctgcgaatttcttctcctgttctgcctttgtacccagtacatcattatcaatgatcgctttattcataccgatggagttcttccagtaattgctgctgccggcatacttgttggcatattgaatacgagttttgtcgctggcagccatcacttctttcaatacggcgaggcgtgcaccacgtatagtgatacgcggttggttctgtgcttccatacgttcctttacttccgatacggtgaggtaacggcttgtgcttccggggaaacccatgatcatggcgtaatcaccttcttccagccccttgatagagataggcagatatttgggagtcttcaaaggtacatttgatgctgcatattctgcgggatcaccgttagcatcggcatagatacggaacatggagaaatcacccgtgtggcggggccacatccagttgtccgtctcgccaccaaatttgcctacggaagaaggaggtgcggctaccatacgtacgtctgtgtacactttcttatagaacaaatagaatttatttccggcatagaacggcaaagcttgtacttcaatgccttttttacctttcagatcgctcttctcaaacaattctttagccagtttattgaggaacgggcgggtgagtgcatttacttcagttacttcaccggcagcgatcttttggttcacgatgtccgtaatgtcttcgatacggtcaacgaactggaatttcaatcctggagtaggcaattcctcaccacggttttttgcccagaaaccatcggtcagatagtcatgttccacgctgctatgttgctggatagaagcgtatccgcaatgatggtttgttagaatcagtccttccggtgagatgatttcacctgtacaaccaccgccaaagatacctaccgcatctttcagtgatactccattcggattgtacaaatcatccgcttccagtttcaaaccttgttttttcatcaactcaatggagttctgctgtttcatcagttgcagtaaccacattccttcgtcggcacgtgctgtagagccgaacgccagcgctgcaagcgctactaagtaggttctaattttcattgttatctgtttatacaatttattgttttatgaaattcattacattggcaggcggacgttggttcatcagttcattcttcatgaagtccatgtatggcgctacatgactgaaaaaacgatgatatcccttgcacagataattcagtcccggttcgccacttgccgttcgtgcgaagcggtttttaggacattcgccattgcaggcaaacagccattcacactcccggcattgggtgggcaatgattgctgcttcatttgtccgaaagcctgctgcttatcactgtacatcatctccaccagcgtcttctggtaaatgttgcccaacttatattcggggaatacaaaatggtcgcaggagtatacgtctccgttgaactccatcactcccgcatgtccgcaggtctttgccatggagcaaacgcccggttgttcgcctatccagttggccagggtagagtcgaacaattgaatgtaataggtacctacatcctttttcacccattcgtcaaagagggtgcagaggaaattgccccattgctcagggctgatggagaaatccgccagttcggccacctcttcacgatcggccagtgaggccagatgacgtccgtcctgatgtccgaatacgcgctctacgatgggggcgaactgtatgtagtgacaacctatttctttgaagaagttgtagaattccagaggataatcggcattgtagtcgttcactaccgccatgccgttccattccacaccatgctttttcagcagattgatgccttgcattacttttacgaaagaaggcttaccttgcttattcttgcgatattcgtcgtgaaattcttgtggcccgtcgatagagacacctaccagccagttgttttcacggaagaattcgcaccattcatccgtcagcatggttccgttggtctgtatgctattgtctatggtgcgtccgcgagcatattttttttgcagttccatggcctttttgtagaaggacaacgggcgcatcaaagtttccccaccgtgccaggtgaacattacctgtggcatggtttgcgaatttatgtattcttcaataaacttttccagcaactcctcactcattacgtgcttggggttgttttggtatagcttgctcttttccagatagtaacagtaatcgcatgcaaggttgcatacggcgcctaccggtttcagcataacataaagaggtttggcaaaaggagcataagttgacataggagattaacttgtttcagttacagggtttacattttgttagttatcactgcaaaaataagtaaactaaatgaaatatcctttcttttctccctccttataaggattattaatggaaaaaagagagcaaaaattaaatattgataaaaagtttctttacagcccgaataggttgtacctttgtatcgtgtttcataaaaatcgtttcctgcatgattagaatgaatgtgaaccgtattttgcccttaatgcttttgctcgtgctttttgcttcgtgcagtcgcaagtataaagtagagggtgtgtcatcggtgaccagcctcgatggtaagatgttatacctgaaaacgctccgcgacgggcagtggatagcaattgattccgccgaagtggtacacggtttgttctctacgagtggtccgtcggactctgtaatgatggtgacgctctacatgaatgatgaggctatcatgcctcttgtacttgagaacggtaagattgaagtctccatatccaactctcaactcaccgctaaaggtacgccgctaaacaatgctttgtatgaattcatcgaaaagcgtaattcgcttgagttgaagattgaagaactggaaaagaaagaggcacgtatggtgctggatggcgccgcattggatgacatccacgaacaactgactcaggagggagaagccttggtaaaagaaatgaatgactatatcaaggagttcatttccaccaattatgagaatgtccttggtcccagcgtattcatgatgatgtgcagtacactgccttatcccatcatgacaccgcaaatagaggatatcattcgtacagcccctcaaactttcaagagtagtcctttggtgagggaatttctcgataaagctaaagagaatatgaaattgatagaggaacatcggcgtatggaggagagcgaaaaaattaataattagaaattaaaaattaaaggcatgttatcatgctgtttcacaaactcatcttttggattgcaacgttttaatttctaattttcaatttttaattttattattggtcctcgtttttcaccattcccttgtattcttccggtaaagcactttctacggcggcgtaggcttcggccatcgtcgccttgatgttttctataccttgtcctttgggcgggatcggatcgtgaatagtcagtatcatgcgatatgggtgtatccattttcccgtgcggggcagaattttgaatgatccgtcgatagtgaccggcaccacttccagctgcaattcatctgccaactggaatgcaccttttttaaaatatcccatgtgtccggtaaaagtacgggcaccttccgggaacacaaccaatgatacgccgtcttttagcgaagcctttgcctggcgaatggtttccaatactttcttgggaccagaacgatctacaaatatgtgtcctgcactttcgcaggctttccctacgaaaggtaatttccgcaggctcttcttcatcatccacttgaagttacgccccagaaatccgtaaatgaggaagatatcgaatgctccctggtggttgggtacgaatacgtacgatgtgtgtttatgtattttctcccggccgcgcacctttacaggaatcagcaggaaaacacaaatcaattgtgaccatatttttccgggataatagccccagatatgtgcaccgcctatcagagagccgatgatagtcaccaaagccgtgagaatagtcaataccaacagaattggtaaagcaaaacatatttggtaaatataataaagtatcttcataggtgttggatttttgtttccgcaaagatatataatttgatttagatatgcta

SEQ ID NO: 6313 - DNA, 65826 bp, Unknown
  gut microbiota DNA sequence
gcccgggcttgggaaagtctgggctttgcgcataaaaaaaggttgtgccagcattttgacacaacctccttcttttatcagtcgcttatgatgtcttttccaaaaggcgtcaaagctaatcctgccagtttgaaatgctgtagcccgaaggggataccaataatggtgatgcacagcaccacaccgaatgccagatgagaaaggcaaatccagataccgcccagaagtatccacaacacattcatcagtatatacaggcaaccacccgaacgttcgccactccgcaccgttttaccgaaaggccataatgcaagtgaagccattttcagagtttgcataccaaacggaataccgataatggtaatcatcatcaataaactggcaacaaggtattctatagcggtaaaaatacctccgaacaccagccataataaattcataaaacatcccataattttgcgtttcttgtattctaatacgcaaatatagtttttttatttaataacaaacttatacttacctgttaatcgcgcatctttatctttcaaggcaatacggtaaatctccgttccccaaacattagaaagacgtgtatcaggcaaattgattgtttcaacggttgctatgaactcaccgggatattccaaagttactctctgtccctgtacgtctatcgtcacctttccgggcacggaaatatccacctttccccaagtgaggaaattcacctgattaggttctttcgttgatttcaaggagaagttatcggtaatcgtcagttgcttatcgcctaatgaataggcacgtgtccagttatttacctcggcttctttcggataagcagtcgcaatgttcgctgagaaaaaacgtttcttcggttggcagacaacatccgtagccttataattctgaccgaaactctggggtactccgtttatcatcggcaggttatggtaattactttgcatggtccagatggtataacgttcgctactgaacgtctgacgtgtataagttcctacccccgcatcaatcagcacaggtatcgtattgacgtacaatgaaaatgtacctacatcattatgattatgactttcattattgaatccgcctttcgtagccaggaaccagccggatttattggtcagatagcagaattccgtttcaggataccaggtacaagccggtatggtatgggcagcggccgtcttttccagttctccattccataatatggactgcaaggagcggaaagtatcattgcccaaaggcacagaaggacgcttgccatccagcagataggctgcaaactgcatcatttcctcgctgccgactgcacgaccataacggtaaatcaacggtgcatcgcctccacccttggcagaagcatccgcaaagttcactacccaaccgtttcctacatacgtacgactgatatattctcccatccggcgaatcatcggttccttgaaaagagatactttcccatctgttccatccgaaagtatctggagataatcatacattttcccggctgcatgtccccaataagaaggaccttcttcacaagcaccatcagcctttacaaaattgatgaacttgtctaccgactgcatgctgcgccaaacagcctttgccagacggtcgcggtcattctctaataaaagatagcattgcaatacattggaattacaccagggattccagttattgataatcattcccggtttccattggaaagccatccaccactcccggtcattgttcatataaggatcgagaatacgttcctgcaaagtatgacgcaagcgctgagagattacaggatctattttatcgaaagaatcatggaagaagtaatatacccacgacagcatggaaccgaaatttcccgaacccagatcaatcacctgttcgcgataatcgggcaaagagcgtttggtgctctggcgtaccagatgggcagaaagtacccaggaagtcatctcgcaactgtaaaatactccatttatcaactggtcgataaaccgtccttttccttcggcaagttcggcaagcatcagggcattgattgctttccggttggcctcatagggattttgcataatgttccgttcaccgctgcgttcatactctaagtaatcggtagcacggattactttccattcgtaattaagcattttctctccggcacgaatcaggctttctttattggtacccagcaattcgttccagccggcacggtcgttataagcaggataaggtacccacttctgattcatcaccaatgcttctttcagttgttcttcactaccggcagctttttgcaaaagatttcgttcagtatatgcatgtgcggagatacctgccatgaaaagcaggcagaaggaaataaaaatacggtaaaacgtgtttctcttcatgatattaaaaagttagatttcttttttgtgatgaggcaaagatacgcaagttacggtaaaacggaggtattcaattatccgtagttgggtacaaaatcatccatttagtatcaaagtttgtttgcctttggctattgtatattcgctaaaatgaatacttttgcatatatgagtacaaagaaacagccaactatccccatgcaccgaatggatgttaacacaccattcggtatgcaattcggttattatgaaactgatagtaaatatgctgaaaacacaaaatcggaaaaatacatagctcaccgagatgattattatttattcctattcatagatacagaagaaacaatattgactattgattttgaagacatccgagtacagggagaacaagtattttatgtccgccccggccaagtacacttcacacctgtaatgcgaaaagcgaaaggatattttttggctatagcccctgtattaatcgaaaatcatttcagaaaccagtttgagaaacaacttactacacaaaaaccgataatgtcagactcatccttttcagataaactggctcaaacagctcatttactgcatacaatcatacaggaaaagcccactacattcggcgaacagattacattaaatgtagcaaatgcatttatagggattattgcagaacaatattccaaacaacaggaagagttacattattccaaatcccgttcgctatttatagcacatcaatttcaggcattactattggataatgtaagaacattgaaaagtccaattcaatatgctaaagcattaaattattcgctttcacacctcaacgaatcggtgaaaatcacaaccggatttcctataagttattggatacatcaacaggtggttctggaagctaaacgactgctttattacacaaacatggatgtaaaagagattgctttctctctgggatatgaggaccctacctacttctcacgcctcttttccaaagttacaggaatgtctccaggagcttttagacaaaaattccacaaatagtccaagatattccctgtttattctatttcctgccaaattacaccgttgtaactttgcaggcgtaacaaaatcattgaaataatatctgcaaaagaaatgaatacattatatattattttagcaagcctaatcttgttctttatactcggtcattttcacaggcgtaaacgtgcaaagagtaaagttgttcatgtagttgataatcaatgcaccggatgcaaacgctgtatgaaaagatgtcatcacaaagtattggatttagtaaacgacagtacaggagcgcatatagcagtagaatatcctgaaagatgtactgcctgcggggattgtgtcacagtatgtaaattcaacgctttagaattaatagaccgtagcaataaacataacaatagatagctcataaaaaaccacctacttccaatcactaaattcaaagctcaactgttcccaaacgcctttttccccggtatcttcccgtggattagaaacagaaagccctatcaaccggatgggatgatgttcataatccacctccttcagcaattgtttagccaaaggcaggatcacatcaagagtaattagttctttggattgggttatgctccgggttatctgactaaaatcatggaatttgattttcaacgtcagtgtatttcccttaaaatcattatgttccagacgtcctaccagttccactgccgcatgatacagttcgataataaccgatgagcgttgcgaaatatccttctccaaggtatgttcgcaaccaatggacttacggatacgtaccgcctctaccggacgaagatcgattccccgggcacaatcataatacaatgctcctaccttgccgaactcacgcagcagcatagcctgcgaacatgcacgcaactgttcgccgttatgaatacccaatgagtgcattttctttgccgtcaccggacctaccccccagaaactctcgataggcagacgcgcaataaaatccatcgcctgatcgggatggatggtacacaacccgtccggcttacgataatcggacgctatctttgccaggaatttattgtaggatatgccggcagatgctacaagattaagttcattccgtattttctgcttgatttccttggcaatatctacagccaacaaaataccaggcttattctctgtcacatccagaaaagcctcatccagtgacagtggctcaatgatatctgtatattcgtggaaaatttcatggatttgccgggagacttcatgatacacttccatccgtccgtgaacaaagataagttgcggacacatccgttttgctttcgtcgacgccatggccgaacgtactccatagcgacgtgcctcataactggcagccgccactactccccgttcttccgcataccccactgcaataggttttccgcgcaactcgggattgtcacgctgctctacggatgcgtaaaacgcatccatatctatatgtatgatttttcgttcagtgccttcgcaacacatcatgcatgatcacctttccattttactattcaaagataatcattatttccgttactccattgcgacaatttctgatgttcctgtttctttcaccatttttattgattttcctactccggctcgatacatttgcacttatttatcaaggctcctcaatgctcgtttaataaaatagagaatgctgcataaatgcaatatacttaaaaagcaaaaaaaggacgaacatgataacttgaactactctccttatcatatccttttatgcccactctatcccagaaattattagtcataacctcaaaatgccaaataataatccaactttccattttactgtactgagaactacatcgaaaaatattcctgtaatttgataactcccctatggagctacccactttagccaactgtctatttaacttctccctcgtctcagtcccataccgatgatcctcccaaccgacatttgtattatcctgaaaatcatctttcggggatctcccgcatatattcaccaatacatcacaccattgaccaatactcggtaaaaaccatggactacaaatattctcaggtatcagattcttcttccgatactcctcgattcgtttaaaagcagtgtatttactaaggtcaccactatgatttgccagtatcgtctccgtttcagagtaaccattcatgttatcctggattgagccatcttttcccataacctgaataccattttcaaccacagtcttatcaccccaactaccatcaccaatagtattcaatcccattacataggcatggttccatttcttcttattgcattccttatccgtcattttttcagaagcacaggtaatgaccattccagcagcattttcataatcaggtattttatctccttcaaaagctccgtcgccgggatatatttctattttgccatctttaaaaaagacgaaatcgccgggaagtaattgtcgttctctcttacatggatttagagtactattaactgttaatgtatagcaatagccggcgttgaaaatagtctgatgccctgagtaaattatatttttatccataccagtacttatgtcggtcactttatagtttccggcaatccttgtcgcagacttgggaagaacaatagccctataactcccgtcatccatcttgcatgctgtaacatcattcagtattacttgttgggctgtcacatctactgttctccctatattatcacgataagtaaaaattgtgtctccaggtgaaacgtattcaaaagatgcctgcggcttcaacactaacaatgtaaactgatgactaaaatttaaattcaggattttctttgtggaactattaccatcatctgccaactcacctatagaagtcattagatcgcaagcagtatatttactgacagtagactggtcggttaccggttgcagaagttgattctcagccagtgaagtaacaatctcatccgaattttgagttgcatctattgtaacatcttctttataggggtaataagcaatatagctcatcccagcagtccaataaagcgtagtaccagcaggtggattccaatctcccatagcaatacctgtttttttataagtcaactttacattgctaatggcatttgctatcgcaccgttttttatggcgaaaataccgatagcatcaccggtattgaacaaggtttcaagtccgttctccataggtatccgtgtcgaaggtttcccgttagcagaaacattgttgaaatcgcatgttgtagtctgaacaacgagaggtatacgagcttgttccgtttctccttcgtcatttatctcaatttcacgggtacatccgctacatacaaaaagaatgcaataaaaacccaaactgatgaaagtatgtttcatatacttattcttaataattatcttgtttctatatcactgccgtccacagtttccgcaccaccgttaccccatgctggattactattcactgtcacagaaactcccgattttgtatcgatactgataatatagtttaccaaagttcccggtttccatttatcggacgaaggcaaaggttgattattcaaaacaatggtctcagttccattcgcccctgtatatttataagtgatgttgaatgtatttcccgatccgttaggtagtaggaagaaagtagaaagcaacttcttttctgtagcactattgatgggtacagagaaattagtgatagtagtggtaaatgtttccattgggacggacgaaggataattccactcgaatcctttgctatcggtatccaaagattgaaaggtcaaagttccacttttcactccccggatagagaaagcggttatcgttttctctaacacattatcattgttcttcacataaatagcaatctttgtcaatgcatggttcatcacgaacttcacctttccgttattagtagcataagtctgattcatcaaaggagtgcagacaagcaaatctatttgtgccgcttccgcaacttgcacctgataagtaaatgaaggatatcccctgtcggtagcagccggcagtgtcaaacctttggcattatgcggtgcataggcaaagaaagtaatcttatcgttactattggtcggccagaatttcgtgggagtatattcccatgtagaggctccggtggctttcgtcacttcctggttgtacatgaaatttggagtggaggacaaagcgttgaaactgtttccctgtgtgagataagccagtacgcctaaagaagtaaggttatctttggtaaaatctattccacgcgtctgtgcctctacagtaggtacaaagccaatggaaacagacaacacttccgtttcatcagtttgcgaacaggcggtaagcaatgcgtaacaagtagtgagcaatacacagcgggtggcaaaagttgagagttttattcctttcatatctttcgatttactttcttgatcgtgtgcccggaaaaggagattcaaccttgtccgggcttggttagggtggtattgagataaaaaaatgtccggcttaatttactgtaatatttttatctccgccgctggtatcccaattaaaactatccgttacgtctacttctattgagttcaatccgatggtgaaggtgaaagcgtatgcttttccttgtgcaaggattccggttcccaggtctacttcttttgtgaaagaagaaactgcggcagtggaagctcctgaagaaggaatagtagcaatatcatacgtaatagaggctttcacttcatcagcgcctgtagtaccggttgttccggctataggaatgaagaacaggtattggtcagccgtgaacaggctggctgctgtttcattgattgaaacggcgggtgtggtataacctttccaagcgggattttccagtttgagcacaccgttggataaagttgcggcaagaggataaggacttgacagatatttacttgcctcacccggtaatgttggtagtgcccaggtagcattattcatgttgatagttgcctctccggcaagcttcgtcgtgtgcttcaggctgatgccggtaatgtacaccttggtttcagcattggaagatatgctcttgtctgtcttagctttcatggtgacacgggtgagtacgtgtttaaagtcgaaagtgactttaccgctggcagttgtttgctgttggtctttcttggctgtagataccaccaagtctaccatgtctttctggttagtttgcgactcaaaagttagagagggatctgtagagttcgtagcattcgtcaaggtgatgccatttgcacctggcgtacttgcatacggggcataagcgaagaaagagagtttatccgtactatttcccggccagaatttcagtggagaatattcccaaccaccactgccactaccgcctgtagcattccatgtagtatgtacattatccataaatgtacctttggattcaccggttgaatagtttccagtggtctgataggcaagaataccgaaacctttactggccactttcagcccgttggctgtagttccgtcattcgtcgagttgtccgtaaccaaaccttttgtctgcgtacctgtgtacactccgaaaccaatggtgcggttcgtatccggccttgtttccagaacttcattttgtgagcatcccgtcacagtcatagctgccaccactgcccagaataaaaatttcgttttcataacttgatacatatttaattaataaaagagtttcacctttaaattcatgatatcacaattctttgtttatatcggtatgtctatttcctcatcctctttccaatcatccacatccacatcaaatccggagtctgcacttccttccggcttcacatcgggaatagtttcaggaatgggggcatctatatagaatgtaatgctcccaacgtcatctattttttcttttacaattacgtcagtcagcacttgttccactaccgtcttaccatctaccaacaaagctttcagcgtcattgaatgtgacattaaacggtcaaggctaaatacatcgaacatacctgtcaacttgccctcagtgaatgaaccttcctcatagacggggctcccaacagtaaactcctgactacccagttcctcacctgcatgtccgttgtgaagaaaaaccgagagaggtacatcgttcaatgtacaacgtaccttacgtacattatttaaacctctcacattcaatgtcacctgtacccttcggacaagtggtataggcgtgaagtgcattttacaggaattgccggaactcacgtcacatgaaaccggagcaacataattacccagcatttcacccgtcacttcaaagtttcgtattgtagccgaagccagtttatcaggagaagagacaatgacacgcgtggatgcacgcgtctccacatctttagcatatgcttcaagagattccaaggcatcatacccacgaaacagaagattattgaaatcggtgaatgatcggttcaggaacacggcatcataagtacccaggggtaggcgtacagtagtatgctcgcgttcacctgtcaatacgatacggggagcactaccatcctgcgggaaaatgattaacgtagcgccctcctccttttcctcttccaatcccgcacaactccagtctgccgtcacagtaacttcagcttccatatagtaggtcaattcacggcgttcgcatccccataacagactacacagaataatgcacaccatttcatcaactatcagtttcatccttctattacctaccaccctcatttcatcctccttttctgtttacgtcccaacaaccaaaccagtgagatttttccttttgtagacccaaaccatgtatagtttccactattttgccaaagcagcgtacggtaattatcgatagcccggtaatgtttataatcagttcttagcaaaccgatgccgatgctaaattcaaggcttaaacgggaagcgacaggtacagcatatccatagctgatacccgaggcaatataaaattccccttgatatcctctctctttccattgcagatcatacttacctccacctgcatagaagccaaggaaatgtcccgtaagagtctggcgaattgtacgatttccaagccaatagcgcccttccaaactaccggaaagcaactgaaaacaaaacttgtcatcatcaatcaaccaccacggaaatatccattcaacattcagagaccagcggttagatttaccaaaaggcaattccaattcaatgttgggagcaagagcaaggtcgaacagaaggtttgtctttaaagcaaaggaaagagaaaaggacttcttatcaggtattctgaacttatcaagaaactccttctcctcatggggtacgagagaagatatagtatgttgtgttttatatggcaaagaaccgacagaaagcatcattttatgtttcacatctttcctcttcacggtgcacactgccgcattgcgaagctgaggaagcaaatgtgcatcaatataccgataagcttctccacggttcagatgttgcaaaagcactttacaacgctctgtatccggcacttcattcagtatctgcaacacttccgtccggttgggaatatcattatccagctctactgactggcgaagtcctgtccagtcttccccccgtgaataaataagaatacgagcctgactcagatatgaatatttccaaaggagatactccttcacactaacagcacgctgacgggccagacgaaaattatgctggacattcccttcgggcgatgcacaagaggtgataattatcgtatcaacagacagagcggaaatgctgtcggaaaacaaagcagaaaaacattccaatgcatgcaggttatccatataatcagattccaccaacgaacaattgaaacggaaatgtactaataaggaattatggcagatactatcatgaaaagatttaataagagtttggcttacttcaactctcattcctgctgaatcggcaatacttgcaaatgccggaaattgcaacaggcaaacgctgtagacaaatatatgcagcaaccttctcattacaagtcattcagtttgatttcagataaataaattcgagtcatgtggtttattatccccaaacggttagccgctgcacgatattgttgatacatttcttcactggtaggataattgcagttaagatgttcgtcgagagtttccagaatatcaagcaaagaaatggacgtataaggacggactaactcataggaggaaagagtatctgcaaaggaaatatctctatgacgcaccaaacctcctgtttctaactttgtcaaaataccaatcaaatactcaggatcaatatgaagttgagctgtacgatagggatggctacccgcagaaatgtcgcataaaacggcaatagctgtctgtgttaattctgtcaacataagcaaatatttagctattactccgtaagtaacggaagcacgcaaatacaggaaatataaggcgttataggaacacggcgggcatctgaaaatgaaattacgtaaaaatgaacgtaaaaaatcacaggtccatgtaaaaggtagcaacgtggatagagagaatgatgtgtgttctcatagtcaagaagaccataatatgtctgttttcggttgtttgtcttgccagagccgtgtttttctataaaatatcagttaaatttatcaataattatttgttttaaagaaaaaactcataactttgtggtagaaacaattttccgttacttacggagtaatgcctttgtatactgttacttacggagtaacagagatttaagccctactccacatcgttttctttccagaataaatgtaatcaattatcatctggtttgcctttgccatttctccaccttcaaaactttttaaataagttcgggtgacttcaagagaagaatgtcccaacccctcagaaatcatctcttcaggtatctgacaatatttggcaagcgtagcccatgtatgacgcgccgtgtatgaacttaccttcagtaccttcaaaccagaatatgaagccagttttaaaagcccataattcaatatgcgcaactgacggcaatactcacgatagacgacctctcctcccagtttcccatctaagaaacgcaatagataaggtgaagtggggtcagtgctacgatacaaatttatcaatttcattgcttcatcggtaaccgaaacctgcaattcgcttcctgtcttttgtcgacggcaggtcagaagagtatgtccggaaagatcagttcgtaaatcatcccgatgcagatggataagatcagtaaaaggcataccctgtagatgaagcatcaaagaaagcaggtcacgggattggcggatatttccgggcaactcttttgcatccaacagacaatgcatttcttccgctttcaaagcacgtttttgctcagattttacccctgtaaacaccacactgaataaacgatattcaccagcaatcagccctgcatcgacagcacgattgtaaactgcacgcaaagcacgggtatacgtagaaactgtattccaactacaaagccggtcgcgcaggtgtcgctcaaacaacttcaacgaccgacgcgacaaagcaccgaaaaagatttcaccacctcctacaaaacctgtaaaggcacgtagtgcataccggtaaacgtgcaacgtaccaaaacgttcctcaagttccaactcctccatcacatgaaacatataagaagtgaaactcttcattttttcttcattcataaatccttcttttaaacagttaaacatatcctaataagagaaattcatcagccaagcaatcagcttctgtatctaaaatgatagggaacatgcaagaaaggaaaaaggttccaaagtacctctctcaccaacaggaagaagaagaatttgcagaagataaaaatagaaacgtatattgcaggatgataaaaaaaatatttttctaactttgcagtactttcttaacccacatcatatcatgaaatacctattcagcctcttgctcctatgccagattattggattatccgccaaagaacgtgtggattctatactctctgtcctcgatagcgagatagaacaccgtgaaatctactaccagcaaaaagaaaagaagttagaagacatcaaacagcaattccgatacgtcaagaaccagcaggaaaagtataacctttgcaaccgtctgtttaatgaatatatcacttatcaatacgattcagcttactcctacgccatacaaacagagggaatatcacaccgcctgaccgataagaatctatctattcaggcagattgtaacctgttttactgttacctttccaccggtttattcaaagaagcatatgacatgatgcgttccattcatgttgcaaatgccccggactccattaagtcggaatactaccagctctgtatgagattgtattccgatatgagcagttacaatgaaggtacccctttcaatgctgattacaacaagaaaataaccctctactgtgactccgccctactgtatacccccgaccacactttctaccaccagaaaatagaagctttcaaattcagtgtaggtgacaatgagaagaaaatacagatgtacaagcaaatgctgaatgattacgacgtttgtccgcatgaaaaagcaatcatctactccatgctgggacgtatgtacatagggatgggagattttgaacacgccatttactacatggcactatcagctatacaggatatacgctccgccacgcgggaaacgactgctaaaaaagaactttcgagttatctgtatggcaaaggagacgtattacgtgccagcagatacattcagatagcactggaggaaacaaatttctacaatgcccgacaccgtaagatggaaataaacactatactccccatcattgagaagcaacgcctcaccctgatagaagaaaggaaaagggaagttacaatatcattggcgataatgagcctgctggtcatctctcttttagtcaccctgtccatcatttataagcagatgaaaaagctgaaaactgccaaacaatccattcagcagcaattcaatgaaatatcagaagtgaatggaaaactgcaagagtccaacgagattaaggaccaatatatcttccagtctctttatggcaagtccgattacctggacaaagtagagaatctgctgaaaaagcaggatcgtaaattgaaagcacgccaattcaatgatttacaaatcacgcataaagagttcgatataaagtccgaacgggagaatatgttctcatccttcgaccagactttcctgaagctcttcccgaatttcctgacggaatacaataaattcttccgcccggaagaccaggtgattctggatgaggcaggcaacctgccaccagaattgcgcatcttcgccctgattcgtttgggagtaaccgaaaacgagcggattgccaaattcctcaacttatctattaatactatatatgtatataaggcacgggtaaaaggaaaaacaattgtgccgaaagaagagttcgaagaatacattatgcaaataaagaaaggaatttagccccgcaatatctctgaaaaggctctaaaacagaccttaattttctgttggaaggaggaatgcattgatttgaatatcaacgtattcctccttttatcattctatatcccgtcttcattgcttttttctcccgcccatacgaaatacatttgtcccaaggaaaaaattcattgaacctattaactcatttaaatcattgtaccatgaaaaagaaaactaagatttatccttggaaaatgtactttcatgtactccttggaatgttcttcctactccctgcattactgaacgcccaaaatgcaacagtcaaagtatcaggaatagtgacggacaccaacaatgaacctctgatcggagtatccgttgcagaaaaaggaaccactaacggagccataactgatgtcgacggtaaatattcgctgaccgtccgccccacaagtaccctgcgcttctccttcatcagttataaaacacaggaagtgaaagtagacgggcgtaagactatcaatattcgtatggaagacgatgtgcaggctctgaacgaagtagtcgttatcggatacggaacgctggataagaaagaacttacttctgccgtatcacacatctccagtaaggattttctccatatcagcagtctggacccttccatgatgatacagggaaaagtggccggtgtatccgtaaccaacacagctgccgccgaccctaacaaccaggcaagtatccagattcgcggcatttcctcacgtgctgccggattgggcccgctgatcgtaatcgacggcattcccggtggtaacctgacgaatatcaatcccaacgatatcgcctccatggatattctaaaagacggtgcagcctccgctatctacggtacacgaggtagcaacggtgtaatcgtcatcacaaccaagaagggatcacgcgacggtaaattccatgcgatctataatggtatgctgaccgccagtattcctctgcatgaactcgaccaactgactgccgaagagttccgcgaataccgtgttcccaacaatccgaccagtgatctgggtggagctaccaattggattgacgagattacccgtaccggtttcacccaccagcataccgtcacattgtccggtggcaccagccagagtaattaccgcgtcagtgtggattaccgcaatgcaaccggtatcgatatacgttccagtcgcgaagagtatggtgcacgcgcctctatcaaccataccactaaaaacggactgttagatttctccgtaaatatcgcaccgcgtatcgcttaccgtgaaaattcctcttgggatgcattcaagatagccatggatgccaaccccactaccccactgtttgatccggaaaatccgaatctttattctgacttcaccgggcaggaagccttatggaatcctgtagaggaactgaagctggaacaaaacggtggtgaaaccaaactattggactgggatgccactgtgaagctaaacttacttcccctactcgccaaagatggtcattccattcattccctcagtacgcaactgacttttgccgaccagcaatcggataatttcgactactggttccgtccttccacaagccgcctggctatgaagaacgactataaaggagaagccagccgcacttacagcaagtaccgccagcatagtcttgaatggctaggcaactacgctatggaattgaagggacaccgtgcccgcgccatggtaggctactcgtatcaatacttccagaattcaggtctgaatgccgccaataaggatttctcttccgacggacttctgtacaacaacctcggttccggtgaatgggccaaggaagaaggacgcaacgaaatgggtaccaacaaaagcgattctaaactgattgctttcttcggccgtctgagctatgactacaaaaaccgctacctgatgaccgcttctttaagatacgaaggttcttcccgcttcggagatgacaataaatggggttatttccccgctgtatctgccggttggcgtatcagcgaagaagctttcatgaaagacatcacatggattgatgacctgaaaatacgtggtgactacggtgtaaccggtaatcaggatttcggcaattacctgtctttgtctaccatgagcagtttcggcagttactactacaacggtcagtacttcaccgtatggggtgcaggtaagaatcctaatccggggctgaaatgggaaaaaggtaaaaactggaacatcggcgtggacttcagcatgtttaaaggaatattgagcggttcggtcaattactacaaccgtaagcaacaagatttgctgggcgactacaatgtgccggttcctccatacttgttctctaccacttttgtcaatgtaggtaccatgcgcaacaccggtattgaagtcgatctgaatatccaggcggtgaagatgaaagatttcagctataccgtcaatctggtaggcgccaccaatgagaacaagttcctcaaattctccaacaacgagttcaccggacagaactattacgatctggcgaatatggaaagtccgaatcaaccgggcaagttgcaacgcatagaagaaggacaacgcctgggtaattattacacctggaaatatgccggtattgatgccgatggcgactgggtagtatggaacaaagacaatacggagatgattaaaatatctgatgccaaagaagaagacaaacgggtaaccggtaacggacttcccaagttcacagcttccatgaccaataccttgacgtataagaactggggattgaccatcttcctgcgtggtgctttcggcttcgacctcttcaatgtacacgacttctattggggcattcccagtatgcaaagcaatgtgctgaaaaaagcatataccaaaaatgcggccattaagaaaggtaagaatgtgctgaccgactatttcattgaacgcggcgactatgtgaagctcgatatggtaaccctgagctacactttccagatcaataacaaatggctggatagtgcccgcctctacgtcaccggaaagaatcttgccaccattacaggtttcaatggtgtagatccttcgacttaccagaccaacggattgactccgggtgtgaacctgaacggtacggaaggtacccgccgatactatccctccactacacaggtaatgttcggtgttcaattagacttctaaatgtataaccttaaaaacaatagaaatatgaaactcaagaatatattaaccggttcgctggcaggagtattgcttctcggctccctcagcgcatgcaccgaccttacggaaacggtatacgaccaaattatgtctaccaactattacaatacaaaggatgatattatcaaagctacattccgccccttcgaacatggattctacagcatcgggccgcgccaggttttgcaagagtgttgtgccgatcaattgggtacctgggcacgcgatggctggtggtatgacaatgccaaatggcaatatctgcactaccacacctgggctgccgacaatgaatccatcaaaagtgaatgggaaaactgtttcaccggaattatgcaggccaattccgtcatagatgacctgcaaaagctggaccctgccaaattcaatatgtcacagccggaaatggataacttcatcgcgcagaacaaagcattacgcgcatggttctacattcgtctgctggatgctttccgcaatgtaccgttagctgtcagcctggatcagagcaagaactccgtcgggcaagtgacgccgcaggaactgttcagctttatcgaaacggaactgaagacatctatcgaagcattgcctgccaaaaatggtaatgccggaaacgggatagcacaaggacaatggaccaaagccggtgcagccgcattgttagtacgcctctatctgaatgcagaaaaatggatcggcacttctaaatatacggaatgcgccacctatgcccaaaatattctggacggtgactatggcttctacgaactgggaaagacctgggacgaagttttcgactggacaaacgataaatgcaacgaaaccatctttgctttcccgtcgtcctacgggcgtagttactggcactattcgggtgatacatactggtgggccgtccctgtcaatgcgcgtttctacttcggtgctttcaaacaaggagacttcaataccaaatatgccttgcaacccagtctcgacctgaataataatgaatacaacttcaaactcggtaaatttgtcagcaaattcaagaaatatccgaaagattatcgcctgaccatgtataagaacctgggcaacagtacccgtgaaggtatgttcctttatggctacctgccttatatcgccgatgacggcaccgaaaagaaagtaacttcccccgtaggaggatatgagatctacatccgcgaccaggtaggagtatttcacgaactcgctccggatcaacttcccgccgaccgcacttcaaacatgaataccggcgaccataactccggatggcattttgtgaagtatcccatctacagtgacgaagacgcgggtaaacgcgaagccgattacaatgaaattcgtctggcggaaatctattactcactggcggaatgtaagttcaaagcaaacgatgtggacggggctgcaaaactgctgaatgcggtacgcaaacgtaactatccgcaagatacatgggcagaatacctgtacaaacccgaaggtacagtaaccctgacgcaagatgagctttacgatgaatggggacgtgaattccttgccgaaggacgacgccggactgatcttatccgctggggattgtactgtacggaagaatggtgggacaagaagcccgatgcagactcacactgggatatcttccctatcccacgggatatgatgggagcagatcatacactgaaacagaacccgggatataattaatacgaaccggtaaaaaacatccccttaggtgaacaatagtttcatcatttgaaactctcagtttcataccgagaaaccaacagtttcattgcttgaaaccaggagtttcatgccttgaaactaccagtttcacaccgggaaacaaactgtttcctcaaagggaactcaaatgccgatgaaaggctctcggatataacaacttacaatttaaaatcagataaccatgaagaaaataatcaataagcttatattcatctttgccctcctccccctactggcaggatgcgagaaagataaagaaattgttgtagtggaacccgttgaaaactacacgcaactgtacggactcggcactatattcagttgggattccaatgtccccacagaactgaagttgattgagcagaatacgttcaccatagataaagtcatcaaatactccgaagagaacaagcaattcaaattcatcctcgaaaagggagactgggacaaagtacgttatctggtacctacttcaacagatgatggtactgccgtgaaagtcatcactcccggagaatacgatatgctgatgtgctccgaaatgacaggcgacctgcgcgaccacttctggggaatacccgaaggaagcgatggcacctatcggattacagtgaacgtaaagaagctgaaactaaccctcgaaaagatcagcgatgaaacagaagaaccggaaccggagataaagacaatttatggtttaggaagtgcattcggatgggactccagcaatccgaccggactaacacccgatccggatgaagaaggaatctatacggcagaggtaaacctgatctacagtgacgaaaacaagcaattcaaattctgccttgaaaagggagattgggataaggttaattatctggtgcctgaaagtgtagaccataacggaaacgtcaagattgtgacacccggtgaataccccatgtttaaatgttcagaaatggaaggcaacctgcgcgaccacttctggggtattcccgaaggaacggacggcaaatacaagttaaccgtaaatacccaaactctgaaactgaaagtagaaaaagtgaattaacccccaaactttaccattatgaaccatttgaagttactattaggttttgcagccttattcttatcatcctgtccccagtcttccatagcccgtgacagtcccttcacccgtcacggtacgggacccagatactggattgcctacgaagagtgttttgtaaccaacgttcctctcagtgaggagcgctggaaagcaaacatcgactggatggagaagactttcaaaccctacggttacgacatgatctgcaacgacggatggatagaagctgcacaaaccgtcaatgagaacggctatatcaccaagtacaacagtgactggaaaaacggtttcagctactggactaaatacctgcaagaacggggcatgaagatgggagtctattacaaccccatgtggctgacccgtgccgcctatgaacagaatctgcctgtaaaaggaacttcttaccatacccgagacattgtgggatacaaatcgttcaacgatcctctgtattgggtggatgtggataagccgggagccaaagaatggattcagaattatgtccgctatttcaaggaaatgggtgtcacctatcttcgcatagatttcctggaaaactatgaaaccaactatggcacccgccgctacgaacaagcattggcatggattgccgaagctgccggagatgatcttttcctcagtcttgtgatgcctcattgttataatcatgccaagacggaattgaaatacggggatatgatacgcattgacgatgactgcttcgacggtgactgggactttgtcagcaaccgccgccgcgggcagcagaaagaccattggccgcaattcggtaatgctttcgacggattcattggttttgccgatgtcggtgcacgagggcaaatgatactggacggtgactttatgcgtatgaataaactggcaaatgacaacgaacgccgcttccttttctcgctgatgattatgggaggttctgcacttgccattgccgaccagtatgatacgattggagatcacgcctgggtttaccagaatccggaaatgaacgagttgaacagtctcggttttgccgccaaaccattgagttacgactttcgggatgcagcaaacagttcccgatggatcggccagttacctaacggagattgggtggtaggattattcaaccgtgaaagtactccacagacacgcagcattgacttccgttgtgaactgggcattgaagacgggcaagccgtcaatgtacgggatttatgggaacgcaaagacttgggaggtatgtcgggaacatacactgtagaattgcgaccccatgaatgtaaagtaatccgtattcaacacaacaccctgaaaatagaagcagaaacagcttccgtaagggatggagcaaaatcaatcaagtaaatgaagtactacaatctattactaatggcttgtctcctgttatcctgcaaggaatccgattccggacaggataacgatggcaaacaagagaatacttacagtggtgccggctacgtcacaggacttgaaaactccggcgccaatgtactctttacagtggaagttctcaaaacaggggactatccgctggaaatcagatatcgaaatacaggagcaacagacgcagcggctttgattatcgtcaatgatatggcgatagagaaattgttgcaacttcctgtacaggctgacaaaacagcctggcaaactgcggagacagaaatatccctgcaaaacggtattaattatataatcattcagaacagtacgtccaaaggcggatgctttgaactggactatataaaaataagaaagaaatcatgaaaagacttcctaattattctctgttatgggtaagctttatcgttttcctctgcacaggttgcaatccggcatcgcaactctctgtaagttctcccgatggtaatctctgcctgcatgtagaaacagaaaacggaaaactctattatgaactctcacgaaatggaaagtccatactcgataagtcacgcctcgggtttatcctgaaagaagatacacttgctggccatctggaaataactgaagctcttcaccattcattcagcgggacatgggaacaaatctggggagaagaccggattgtggaaaacaactatcatgagatgaccattcgcgtacagaaaacatccacccccaaacgaaaattcaatgttgtgttccggctgttcaatgacgggttcggcttccgctacgaatttccggaacaggaagcattaaaagactttgtgatcatggatgaactcacagagtttgcattgaccggtgatcataaagcctggtccataccttacgaagcacatttttatgaagcactctacgaggcatctcctgtcagtaaactcggttgggtaagcacaccgctcactatggaaaccaatgacggacttttcctgagcatccatgaagccaatctaacagattatgcagccatgaatcttatccctaaagaaggtagtatgaccctgaaagccaatctcactccatggtctacgggagaaaaagtatttatgaaagctcccggtgtcactccctggcgcacgatgattgttgctgaaagcgcaggtgatttactcctgtcacgccttatgctgaatctgaacgagccttgccgcattcaggatacatcctggatacaacccggaagatacattggaatctggtggacttaccacatgcataaacacacctggcacacaggcccacgccacggcgctaccactgccaatgcactgcggcatatagactttgccgcccgacacggttttcagggggtacttattgaaggttggaacaaaggttgggatacttatcatttcaactttaccgaaccttatcctgactttgacctgaaacaaatcaccgactatgccgcttccaaaggcgtgacgcttatcggccatcatgaaacggacggctgggtatctgattatgaaaaccaaatagaagcagccttcaatttatataaagatcacggcgtgcaaatagtcaaaacaggctatgtaggcaaactgctggatggcaaagagcgacacagcagccagtttggtgtacgtcactaccggaaagttattgaactggcagccgacaagcatattatgattgacaatcacgaacccgtgatgcccaccggactgcaacgcaccttccccaatctgatgacacaagaaggtgtacgagggcaggaatgggatgcctgggacaaagatggcggcaatcctcccgtacacactaccatcattcccttcacccgtgggctggcaggtcccatggatttcacccccggcactttccgcttcgaaaatccggtgttgcctcagacgcgtgtacaaacaacgcttgccaaacaattggctttatccgttgtcttatacagtcccctgcaaatggcctccgatgaaatagaaaactacgaacggaaccctgaaccgttttcatttatcaccacctgccctactacttgggaacagaccatagtacccgaggcaaaaataggcgaatatgtgacaattgcccgtaaagaacgcggaagcagcggacgttggtttataggaagcatcactaatgaacaacctcgggagatgcaacttcccctctcctttctggataaaggaaagcgatataaggctgttatctacagagatggagataaggctgattatcgtaccaacccatacccagtgataatagaagaacaggaagtaactggtgaatcgaccctgcaaatagcacaggcaccgggaggaggtacgggaattatactcactgttctctcctcatccggagcaacctccgatatacaaaaataaatgccggcaccagaaacaggacagccgcaatccatgccgtcggatcaccgaagcagaccgcaagatagccgaaagcgggcactgcataaagactgaccagcacacgtgctatcatttcggaaactccggaaagcatagcaagattggtatatcccgctccctgaatggtatatcgcagaatacagagcaatcccaaaaccgggaagaaggacacggaaatatgcaggaacaactccgtgtccttcaatatttccagttcagacgcttccacaaaaagcaaggcaaacgtacgtgcacccagcatcaatacgcagaacgtaaatgcccagtaaataatcatcattaacgcacttacctttactcccatccaaatgcgttcaggcttgcccgcaccataattctgtccggtataagtagccatagcaatgcccagactttcaagcggacacataaagaacatcttgatgcgcatggcagccgtaaaagctgcaacacaagcagttcccaatgcattattggcgctttgcaacatgatgcttccgatagcggtaatcgaaaattgtaatcccataggtacaccgatatacatcaatctccgtgccagagcaccgttgaatttccgttcatccggtgttccccgcaatatatcaaaacggcgcatcatgtatccataacacaacacagccgacacaccttgtgaaaagaccgtagcgatggcagctcccgccactccccaatccagcaccaggatacagaacaagtcaagcaaaatattaagcacagcagagaacagcagaaaccagaaaggcgtcttactatcgcccaaagcacgaatgatgctggacaacaaattataaaagaaagtacagggaactccgataaacgttatcaataaataatagtaagcatcctggaatatgatatccggtgtacgcatcatcagcaggatatccccacacagaatactcgtaaccaccgcaatcaccaccgacatcaccgccgccagttgcaaactgaccgatatataacgacgcatcgtgctataatcccgcgctccgaatttctgcgccacaggaataccgaaacctccacaacatccattgcagaaaccaagaataaggaaaactaccgaagtacttgctccaaccgaagccagtgcattaatgcccaagaatttacctacgattgccgcgtcgaccagagagtatgtctgttgtagcaggtttcccatcaacagaggcatagtgaaattgaatatcaacggcaatgcgcgtcctgccgtcatttctcttgatgttgccataaattaatcctctgaaaattgcacgcaaaggtagaaaaagataagattaaaggaattgacaaacatcaaaaatatgcttcaccatgaaaagaattaaactacagtccgtccgcacctttcaaaactgaactatgtgccaggtattcgggagtttcagcatagatatacatcacacttcctcctttgatggcatcaatgataggacgggaaagtttttgcggaacagccggacaaccaaagcttcttcccaaacgtcctcctcggctgactaccgaaggatcagcataagccgccccatgcatcacaatggcacgctcacgagcccggtcgttgattcctttttccaaaccattcaaaataagcgaatacccattctttccctgataagtagattctgtaagatagaaccccagtgaacttttgtaggaaccatattcgttggagaaagaagtggcataattatcaccgctattctttccatgggaaacaaccgatgaaaaaagtactttacgctccctcatatcaaatacaaaaagacgttttgcggtagaaggacgggaaaagtctatcaatgtcaacacctcccgcttgcgattgtctattttataataacctgctacagcctgccggaaagctttccagttaacgactccttccaactgcatggaacggtataagctcgcataagcctcaacatcagatgcagcagccctttcagcagaatcaggagtgctatctgacgacttgccgcccagaaataaggtacaaggaagaaataagaataaaatgaatacaataaatcgcaacataaaactttagccagagaaataacggcggctaaattacatttttttctccagacacctatcacacagatagttaaaaatgaggattcactattcaatcaccacaaccaaagagcgttcggtaggtgcccaatcgaaaacgaacttggaatgtgaagtggcattgcgtacacacatatgcgaacgtggagtagtccctaacgaccagctatactcaatcatacttgtacgcggtgcattcaccggcactccgtgaatataagctccgttcgtaaaacgactggcatagggggcatagcctcctgtctccgccgaaccgtctttcaggaacaccatacgcgttttcttctgttgaagcagatacattcccagtggggtttcctgagcataaggtggagcatgcattccggtagtggcaggattcatgctgcgtatcttccactcaccttccgagacatgttccaaggtagtaatattctgatccaggcggtcgacaaaaatcacatgattaaagacggtgctatccggcaattgtttcagataactgcgtggcgccagccattcttcttcaaaagtggcgggtaatatccggtaaaaacttccttcctcgcctttcagataagcgatagtaccgtctctaccataacgttcgggcaccaacgtatcagcgggcagatacagcggcaccgattgatagcgctccacgcccaatgtatcagatacacggcggtacacattccgcacgaacttacgtaccaggggagcttctttattcagattcttataattctgcaacaccacccaccttgcggtagtatcgcgctgcatattctcaatataagccagacaattccgaatgacatcccatttgaaagagcgtaccgtatccttatatggataggtatcttcgagggtatgctggtcatagagcaattctttggtaagagaaatatcggcagcggtcaactgtttttctttaggatgaggaaattccagcacagccgtatccttaggttcagcctcctgcacaactaccggcacaggtggttcctgccggttacgacatccggcaaaaatcaaaccaacagccacgcaggcaaaaagaacgaaatgtttcataaaatgaaatttaactataacctaataacgactacccgcctgttattgttgactctttatagaaatcaattacataatgaagtaacatcaagtatcgtttcacctcattcaggtaatacgggttttcgcaaagataggaatttaatggaagcttccgaaagatattgacggtataatttcaatcatccgcttacgaacagaatcttttatatcaagattgaacaaagcagaaagactctatctatcaacaaattacaaaataccaactccttgcatacaaaaagttaacttcctgttgacaagaagttgagaccttgtcgacaggaagttaataccttgtaagcggaatatttatccccttatcaaatcatcgaaaccgatagctttctctggttactccaacactttctttttcagattaaatgttgacaatacttttttgccggaatagagtgtcactatcaaatcatattcttttccttcctcaaacctatctttagcagaaagcaatatgtctgttttttcataaggcttcaatgccggaaccataccggaagctacttttattgttttcccttcctttttgtaccctacttccaccaatgctttcttcgattctacctgaccgaaattctgtacttccactgtacattccaatcctttcccggatttggtaaagactggggcacgagctgaaaggatcggttctatataatcaatgtatggcaaacgcgcatacccgtaaagtattcttccgtctttgtattttccaatcaacttcggggcaaattcatctttagtgataccatttccttcgccattgaaagttacaatcaaatccttgcccgcattttctgtggtcaatacctgacagcctctgccataattcacttcttcagaagcaccgaagcgcaaggaattcacatctatatctgtctggggattgaagccttcttccgcttgtatcttcacacgaattgtttttgtgcccgaggtgataggtttctcgtccagtatggtaagcaacaatcccggattcaagggaatactaatattctttgagctatggtgatcaaaaggtttatcttcgtttttaagcgtatcgattaccgcaaaattagcctgaatggcacgtccgtatttatcctgatacactttaaggcgttcatatttgaaccagtcttccacctgtccgtctgcatgtacagcaactcccggcatataagcttcacccggatcgaccacccagttcactccatcctttgaacgaagatagaaagcaatacgtcccagccaatcattaacaatcaggtgatactgaatatgatcgcgccagattaccggatcttcaaaccgaccgtccacatccggataaacccgtttgtcggtcagttgattgtattccgatagtccatctctgctgacccagataccaccaccacgacaaaccatcacataagagctgtcttcacgctggacaaatgaaagattagacaggccttcgataatacggcggtcgcgtgcattgaaatcaaactttccatattcccattttccattcagatcatcggatacataacgtccatcaattacatagacaacataccggccatctttagcacggaacatttcaggattatgtcctttacctatgatacgaacaggcttgaaaggccctgtcagattatcgcttacggtatgaaatacgtatgagttaggccattccatatgtcctttaggtgaacattccagccagccacagacaaatagatgatatttaccatcttcgccttttcggatatttccaccccaataggaccagataccgtcttcaatgccattatctacataacgtggaagcacacagtcagcaccccatgtatcggaggaaagtacatttcccttcatcggcagaaagcgatccataaagcgggcgcctttcactaattgtttccactccgcaggacgttcccgttccgttatttgtgaaaaagaggaatgactgatcaagaacatgactcccagtagagcaaatttaaagaggcttctttccataaatataatattagaattggttttaaacagatttatgtggtcaaaagtaggagaattgcatgtaaaaggaaaaggaaagaaagcaaaaaggtacgtaaacctttacgtaaacagagattacaaagtttcaattctattttcaccacagagtaacacagagtctcacagagtttaatcgatttgaaatcaaaagaatagaactccgtgagactctgtgttactctgtggtgagaacttattactataccgttacgagaaagcacccgtttcactttataggaacatttgtttccttattgtgggacatttatttcttaggtaagacacttttatttcttacttgagaaacttctgttccacaggcaaggtacttttgttccaaaaggcagaaactaaatggagcaaacagaggcacgacaaagcatcagtatccccctctccaaccataagaaaaggcgtaatcttacgaccacgcctttcctcttatcaacagggctatttcgtcaataagccaaaacattccaaagatcacgaattctccgttccggatcccacttcccgccaaacgtccattgggcagtgatgccataaaatgccggtgcactctccgcctgttgcagattattgtccaaccaaccgctatggcctccctgacgacgacaaccatagtaataaacacgctgtccccacggacaaggatcgagcactttgtccgaataagcataaccaatattgcaatccagaatctgttccgacatctgacaattgataataaagaactgagagtcatgatgccaacgaccgagaatagttggtgattgagcatcaaaagacgaattagtgataaccagtttcttactcttatcaccccgaccgtcatgccagatcagtgcacgaccatcgccataaaaccgacagcgggtagcataacaccacccgcgcgggcaaagaaaatccactccgggacaacgcagataaagatcggcatgataatacattccattgcctgccggcgcccaaagtgaaagtgcatcattaccatcagcccatacattgcaattaataacaatggtacgtgtagcacgtccaaagatagacatctggtgggtggtagtgttctcaacagtagttccataattgttatatactgtcagaccgctaatgacacaatcatcagccccctcttgcaacacaatcacaccattgcccacaggttttccatgatattgagtgatggtccttgtcttagcagtctcggctaaaacaatcactgtactgtcacggctctcacctaccaatacaatgttcggacggtctatgataaccttttgattatagttaccttttaatataagaatcttgaaaggatttgtcggtgtctcaggtgctttctcaatggcatcctggatactttgtcccggcttcaccaccacatcgaaagctgtgcggtccatcaccggacgacgatacatttcaataattcccctctcattagccccttgggaattcagactaacatttaccttgtgcttcggatcatacttagctgcccagatatcatactgttcgaaaagctcggccgggcgactgttataccagctgtaaccattgcgacgttccactccgatttcctccaatcgacgtcgtggcaaaccatcacggtcgcaaacataaggttcgcaatacttcaaatcataataacgtgcccatatcggcccggcctgcgtatcttctacaaggcgggtatcacgtacaccatgctctcctgccgaccgttcacaccgcaaaccggtgagtttatacgtatcaaaccatttcatagctccgtggacagcccgtttaatacgtgcatcaggtttaggcaacgtcataagtaaacgcacgatggcagcactctctgccgagcaatacgagggcaactcataggcacgtgccgaagccggtttcaaggtttcacggtcgtgttgctgacaccataccgtaagctgtccatcagttacgatctgtgttgccagaatacattcaattcccttatcaaaagctttcgacagccgttgacgcattgccttgtcggtgaggtcaccgtcataaggaaattcagcagtcataatgtcatgcagtatttccagtgtattaactatcgcatcatcattaaaagtaatatgtacctgatatccgcgcatttccggccagaattgcggccatccgccattctcatactgaccgtccaaaagatactccaccgccagacggaaagcgtcacggtagcgcacatcgtttgtctgcctgtataaacgagccagataaatcatctgcatggtggtcgcgccattatcaattgtcgaatcgttacggcgtgatttctcctttaagacttgtgctaattcctcattactcatcttttgagtcatatcgatattcttcggccaaccaccggtacaacgctgaaacgccagcacctgattgcctatgcgacgcgcttcttcagtcttgaaaaattcattgtttgtttcgcgtaaagcattgcgtcgcggcatttgctgtgccattgccgaagagaatgctatcagataacctatcagaataacggcagcatacgtctttctgaaaataaaaatctgtttcatgatccctgtttttattttgttagataattctttgcaaaagaagacatttcataaaacatcgaattataatattcagcttttcctttacaaattctgaacatagggtacgctttttataatttcaggtctaatcattgcaataattcatcagtttattggtatctgataacttttcccgatatttgtatgacagaaaaatacagatactatgctaaagccggtcatcaccatactactctatttattcacccctatgttgttcggacaaagtctgatcaatatgaagcactattcagtacaagacggattatctcagaaaaacgtccataattttatccaggatgataatggttatatatggatgtccacctggaacggactggaacgtttcgacggatactcattctataattataaaacttacccggaaagtcctatccgcataagcaatcatcgctttaccaaaattaaaaagagttcattgaataacatctggtgcctgacttatgataaacgctgttacttattcaacacccggacatacgaataccaggaccctttcctttttaacaaaagcctcactaattcagttagcaaattgtatgcactgggaaaagggattacctgggccgtcggtatgcagaatgagctgtatcgcatagatgaaaataagtttccggcgacagagtccgtcgagttatattccggaagaaatgaaagagataccatttatggcattacccaagataaggatggagatgaatggattctgactaacaaaggcgctcttattgtaggtcagaaaagcatatctaatctaatgcctttcgaatttatggtggaagttcccggtggaatttacctggccacttccaaaggcttcttcacccggtatgatactcaaagccaggatgtattgccatgtgttcccgaacaaccgatatcagagatcacaggattaaaaagtttagcggataataaaattgtaattctacagaatagaagcattatactttacgatccggcaaatgaaaaattcacagtccatgaaatgcccatagaaatagattcagacgtatttgaagacaaaaaaggaaatctatggctactgggtgccaacaatggagtaatcctattagataaggaaaatgaaaacaccaccttattgaattatcccagatactcggaagtccctttctataaaccttgtacttttgtgcatgaagacgaatatggttgtatctggctcaaacccgcaggaggtgagttatgcttttacaatccggtaaaccgttgcttagagcaggcatctacttatgaaatgggaatgcggaagcctgtttcattccaggccttcagttatattatcgaccgtcatcagaatctgtggtataccaaaggagatggttttggatacctatcattccaccggaagaaattcgaatatagattcgataaccataaagaagcacgtgctttgatggaagatcatcagaagcgcttgtgggtgggatggaaacgtaatcacaaaaagcaatcgagcaacgtatgtctctacgatccgtcgggacaatggattggaaatctttcaagggaaggcaaaatagtacctgatcctaccgttaccttcaatatagatgtatattgcatctacgaagataaagaacataacatctggttgggaaccaaagacaacgggctttatctattgcatcccgaaagagacaacagttaccggattacccatcacctatcggataaaaacaatccgtatagtatatcttccaattccatctactccattttgcaagactcagcaggacgtatatggataggaacttttggaggaggcctcaacctgatagagcatttaccggaaagtgccggtctgcgtttcattcactccggaaatattctcaataactacccgattcatgtatgtgagaaagtacgttgcctgtacgaggcagataatggagttatcctgattggaaccacaggaggactactctcttgctcctctgattttgcaagaccggaagccatccgtttttaccataacgtttgtgaggaacgttattccagtttgagtaacaatgacgtactgaatattacccaaacccataatggcaaattattggtcataacactgagcggaggaattaatctgttggatgacagtagcaggctatccgaaaagctgactttcaaacattataacgcgacgaatgggcaagtacccgatttatccctttcagcaatcgaagactccgaaggcaatctatggattgcttcagagaataaattatcaaaattggatgccgatatgaatctgttggaagagtacaacgatcagatacaaatggctgagacaaagcccgttttgtgttcttccgggaagttaatattcggttcggaattcggagcattatgtgttacccccaaagacttatataagagcgattttgtacctcccatcgtattctcgcatttggatatttatctaaataatacatcccgccggcaagaagtgttcaatagtacagaaatacaatccttaaaggcagacgaacggaacttcaccattacattcgccgctctggattacgtaaactctccggccataaaatatgcataccgcattcagggattgaatgaccagtggattgaattgggaaacagtcattcagccagtctggcaaacataccggcaggcgattatctgtttcaggtaaaatcgactaacggagatggggtatgggtagataacgcaacttctttacctatacatatcgaaccgaccttttttgaaacaatctgggcgatattgctttatattgtcataggtattgctgcattgctcatcgtaatatatatcgtaatccgcatcactaatttgcagcgcagagtagatttcgagcaacagctttccaatctgaagctacgttttttcactgatatttctcatgagcttcgcactccacttacactgatagccagtccgatagatgaagtcatcagtaatgagaaactatctgacgcaggcctggagaatatgcaggttgccaaacgaaatacagacagaatgctacggttaatcaatcagatactggattttcgtaagatacagaatgataagatgaaagtgatggtagaacagttggatgtgattcctttgataatgaaaatctatgagaatttcacttccatggctcacaaacgacatatagaattccggttgaactgcaacttcaactcttttgtgatgtacacagatgtggataaactggagaagattctctttaatctgttatccaatgcattcaaatatacatccaatgagaaaaggataattttatccgtaaccggcgaaaaggatcatctgtacttacaggtaaaagatgaaggacgtggtatcaatgcccaaaagatcaatcaactgttcactcgttttgaaactttagacgaggctgatccgaacctctcgacaggcatcggtctgtctctggtaaaagaattgctgaacttgctgcatggcaccataaaagtagatagtaaattaggcgaaggcagtaccttttcggtcaggttaccaggaagctatgagaccttcagtgcagacagcaatgtagaattcatcctgaatgacagtgagaattctgaattgcagagagagaatgaggggaagctcatagaagatgaaaataaagaaacccggattctgattattgaagataatgaagaactacgtcattttatatgcaatgtgctaagcaaagattatgtggtttttgaagcggaaaatggaaagcaaggattagataaagccctggctgaaatgccggatatcgtcatcagtgatattatgatgcccgaaatggatggaatagagttcctgaaaagagtaaaagcaaacagcaatatctgtcatatccccgttattctattatcagccaagtcttcattgagcgatcaaattcagggattggagtatggtgcggacgaatatattaccaaacctttcagttccacttatctgaaagcgaaagtagactccctgttcaaacagcggcaaatgctatatgattattacacctctaaaataaagagagaaaaaataacgaatataacagaccagatagaatctgccactccccaggtgactcattttgatgatgacttcatccggaatatacttcagagtgtagaagaaaacattcacaatcctgactttaagatagacgacctggctgaagctatgggaatgagccgtacagtattttaccggaagatgaaatccctgatgggagtttcacctgtggacttcatgaaaagtatgcgcataaaacgggccgttcagttattggaacaagatcaatatactgtttctgaagtgggatatatgagtggatttgcaactccccagtatttcagcaaagtgtttaaagagaccatgaattgtactcccaaagaatataaactgaaaaaacatcctgatgaactgaaattgtaatgaatcgcacagatattataaaacgaaattgggaggatggcctatatttgcaccctatataatttcccaaagaactactaaattaagagataacaatgatgaaacctttgtttgttatgctggctgtattgccttttctgtcggcctgcaaccaacctgaatcaccaaacgccgagctgtttccggctgccggtgctgagaatgtaaatccggatacccatctggtactaactttcacggatagccccatagtaggtgactccggaatgatacgcatttatgatgcgatgtcgcaccagatagtggacagtctggatctgagtatcccgtccggacctaccgaaagccgcacgtatggaccggaatgtgattacaccaaaataccttacgactatacacgtacccatatgcctactaacagggatactcgccccggcaccccctcaggtacggcagaacctaccccacccgattaccagctgaacatcatcggtggatttacagatgcgtttcatttccatcccatcatcgtgcgcgattcgacggcaaccatctatctgcacaacaatatgctcgactataaccatagttattatgtcaccatagacgaaggtgttctgactttacccgaccacagtttccacggtatcagcaaagagcataactggagcttcaaaaccaaagactccgctcccgcttctacagacacactgattgtagatgcaaacggacaaggtgatttcaacaccgtgcagggagcactcgactttattcccgatttcagtcagaaacaaaccgtaatcctgatacaagccggcgactacgaagaactggtatatgcccggaacaaaacaaatgtaaagattaaaggtgcaggaatggaccagacccgggtacactatgctaacaacgaagttttcaatcctcatcccctgacagtgaaaaccaacgaatggccgggcacattcccatccagaagagccgctttcatgctggataattgcagcgacatcctactggaagacctgaccatagctaccgacctgcatggacaagctgaaggtttgctgctgaacggtgaacgtattgccctctacagtgtacatatcatcggttccggagatgcattgcaagcaaacgggacaatctatatggagtcgtgtgaactggacggaggtggtgataccatcctgggacgtggcagtctgtttgcctaccgcagtaacttccgcaacgacggaggcccattctcctgggtaagaaacactacgggaaatcatggtgatgtctttgtagaatgtacctttgccgcccccgacggaaagaaagccgactacggacgtacaaaaagcaatcacggaaccgcttacccggacgcagagtttgtggtaatcaactgtaaggtgaaaaacattatcccacaaggatggagtgctattggtgagaaaagttcccggatgtatgagttcaacacttgcgatatggaaacaggcaaaccggtggatgtatcacaacgccatgcctattcacgccaactggatgcgcaaaaagacgcagcgctcattgcggattacatgaatccggcatttgtattgaaaggatggcaacctttcagttatttgaaataatcctccataaaaaaacatcaatcagaagctaatatataaagtatgaatcagaagtttctactactaataacaggtgtcgtactgaatattttcatcggctcctctcaggaaagagtaaacctcgacttgtcctcccaaccgtggaacatcaccttagaccgtgcagccgtctggcagaatgatgagttatatcttccgccgatagatatcaaagcattgcctgtaaacactccgacagggggctggcaattactgaaacatcccgataaaacaggtatcaatctgcctgccacagtagaagagcacctgtggggatggaacggacagacattcggagtgacaggaaactatacgggagtttcctggtttgaaacagaagtagacattcctgccgaatggaaagacagacgaattgcaatgaatatcggctccgtgaggttccgtgctgaaatatttgtcaaccatcaactggcaggatatgatttagtgaacagtactcctttctccatcgacatcactccttttatagaaccgggcaagaagaatgtaatcactttccggattacagatcctaacgggaacttcaattggaaagattcacaggtttatacctggggagtatatcgcaccaatccctcacacggcttcggtggtattacgggaaaagtggaactggaagctaccggaaagctttatgtgaaagatgtattcatcaaaaaccaaccggaacctcatgccattgaagtagaagtcagggcagtcaatgaaaccggagcttctgtcacaaacaaggaattatgcctggaaatcaaggaacatcccaacggacagaccgtataccgcaagaatgtccgtctggaatcactgaaagaaggtgagaacctgcaaacttaccaaatcaaagtgcccaatgcacacttatggagcgtagactcgcctcgtctctatgacctgaaaatttctctgaacgacgatgccgtaactgagcgtttcggtttccgctggttcgaaataaaagacgtaaaaggagaccggcagttcttcctgaacggcaaacgaatcgtattacggacagctatctcatggggattctggccttataatggtatcactccttccgatgaactggccaaacggcaaattacgatagccaaagaactgggattaaacatgctgaactttcaccggaatatcgggcaaaccaacattctggactatgctgatgaattgggattactctattttgaagaacccggaggtaatcagtaccccataaaaaacttcaatgacaacgacaagcaaagtaatttctattttgcctaccgcaacgagaaactggcacgcatggtaaagcgggaccgtaaccatccgtcactcatcatctacaatctgcataatgaacgtggcgcttatccccagactcaagattatgaccagatgcgcatggcacatgctttggaccctacccgcatcctgacttataattcaagcaacggagaaaatccggcggaggaacacaatacgcgtttcaaattgcatctgatgccttatgacactaccttctacgactatggatggtatgaccggcatcatgcaggtggtcccggatgttatcatgacaacttatatctgggtaaagataactatcaccgtttctccgatcataagaaagaaattgtatactggggtgaagacggggctatcggtactcctccacgcctgcaactcatccgtgaagatatcctgaaaagcggcaagatgaatagttgggaagcggacgattatctgcaatggtatgacgcctacgaccgttttctgaaagagaaaggatttgacaaagccttccccacggtggatgacctgacgcgttctatgggaaatgtttccttctattatcagggaaggatcatagagaatatccggatcagtaatacagtagatgcgtatgccgtaaatggttgggaaagtatgaagcttgagaatcattcgggcatcgtcgacaattaccgtttcccgaaaggagatccggaagtcatggcccgctacaatgcccctctttatctggctgtcaagatgaaccgcaaggtagtgagtacaggagatacaacgttggtggacacttacattgtgaacgaaaagaatctgaaaggttcttatatactgaatctggtagccaaagatgagagtggaaacgtagtggccagtcataaggaacgggtggcagtgaaaggtggaaacgactacggtcaatgcctgcaaagcggttgggcatttataccgaagagtaaaggttatacccgtatagaggcttccttactgaaaggtaaaacagaattggtcaagggagatgatctgttgtttgcggttgaactgaatacgaaaggcatcacaacacggggcagtgtagccgatacgacaggagctctggtaaacttcttacgtggtgtcggcatggaggttccgggttacaaaggtggcactcctgaaggagattatctgctggtcggcgcttatgaacctacgcaatggggcagtggcatgagcgacatcatggaatgggtatataaaggacatactctgattattgtagacaatccggaacgttgggcagaattcctggcagataaagaggtactggactatcgtggttcgaagattctgggtaaatcatggtatggaggtaacttcttcaaccgggagcatcctatctttatgaacctgccggcaaatagtgctttcaactgggaatatcaatgctttgccacgtacaaccggcgtcgtatcggtttgcggtgtttcaatggtgagacacttgtaggctgtgtttccgaccataagaaagaggtatattcagccttacaggtgataccggcaggaagtggaaaagtaattatcactacgctggatatccctgcctgtatcaaaggaatcaaggagtatacctcacctgtcgatttggatggtatgaatgaatctatgaatacattcaatacgaaaagtgaaaaccgggctaatgtggtaggacaacagttgctactgaatctattgaaggaagtttatagataagaaaggaaagagcaaaactacatgattctacgggtaagcccggatgaaccatgttcagaagacaagaagctaaataaaaagaaagaaagctctgaaataatcagagctttctttcttttggtggacctggagggaatcgaaccctcgtccaaacgaggaaatcataagctttctacatgcttatctttgcctaagttttcgagcaacggcagaaccaaagccatcaaccattgccttatcctttaaagtttcattctcgcctcaaggccgacaagaactatccccgatgtaactgcaccactggatcggaatgcttcggagcaacagcttccgagtgatgtctcgtcccagcacctagtgccgggattaagctaatctactatgattcgattaagcagcaagagcgtattgtctttcgccagataaaattttgaggactgagattaaagtgcaaatcaacgacgcactgcatgcttacttactatttctacccgctgtcaaatccagtcaagcccagaatacatacggtttttagaaatcgtggggcaaagataagaattctttttttactgtacaaaagaatagtgtgattgcttactccggattaataaaccttatctttttataagacccaaagcagttttgcattaccatacgtacaataaaagccagtactccggacgattttacctttctttctcccacataacccgtacctttggcaacagaagataatatacacaaaaatataaatatcatgaagaaactaattgcaatgacactactgcttggaggcagtactctgctctgcgcacaaaagaccgtgaagatacccgctgtgtacaaacccgtcaaaagcgagatgtacaagaaaggctggattgatttcaacaaaaacggagtgaaggatgtatacgaagatccgaatgcctcgctggatgcacgtatcgaagatctgctcagccagatgacactggaagaaaagacttgccagatggtaaccctctacggttacaaacgtgtactaaaggacgacctccccacccccgaatggaaacaaatgctttggaaagacggcatcggtgccatcgacgaacacctgaacggtttccaacaatggggacttcccccatcggataatccctatgtatggccggcatcccgccatgcctgggcactgaatgaagtacaacgcttcttcatagaagaaacgcgcctcggcatccccgtagactttacgaacgaaggtatccgcggagtagaaagttaccgtgccaccaatttccccacacaactgggattaggacatacctggaatcgcgaactgatacaccaggtaggattaatcaccggacgggaagcccgtatgttgggatataccaatgtctatgctcccatcctcgatgtcggccgtgaccagcgttggggacgctatgaggaagtatatggggaatctccttacctcgttgccgaactgggtattgaaatggtacgcggcatgcaacataaccatcaggtagcagcaaccggaaagcatttcattgcttacagtaacaacaagggtgcccgcgaaggtatggcacgtgtagacccgcaaatgtcaccacgcgaagtggaaatgatacatgtctaccccttcaaacgggtgataaaggaagcgggactattgggagtgatgagctcgtacaatgattacgacggtgtccccatacaaggcagttattattggctgactacacgcctgcgtggcgagatgggattccggggatatgtggtttcggacagtgatgccgttgaatatctctataccaaacacagcaccgccaaagacatgaaagaagccgtgcgtcaaagtgtagaagccggtctgaatgtacgttgcaccttccggtcaccggactcatatgtattgcctttgcgagaattggtaaaagagggcggactaagcgaagaagtcattaacgaccgtgtacgtgacattctgcgtgtaaaattcctcgtagggctgttcgatactccctatcagactgaccttgcaggggctgataaagaagtagagaaagctgagaatgaatctcttgcattgcaagcctcacgcgaaagcctcgtcttattgaagaatgaaaacaacgtgttgccattggatatcaacaacgtgaagaagatagcagtttgcggccccaatgcggacgaagaaggatacgcactgacacactacggtcctttggcagtagaagtaaccacagtgctggaaggcattcgccaaaaaactgaaggcaaagcagaagtgctctataccaaaggctgtgaccttgtagacgccaactggccggaaagcgaacttatcgactatccaatgacagatagcgaacaagctgaaatcgataaagcagtagaaaatgcacgtcaggcagatgtagccgtagtcgtattaggaggcggacagcgtacctgcggtgaaaacaaatctcgcagcagccttgatctcccgggacgacaactgaaactgcttcaagctgtacaagcaaccggaaagcccgtcgtactggtactgattaacggccgcccgctatccatcaattgggcagacaagttcgttcccgctattttagaagcatggtatccggggtccaaaggtggaacagcagtagccgatgtgctcttcggagattataatccgggcggaaaactgacagtcactttcccgaaaagtgtcggacaaattcctttcaatttcccctgcaaaccttcttcacagattgacggtggaaagaatccgggactggatggaaacatgtcacgtgtcaacggtgcactctattcattcggatacggtctgagttacaccacctttgagtattccgacatcgaaatcagtccgaaagtgattacaccgaaccaaaaggcaactgtacgctgcaaagtaacaaataccggaaaacgtgcaggcgatgaagtggttcagttgtatgttcgtgacatcctgagcagcgttaccacttacgaaaagaatctggcaggctttgagcgtatccacctgcaaccgggagaaacgaaagaggtagttttcaccctcgaccgcaaacaactggaattactggataagcacatggaatgggtggtggaaccgggagacttcaacattatggtaggtgcttcttccgaagacatccgcctgagtggaaaattgacagtagaagatccaaacgcccccatgcaagcacaggcaaaaccggatgctcccgtaactgccagcaccaatccggaaagtgtaatgaacgtgctcgataaaaaaatgaatactgtttgggaaggaaataaaggagattatattacctttgccttggagaacggctccaaggtagatggcgtttccattgcattcagcagaggcaacggtctgccggcggagtttgaaatccagctttcaagtggcggcggacaattcctgacagtttattcgggtacagtcagcgaatacggaaagttgatttcatatacgttcaaaggaactactgccagcgacttgcgcattgtgttgaatgatgaccgtgtaggagtggcggaagtgaaaattaacgattaactaaatactaatcactaatgaaatctcttcttttctgtatgcttggattagcaatgacagcctgcgcaccccgcaaagcgggaaacgtaaacaacggaagtgacgaactcgccatgctggtaggtacgtacaccgatggaaacagcaaaggtatttacaccttccgcttcaaccaggaaacgggacttgccacctcgctcagttccatcgaagtgctcaacccgtcttatctcatcccttcagaagatggaaggtttgtctatgccgtcagcgaaatgaatgacacaaccgctgccctcaatgctttctccttcgataaggaaacagggaaactcagtttgttgaaccggcagcccactatgggagccgatccctgctacgttgccaccaatggaaaagaagtactcacggccaactatagcggaggtagcatgtctatcttcccgctgaaaaagaacggttcattagagcctgtcgatacgctttttgaaggcagtaccggcggaccggacactgaaagacaggcaacaccccacgtacattgcactgtcttctctccggatggaaaatatatctttgccactgacttcagtgccgaccgcatcctgcgctttgtcatacatccgaagagcattatcccccacccttctgccgaagccattgacgtagatcctaactccggtccacgtcatctcaccttcagcccgaacggcaagtacgcgtatcttatcagcgaattatccggtaatatcaccgctttcagctacttggatggcaaactggaaaagatacagaccattgcagccgacacacttcgtgcgcgtggcagtgccgatatacatctcagtcccgacgggaaatacctgtatgccagcaatcgcctgaaaggtgacggtcttgccatcttcgaagtgaatccggaaaccggtatgttggcaaaggtaggctatcagttaacggggattcatccacgtaactttattatcactccgaacgggaaatatctgttggccgcctgccgagacagtcatgtcattcaggtattccaacgagattccgtaacaggtctgttatcagatacccatcaagacatcagtattgataaacctgtttgcatccaattcgtaaaataaccgggtaaaagcttgacttccggtttttaatttcgtatatttgtcatcgtaatcctgatttagattcggggacacagatagtaacagggaaaagcatttgcttctccctgttttttatatccgataccttttcagagcaaaaacaaacttcttcaagtcaaatgacatcatctattgagacaaaacaaactatctaatgaggtaaaacatactatctaacgaggcaaaacatactatctaatgagataaaacataccatcttatgaagcgaaaagcaccgatacctcccttagacggtcgattctgttaatattccgtaattctactcttgacaaaaataacttcattaactttgtcccttaaccgaaatcgtttaaataacgcgacttatgaagaaaaagaatatagtattactctcagccctgttgttctccgtttctgccatagcgcaaacagaagtgacggcaggtgtcacacgtggcaaggattacggcgtaacttacgtacttccgaaaacggaaatcgaacttaccgtacaagccaccaaacatacctacactcccggagaattctccaagtatgccgaacgctatctgcggctgaacaacgtctcttccgaaccggaaacttattggacactggacaagatgcagacagaagtaatcggtgtacccgataaagaaaacgtatatttcgtgaagatgaaagacaaaaccgtagccccgcttatcgagttgagtaaggatggtattgtctactccatcaacatgccgctgggcagcggacaacgtaagacaactccgaccattcaacccaaagttacaggtaacacgccgaacgtcaatccccgagacttcctcacagaagaaattctgatgtcaaactcaacggctaaaatggcggaattggtagccaaagaaatctacagtatccgtgaaagtaagaatgccctgttgcgcggtgaagcagacaatatgcccaaagacggtgcacaactgaaactcatgctggacaacctgactttacaggaacgtgccatgacggaaatgtttgcaggtaaagtgagcacagaagagaagatatacaccattcgcatcgtccccaaagagatgaagcatgaagttgccttccgcttctctaagaaactgggtatcgtagcaaacaacgacttggcaggtgaaccggtctacattacgatagccgatcttaaaagcattaatatccccgaagccgatcccaagaaacaagtggatggcattgcctacaatgtaccgggcagagcacgtgtaacattagattatcacaatgaggaactgtataatgcagaaatacctattacgcaattcggtgtggtagaatacctcgcccccgttctattcaacaagaattctgttataaaggtattattcgatacgaatacgggagctttggtaaaagtagacagagacggtaattaaagaactgaaaaagtagaataaataagagaaggctacacggtaaatgaatcgtgcagccttctttgtttagtttcctatccctaattttataaatccatctttttgtagttgcatcacataagtcgtgactcgcgaagcataattctcatcagattggaagtgaacggcaagcagtgaaataatctcccgcaccgtgcgccgcccatctatcagccgccacacagcactgccgtgttcttcaaggcggacatgaatatcaggagacatactcttcggcagtaaaagcctgcgcatccactcatacttgaaccggggataggagattacagcgtaatctccctcccattcggtcaggatgtggtcgcaacgaaccggaatagcatccagcagactgacttttccttcaggtgtttccatatccataagttgtttttacttatccttgaatattaggttcctccagttgatagccatacttcttatctgctcttttcaacataaaggctaccacaagagataagcaggcaataccggtaaagatgcacatcggtatcgtataatcgtacagattcgttccatctgccttcttgcctacgatacaatagacatcaagtactttaccaatcagcgtaggaatcccccacaaaccaatattctggatgaaaaagatcaatgcataagctgtacccaactggctcaccgggaatatcttggcaactgccggccacatagcagacggcaccaaagagaaagcaatacccagaataatcatcaaaccaatagctaccaaccaatagttaatggcaggaatagcataaataaagtgcacacctatcagcatggcagctcccaatatcataatagaagccgacttaccacgcttatctataaatccgccgaatataggggtcaggatcagtgctcctaaggccggtagtccggcaaaagttcctgctacgttttcattgataccatatttgataatcatcagttcggaagcaaacttctggaaagggaatacacaagagtagaacaatacgcacagcaaagctatcaaccaaaaacccggattaacgaggatattcttcacatccttaaaggagaatttctcttcctccccctcggtacctgccgctatggctgccgcttccatctgtttgtccagcttcttatccatcactgaaaagataaagaaagcaaccaaaccgcccaacagcaaaatcaaacctaccaataccggagtcgtaatgccgaaagcacgcgccaaaggaatagccactgcataacctgcttgcgaaccgatacgcgccaatgctacctgcacgcccatagccgtagccaactctttacctctaaaccatttggctataattttagagactgtgatacctgcaacttccgcacctacaccgaaaatagaataaccggcaaacgcgacaaatacccctgctttataaccgaaaatttcattaagaccgaagatctgtgcatccggaccggcaagtcctgtcatggcataatactcaagtgccgtacctcccaccatcaggatggttgacaatttaccggtgaaacggattccaaaacggtcgagaattaatcctccccagatcagcatcaggaagaatacattcaggaaactgtatccacctgtgaagaatccaaaatcactacttgtccaggcaagatccgactccaacatcgttttcagcggtgctaccacatcgtttacatagtaagctgccatcatcgtaaaggcaacaatcaccaatgctccccagcgggtagccttcgagtcattcaatttaagttttaattgttctgtcattgtactatattagattaattattaatcagattgcataatcccgacaaaggtaattaaatctggcataaaaagaaaagaggctgacaccttttcggcgtcaacctctctcttatttctttttgcggttcatccgcacataactttagttagctgaatcttcagcggcaggagcagtagtggcaggagctgcgggagcttctgtctgcggagcagctgtaccagtaggcatgttgtacggattggttttctcttctttctgtgcctgttccaggatcacatcaccgcctttactggaagaagtgggaacaacgtaggcagtagcaatactcattacgaccataaatcctgccaggaaccatgttcctttttccaaaaagtcagtagtcttgcgtacgcccataatctgattggaagaagaaaagccggatgctaaaccgcctcctttggaattttgaatcaatacaatgaagcacatcaacaaggatgcaaccaccattaagataactaagaataagtacattttgttattttgatttagcgttaataatcaatttctccaaaaatctgatttggtctgcaaagtaagcatttttttttggataattcaaacttaattttttaataatttcaagagccttgtcatatcggcgctgtttgatatagattttagccaaagtttcggtaaaacagctatcatcctgttctgtttcctctactgccgaccggggagtttcgtcggcaacaaccaccttttcctcttctgcttcatccgtttcttcttcaatcaacggcaataaaagcgggttgtcttctttgggtaacttcaggctgataccttcctccgtttcgctttgacgaatgaaaccatctatcagatcctgcccacgcaatttcggtacttccgtcggggtagttgatgaggaatctgtttcgttcgtttcttcatcatcccgtatcaggtaagcggtataatccattgcataatccaattccgttgtctgtgaatgttcttccggaacagtggcaaggaaagcgtctattaacgaaagagtacggtctatactcggctccttttccaactcctttcccacagcatgtgcggaagtatgaggatggagagcatagcggtcaccttcaatcagataaaacaatacacggcggtctgatacatacaataccgctttacgcagttctgcaccgaagttgatatcgtgcagcacatagaggttcttgagatagagcaagcgcagggactgaaaataaggataacgggctaccagcgtacgaagttcgtacaaggtatcccgattcaacgcctcgggatgctgtatccattgttgcaaatgtacaggcgtcattccttttattaccagttagctacggttgcgttaaagatttgttctgttatgtctttcaccatcaggcttatcaattcatcttgcacttcggtcagcagcttagaagaatcataagtttggaaagcagagaattgctgatccgtgaaatcatccttatgatccgtattattcacaaaagtaactttcacagtcaaagtaacttttacctttgaagaatatccactggcatccaccgcttcgttatattgattataaccggtaatctcaccatcaatttcaagatcggcgttactattgaccagtgacaaacgtgtctgacgcatgaacaagtctttcaggctctggttaaattcagtagccaacggggcatatacatactctgcacgattttgaaaatccgctatcgaaatagtttttactttagagtagtcaatcgaactgatcggggcaagtcctatcttaatgctacacgaatttactaccagtaagatgctcaacaacaaagctgtcgaggctatttttttaatccaatccatattctttaatctttctgtataaggtacgctcggaaatattcagatcctttgccgcactcttgcgtttaccatgatgcttttccaaggctttccgtatcatttctttctccacctcatccagcgagagagactcttctacatactcttccgtgtcctgtatatcttcatcaatgttgtgggacggctttatggaaggatgaataatggtaggcacgctcggagaaacaggagtcactacggcaggcggttgggcataataagcagcaggcacagccgaagcggcagtgtttccacgttcggtcataatctcatgtaccagctttttcagctccgtcacgtcctgacgcatatcgaaaagaacctgatataagatttcccgttcactctcaaagctcttgttttctttgacgccgaataaagcaggcagcctctgtatcgtattctgttccggcaaatatcctttcaatatagaagcattgatttcacggttggtttcaatgatggaaacctgttccgttatattcttcaattgccgcacgttgccgggccacgagtaggaaatcaatagctgcttggcatcttccgtcaactgaatggcaggcatacgatatttctcggcgaaatccgaagcaaacttacggaataatagaaatgcatcctctccacgttcacgcaaagggggtatctggataggtacagtgttcaggcggtaatacaagtcttcacggaaacgtccttcggaaatagcctgtgtcaagtttacattggtagctgccacaatgcgtacattggtcttctgcactttagatgaaccgacttttatgaattctccgctttccagcacacggagcaggcgtgcttgcgtaggcaaaggcaactctcccacttcatccaggaaaatcgttccaccatccgcctcaccaaaatatcctttccgttcaccgatggcaccggtgaaagcccctttctcatgaccgaacaattccgaatcaatagttccttcgggaatggcaccacagttcaccgcaatatactgaccatgcttacgccgactgtactggtgaatgatctggggaaaactttccttacccacaccactttctccggttatcagtacagacagatcggtaggcgccacctgtatagcaacgtctatcgcacgcatcaatgtttcattgttgccaatgatgccgaatcgtaactttacttgttgtatttccgctttcgtcattctacaaatcttcttccacactatcgagtttcagcttatcgctgtcatcacgcttttcgtaatattgttttcgcaaagggttggcatgtgctgctttatcacgcaggcgattacggaacacatcgatagccacataaatagcctgacggaaagaatcttcactcgccaaaccttttcctgcaatatcgtatgcagtgccatgagccggtgaagtacgtatcacaggcaatccggcagtataattcacaccttcgtccatcgccagtgctttgaacggtgccagtccctgatcatggtacatggcaagcacaccgtcaaaatgagtgaaattgcctgaacccataaagccgtcagccggatacggtccatagcacaagatacctctggcagacatctctttcaatgccggaatgataatttcttcttcttcttttcccagcagaccttcatctcccgcatgcggattcagagaaagtacggcaatgcgcggtgcatcgatagcgaagtcctgtttcaacgactggttgaagatagccagtttctcctctatcagttccttcgttatagtcgaagcaatctgactgacagggatatgcccggtaaccaatgccacccggaaatcatctttcatcagaatcatcaatgacttggcaccattgcccagtctctcttctatatattccgtatgaccgggaaatgcaaaagtttccgactgaatggtatgcttgttgatgggagctgtgacaatcacgtcaatcaatccctctttatattcctcgatagctctttccaaagcaccgagtgcagcctttccggcttcaggatctgcctttgagaattctactttcacttcatcatccgtgcagttcactacactcaaacggttgtaagccgcttccgcagcagagctcacgatactgaagttcgtcggcaaatcgagtgacttgcgatgataagctgccaccttaggggagccataaataacaggtgtacacagttccagcataacggggtcggagaatgctttcagaataacttcataacccacaccgtttatgtctccttgtgtaatgccgacttttattttattatcttccatttttcaatatatatatcattttagataagaatgtgccagaagttccaacgataaatcttcatccgcagattacgcagataacgcagattgagattaaaacaaatctgtgcaatccgcgtaatctgcggatgaaagttatctctttaattcgtatacattcttacatattattttccttgatcagtagctttactctgctctttcgtcacgcccaatggaatctcagctcctgtctgtttatcacccggcactctcaaagtgtaaagagaggcttccatctggcgcatcagattacgtttcaacttatcaggtgaatagataaaggcttccacaacaataatacgttggttcaccggatccaaacgcatgtgcgaaacaaacggaccacccataaaatcccccttcatacgccacaggccacgagcttccagcgcatactctccttgtacattaagaggacgaacatcggtcattaaggagtcagttgccatatacatgccttctctcgctcccggaatgttagccttcatgacagagtcacgcatctgcacaaaatattccttggtaaatgtatttttatctctgtacgggaaagagtaaataacaaagttctggtcgccggtagctgcattcgtaccagcccagaagaagttctctccttgcttggtagaagaaagttcagcaggtacccagacatcacaatcaaacatactctttacctttgtcgtcacataatcattatgcttcttttccagttgtgtaatctgtcggttcatctccgcacgggtaaagaaatcaatgatagtctgtttgttctccgtcacaaactgctcgaaagaagcttcatcaggagcctgtatagtcaggatagtttgcggagcagcatacacatccttcgcatatttaaacttaggctgggtataaatatcctgtacatcagcgataataatgttacgaatcaactttaacgtagcatcatagttggcaggagaagtgtacatcatacggaaagaacgttcggactggggaagccccggtacatccgtatcaagtacatcataaagcgccctaccggcaggacgttcccacatagcgggatcaaccactaccaggatttcatacgcacgaccacttgaagtcgcaccaaacacgcctttcttaccgccactacatgcggaaagggcaattgctacaatagtcagacttaaataaaacagctgctttctcatatacttaccagttaatgtttttacaaaactacgaagaatacgtatatcatccgagccaaagttaataatttatattaattcttgtttattctcttcctgtttggcagtggaaagcatgccgcaagcggcaaatatatcttcaccgcgggaagcacgtatcgtagtaaacaaaccgtgggaagtcaggtaatcacggagtttagtcattgtttccatatccgctccctccaggtctacaccgggaatggcatgaaagcggatgaggttgatacggcagtccagtccacgcaagagtttcaacaattccttagcatagagcaacgaatcattcacacccttaaaaacaatatattcaaaagatagtctacgctgtttactaaaatcatagttttttaacaagtctaccatttcagtgatagagaaagatttctcagcaggcatcagttcgcgacgttgcaaggcgaccggagaatgtaagctgacagccagatgacattccgattcttctataaagcgctgaaatcctttgcgcaaaccaacggtagagagcgtgatccgcttgggactccatccatatccataagaagcagtcatgatttccagagctttcagcacctcgtccagattatccagaggctcgcccatgcccatcatcaccacgttggtcaatttatcccgctcgggaagagaatttatctgattgattatctgattggctgtcaggttggcactgaagccttgcttacccgtcatacagaatttacagttcatcttacatcccacctgagaagatacacaaagtgtggcacgatcttcatcgggaatataaaccgcctctacaaagttcttatcacctgcccgatacaagtatttcaccgtaccgtctgtggaacgcatagcttccacaggtgcctccgctccgacttcgtagacatctttcaggagatcccgatgtttcagcgacaagttggtcatatcgtctatggagttcactttcttgtcatacagccatgaagcaatctgtttggcggaaaacccgggcattcccagtcttttcaccacctcctgcaattcagtgagtgtcagtcctaaaagagtttgtttcggcataattatctatcaatctttccagtttatctttgcaaaggtaggaataaagttgcacaaaggcaattgcaggcgcagaaaatgagacacagggataaagaaaaagccgcctgatattctatcagacggcttttcatatctcaattatcgttatttcttagaagaacagataacggtcatctttcacatcagctttcagatacaagtcgttgaggaactggcttgccatacgggcatgcatattctgcaacgtagtttcttctgtttcctgattgaaagtttcgttcagtttatcttttgcatacggttgaagaacaaatacaccgccattaccctttatcggagcactcagttggttcagttcggcaatcgatgcataagcgcctaccagcggttcgctggcacgtagtaccggaacataagcgggagctgcaaaagttacgtgtttcactgaatcgcttactgcttcaggcatagctttaaattgatcgaatgaagtagcgccggcagcctttatgtcagccataatcttctcagccttcttgtcacgcagcaattcaagtctcagttggtctttcaccaaagccaacggacggtaaccggccggaacaatagcagaaacacccactaccaacatacggtcactttcgccacactcatacaaaccggatacttcaccagtctttgcagagaatgcccatctcaaagcttccttagtacctctgataccaccgataccatgttcagaactatacaaatcgtttctatccaaaagcttataaccagcatcttcagcattagctaccatcttctccagtgtcgagttagaagcgataaactggctgaattcattgtatgccttgctgtaagtttctttgctgaactctaccggacgtttaataacggctactttatatttatctttaacagccttcttatccatcacctgtacaatgatatttgcctgtgccaggttcaggttggtcatttcgttcttgccaagagtagtgattgtattcacatattttaggttatcaccatccagctgtgcaccttcgtagttagcagaagaaatccaggtagcctcaccggtctgaccatacttcttagcgatttcagcaaagtctgcaccacctttgatggcagtatagatactgtcagccaaagtttttgtctttgcagcatcttcagcaaccacctgtatctgacggtactgaatagagtctgccattgaagcagtagccaatttcttgaacgagttgatcgtattgtcagtcgcattgtagtaaggaccatatacaccacctactgaaacagagtccagacgagcagctacatcggtaggcaatgccttagaagtataatacagatcaatgtaaggaacttcagaaccggcagcacgaacaagtgtagaataatcacccggagtacctgcaagttgttcagtatattccattacttcctgttggatagcatctctgtcttcagggcttgcagttacttgtacatcaataaacttgatgttacgagtttccacatattgtttgaattgctctttcttcttgtcataagctgctttcagatctgcatctgtgatggtcactgtagagtctacgattgaagaataaggaatggcagccagcaacatatcagactgatccgctcttgcattgaaagcatcctgagcttctaccggattagagaaaagagactttgaaaccagagcctgatatttctcagccagacgagtctgaaccaattgtttctcaaggaaagaccagaacttatacatagactgataatattctgcatactgtgccggcatctgcgctgtgttcatcttagagtaatctacgaggaacttcttcaacatatctttgtcgaaagcaccagtttgcggattacggaacggggtctgctgcaacatcgggtgtacgcctgcatcaatgattgactggagttctgctttagaaactgacaaaccaagtttttttgcttcgttttcaatcaacttattgttaacgtagtttctccaaacttcatctttaatctgattgttttcttcatctgtgagtgcacttgttcctctggaaaatttcacaacttcagtatattcttctaccaagctctgataatcctgagcggaaagtgactctccgttaacctctcctacatcatgtgactggtgtggctgcaataccttccatgcgtctcccgcaatgaaagcgaacagcgccaaaccaataacaatcaccaataagggtcctttagaccgaatgttttgtaatgttgccattttagttaatatgatttatttgtttattatattttctccaaacttcattttagcgcacgaagatacaaaaaatgctaatacgcatctatttattctttaaaaaattacgccattctgctattattccaccactttaagacgtaccagctctattttagtggctgtaaccttaataattttgaactgaaatttatcaatcgtcactacttcatgcaatttcgggaaactctgataacggttcaggatcaatccacccactgtcatataatcatcttcttccggcagatccagatcaaacgtctcatttaccttttctatttccaagcgacccgaaagcacatattcgtgttcaccaatctgcttgcacacatacgaagtgttatcatgttcatcctcgatatcaccgaatatttcttctaccagatcctccagcgatacgataccggacgtaccgccaaactcatccaccactacggcaaccgttttcttctgctgcatgaagagtttcatcagtttatgcgctgccatggtttcgggcacaatgggcacttcttttacattattccgccaatcggcaggattgcggaacatttcggacgaatggatataccctaccacattatctatattgccgtcatacactataatcttggagataccggactcaacaaaaagacttttcaaatcttccagagtggcagtcaggtcaacggctacaatttccgtgcggggtacgatgcaatcgcgtattttaatactagagaagtcgagcgcattctgaaatatcttcacctcggcatccagttcttcttcatcttcggcattatcgatactggactggacaaaataatccagatctacttttccaaaagccttgtccgaagcttctttattgatcttcatcccgaacagacgcaagaaaaggtaagataatccggaagccagctgagacaccgggtacaaaacgatataacaaatcagtagcggaaaagcgcatacttttaatacaagattggggttaatcttgaataaggttttaggaaggaattcacctgttaccaggataataagcgtagaaatgactgtctgcaacaacacttccacaaaatcattggagatcaaatcgcccaggagatggactttgataacttgcgccataaggataccataaataaccagcgcaatattattacctaccagcatggtagatatgaagttattggaattacggaagaaataagaaagaatgcgtgacgtcaatccctccttacgttccatttcaaaacgtagtttgtctacggaaacaaaagcaatctccatacccgaaaagaaagcggagaaagccatagttatcaataaataaatataggtatccataatttacggtttgatactatctttcggcatactgtctgtttgcacgctgtctgcaggagctgtggcatcatcatctacataaaagatgccctccggttttcttattgtataaacggtcatttgttcgttagagtcgaaaccacgaccagtaatgatcctgtccggttgttcaatacggataaactggtcagaatagatcgtatgtttattctgatcccaatacaacaggtctgtatcaaacttctcacctttaagattttgaatatgcacattactcatcagtttccacaacttttgcttttcataataatatgccgtatccgactttatacttgcatctacattgaatacagaatcaaacttttccagatagactcctttttcaaaagcccagtaaggcggattcttccggtcaaagaccagccactcctccgtattgattcgatagcgggtgacgccggaatcagagattaaagtcatcactcctttcgtatccatcacaggcaatgaatcacgctcggttatggcagctcccatatccttatgccgtccggaacaggcggaaaataaaagaagcataaccactgccccaaaggcaatggttatgctcaaacttctacaaaatagaacgttacttcgttgtggtaacatatttatatttcttatcgaaccgttgtgctttcaccgatccaaccgcctaccgtaacgcggtcaccggctttgatacccaacataaagaggtcttcagccttcggtgtataacgtgcatacgttgaaatcaattcgtttgctttatccgctacagtgggatccacagctttagcgcgttgcagtttatcaataacaacaaaatatgtacacttattcaaagccgcctcatcattccaattcgggctggaagcataaagctgtgcaagcaagatataagcatcaccataattttccttgaaactgatagctttctgcaaatagcctctggcttgtgaaagcttcttcacattaaataaagttgcagcaacagcataagcaatctgagctttcttttcattatcaccttccaatgacaaagcttcatcaaagtatttgattgctgtatcataatcacccttcttatatgccatatatccacatccggtagctgcatcagcagtcgggtcaatcttatacatataataagaagcctggaagtatgcttcgctttccgtacacttcatcatcttcaagatagagatagctttcttcaggtaagtagagtctgattggttcgcttcaattttaggaccataaataccctgcaaagattcacaatcagcggtaccactattgatgaacattgctacgaggttatctttcacttgttgcaaagcagctttctttttcgcatcatcttctgcggcgatagcagcatcggcgtattcggaatcagtcagataatcctgaataaattgttccttatgattaggatcagctttcaatttattcaaagacatatccagaaaatagtggaggataggacctttagagccacccttttcagtttccagagattctttcaaccaagcataagcttgatttacatctatattaggagcataagcaatgtagttaatagctttattacccaaaacgtcgcctacagaaggagtacctttcagatgcataaaatccggagtatatttaattctcaaatcaaaaacctccatcagttcatcaaaatacttcttgtaatcagcggaattacggtcctttatatcattcaagaaagatgttaatattttaataccatccgtgtatgtataataccgcaacgtagggcaatccttcagaacttctttccacggcaagtaagcatctttaaagttactagctcttaccgcttcatgagaaatactactgttcttgttacaatcttcctgtgccaggacactggttactccacccgaaaggagcaagacagctacaagcgttttaatcttcattgtatttaaattttagttgttatattgtctattcttcactattcaactttacgcttccagaaccaacgttcattgaatgtcacgccaatgcaaagacgcaatgtattctcgttcaagaatttgctttccgtgccttgcgttctcacatattgtgctgaaacactcaatacggaacggctacgtggaagaggcaaaccgaaaccggcagttactccgtattcatttgcagcacgtacgccatctatcttataataaggtttagaataataagctcccaaacgatatttgatgtgtgaaagataacttctacccatcatgttaggaatatattccgcacctaaagcaactttcactttattacagaacgcatccgggtcattcatgaatgtcacactgttccatttctggaacatcacatccgcacccactgtcagacgatcatcgtacacatacgtcacacctgcgcccaacgtcataggaatacccattgtcagtatagtgtccttctgcgttgtagtatatccagtgttctgattgcccagctgggtttgtacatacgcatcatttcccaaattatgtcccggtgagaaaacgactcccaaagtagccgcatgtttcttaccgaattgctgtgtgtactgcgctccaaagtcaagtttataactcgtaatttccatcccggtaagcgttgtcaacggcatgatatttgagttagatgtaaatgactgttgccgcgtatgtgttatgtctccccaaagatacgaaatattcgcaccaacggaaagatttttaataattttaaaacctgcgcctatataaagttgatgtaagcctccttcaccggaataagttgtactggctgaggaagtcggagtttcagtgttttcctgatagttacccattttatatcccacattggaataaggtaacaatcctatactcatggctcctttttttgacagacggaactgcatcgtaatgtagtcaaaacttgagttcttggcattcatcttcactactccatcgctgaagttggtgttttgcatagaaatacctccgtcgaacatgaaagttaacgagtcaactgccgtataagatgccggattcgcgaaattggtctgatatttgtcacgtaaaccataagcaatgccacccattgccttactgttacctgacccatggtctgccagttgtccgtatccgtatcgtgtatagggagaatttgtattattttgagcgaccgtcgctccagataatatcgtgagcaaaagcaccaaaagtgtttgtctaaatcttgtcattattatagtttaaaattcgatttaatcctttcaacactaaaaatctgtctgcaaagatgatactttttaagtttgtatcaaaagaaaaatcatccccgcccgttaaaaaaaccaaaagttcaggatatttatgtttcatagccactatgtaaccagaaatctcatattccatacctttcaaaactcccgcacggatggcagtttcagtatcttttcccatcgggagttcacgcccttcgcgttgcaccagcggcaagcgtccggtaaactggtgaagcgcccgaaaacgcatctgcatacccggggaaatatttccaccatgatagcgtccttcggcatccacaaattcgtacgtaatgcacgtgccggcatctatcaccagtatgtcttttccgggaaattgttcattggcagccactacggcagccatacgatcataccccagtgtccggggtgtttcatatagattcactaccgggagtggagtcgtttcattcagccaaagcacaggtatgggaagtaatgccaattgtgccagcacttgctcgctcaagtcgatgaccgtggcaacaattgctttttcaaagtgatatttactatagatgtccgacaaatgctccaaattccgattagagtcatacgccacttccaatagtgaaacaccatcaaagacagctacttttgccaccgtatttcctatatcaataaccaggttcactgaatgaagattaattttccgggcacaaagatacgactttaattgaatttgaaagctgtagtcgacattttccttactacatcagcgtagtttatcgcaaacttatttttctttttcctcgctaatactcgtcattagcatacaggaagtcaaatgtagcctgtttatagtcaaatatttcttctggtttaaaaaatcttttcaattccgcttcagccgcttcgggtgagtcggatgcatgaacgatattttcctgaaagctcatactgtaatctccgcggatggttccgggagctgccttcctgccattggtagggccggtcaaaaccctcaccgcttcaatggcatctaccccctcaaagcaacacacgataaccggacaggccatcatcgaatccttcacgcgctgaaagaagggtttcgcacttaaatgggcgtaatgctcactgagcacttcatccgtcagctgaaccattttcattccggccagacgcaaacctttacgctcgaatctgttcgtaatctcacctaccaagcctctttggagggtacatggtttcaaaataaccagtgttttttccatcataatagtcaggtctttttagagttatatataaaggtatccttttcaataattcttccaaaaatactatttttcttgagaatagcactcggttggagtctttttatgtaaattattggatgacaaatacaaatgtaaacatataaacgagtaaggacaaataaactatttggttgagattttccaacaaaagataataaataatccctgcctctacccatatttcagagtaagagacagggatacttcaaatgagaggattgaattttctaagatctaatgcagtaaggtaaaatatccgactgggcggataaatgaactttcacagtctcattctcctaccacacttcaagccaatagattacatagtacttataaaggacaagtccctttgtatagccatgtacccattcgttaggcaaaccaacaccattcctcgaaaggcaatcatccggcaagaaacgacctttctccgcagcaagaagataaatgacagcttttttataaaaatcaggaggaacaccgccttcccaagaggagaaattaggtattggtaacgtatccacaaagggcaagttacgaattgaatctgattttattatttcaaagttttcataatcataaggaagtgttaaacaggaatctcctaaataataaattcttttcgcctgagaagccatttctttctttagtatttcacgtttgctatttccacaaggtaatgttagatgaatataattcaaatattttccgcgtggaaatagtaaactttgagctccactaaccttattatctatattttccggtaaatgagaaactaaaaatttaggatatagacttat

SEQ ID NO: 6314 - DNA, 1116 bp, Unknown
  gut microbiota DNA sequence
cgataataagatgcttgatcaagtggttgtcgtgggttacggcacacaaaagaaatccgacctaaccggttctgttgccgtagtagatgcggaagccttgaaacagacatcaaactccaacatctccaccatgctcgaaggtaaggtttccggcgtgcaaatcacctccgacggacaacccggagccgatcctaccgttcgcatccgtggtgtcggttctttcggcgacacctctcctctttatgttatcgacggtgtccccatgggaacttccatccgagatttctcttcaaacgatattgaaaccatccaagtgctgaaggatgcttcggctgctgccatctacggttcgcgcgctgctaatggtgtgattattatcaccaccaaacgcggacaaaaagaccaacctctgaaagtggattacaatggatacttcggtgtggataatattcctaaggatgtctatgatgtaatgaatgctgaccagtacagccagtacctcggtcaggcggctgcaaactccaacactccgttgccaacgggatacaaacttgacagccaaaccggaaaataccatttccaagatgacaccaacaccaactggtttgacgaagtattcaaaacggggatccgtcaaaaccacaatgtgaacctctccggaggtggtgcccataacacctataatatatcattagactatttcaaccaaaaaggaactctcgaaggtgccggccctaactacgaacgttacacagcacgtgtcaacaataccatggagactaagttcataaaattccagaccagccttgtttactctcattccgaccaggacaacatgggcttgtcaaatgcttccgaatacgttcaaggtttgtatggcgacgtaaccaatgtgctgcgcggcaccttgatgatgcagcccaccattaaggcatatgattcttctacatgggtacttgataacctggtgggaatcgccaacaactttaattatgacgcttacggctatggcgtatactacgataccgtgcatggtgatatctccgcttccaacccgttgctggtaaataacctgctgcaacgcaacacccgcgtggatcgcttcgtgggaaccgg

SEQ ID NO: 6315 - DNA, 6759 bp, Unknown
  gut microbiota DNA sequence
gtgttagatgctgattatcaatgcaattacactttatacaatcccatgaaataatccacaaaaagactcataatctggaggtccctggttcaagcccaggctggtccacaaagaaaaaggctgattcctaagggaatacagccttttttctttatggagacctccgattaagggtctgttgctttagtagatttagtctcaagttagacaattgttgacctattgttgaccccaaactaagtaggtaatgctaacaattaaagcagaagtccaacaggacaaacaacgaagtgacaagacgtataacgtcaaggtaagatttacaatggacagaaaggtgaaaaggttatccacaagcctgttcgtaacctccaatgaactcactaaggactttaagtttaaagagaacactcccaccaaaaaggaaattgataaccttgtgatgtactacaaggagcaatgtcgcaatttccaagtagaccaacacaactactccctagatgaaattttcgacctcttaaaccatgaacaggagaagcagcagaccattgactttataaagttcagtcgtgagtggatttcttctgccacaattaaaggtgcacccaattacaccactgccattaatgccttggtacggtttgttggtaaagaagaattggatgtaaatctgataaccttagatttcttggagcagttcaaagtattcttgattggagaacgtgaagcacgtaccaagaaactaatgcagcagggtaagcgtgttccttctaatcgctcactatccctttacttgataagcattaagaaactgttcaaagaggctcaaaagaagtacaacaaaagggaaaagaatctcatactcatacccaattctccatttgcagacttcgagatacctagacaagaagcaacccgtaaaagagctattccagcagacatcatcaaaaaggtatggaagctaccctataaagacatgaagaaggggtacaaatcaacctgccgttacaacttggctaaagattgcttcattctatcattctgtttgatggggattaattctgccgacctttacaatgtcacggaaagaacaggtgacaccattacttacaacagaaccaagaccaaagctcgtagattagatggtgcaaaaatgatggtgaacattccaaaagcaattcttccactggttgagaagtacaaagacccaagtggcaaacgactctttaatttctatcgctactatgcagatgaaggaaacttcaacaaagccatcaactacggcttgaaagaaattggtggattgttgggtgtagatgatttggagtactacgcagcccgccactcatgggctaccattgcactcaacaaagtaggcattgacaagtacactgtacacgctgcattaaaccatgttgatgaatcaatgagagtaactgacatctacattgaacgagacttcgtgaatgagaataaggctaatgcaaaagtcattaagtacgtgtttgggaagtagcttttaattaatcccgcttacagcaatgtgagtgggattttttaactttgtagtctaaatgtaaatgcattatgacaagttacacactaccaattccagaacttaaaagactggaaccaattctagaagaactctttggctacagacgtgccatgtttgaaaatgagctactaaacgtttaccgcaccaagtaccctaatggaatcagtaaagaagtagctaataattacatgattgcctgtccatttttaaatgagattgcagtggataatggtgcgtttgattaccaccgctacgcaccaagaccagcctcaacaagcatggaacttgatgtgaaaagtttcattatggacacagagcatgagattacgattgttctttccaatgataccatcttaaaacagttagacaaattgttgcaggactatggagagaaagacagcagcgaaacaatcagaacaactctttttatcgtagctgccatttacgacaagcatgtaaaaggggaactctacacagaaattaccacgtctgagaatacgcttccttatctccaacaagtccgtccagaaatgttaaagctctttgagttgcttaatactaagagatactcacctagcaagaagaaagaattaagagtgttcaatcctatcactattgataatggagtaaagaaaatcacccttgaaaactcatgccattggctgactgacttactggacgactacttgcaaatttacttgggagttaaaagtctggaagaagcccaagcagaactaaaggaagtgtatgcagagaaaaaaggcaggaaagctagtaatgtagcttgtaatcttatcatgtacggcacattccatctcttacaaaagtactcgtcattgaaaaccaagagcgaacagatacgtatgacattggactacatgggacacttgtttgaggcggatagcttcaatgatgacgaagcctcaaccaatgcagcaatagcctacttagtgaagcaagggtacaaaccacaatggaagcccaagcagatagaagactacaacttctcacccaacaatcaatctacagaatacctctggtaattaaaaatctaccaatcttcacagactaccatgtaattgcatggtagtttttttatgtccttaaattagctaactcactgataacctacaatctaaagaatacccctcaaatcgcttcttattctttatggtacaccttctaagtattccccaactttgcaacgtaatcagaaacgataaggtaccaagttgatgattacaaaacaattaattctaatagttattaaaaaaataaagaacaatgaacgaggaaatcatggcagcaggagagactgcaaaggtgagtaataatgaagtagttaataaccctgtagattctacacgtcccaagagtttggagcaacaacttgttaaagcggaacgagacttgaagaacatgactaacaggaagatgagcgaaacagtgcttcgtgcccaagaacaggttattgagaaactaaagcagaggattacagaaatggagagtaagaaatctgcttctacagttaaagcgaaggataaacctatctgctggaagcttgccggaactggagaagtagtttctaagaagataggctatgtaaggtacaatagggtcatcaaatacaagaaggtggatgagttcattgcaatcatcgctaacaacaagtatgaaaatgcttatcctatcatagtagcaaaggctaaagacttaattaaagcgggctacacagtaacagatgtaaatggtagaaagattacagaggatgaagcagaagattactatgtagttttggacggacagcacaaaacaatggctttcgctaagcttaacgctgcacaagaaaacattaccataccaaatgtacacgtcaaagagcttgacaatgtgcgagagtatttggtagacattaacactataagtaattgggataagggagatagagttattgttgcagctttgaattctggcgatgagttgtttgaaaacatggctgagttaattaaacaaggcttcaatcctacaacggcaggtctaatgtacactggaaagaacatttcagaaaagattctcaataaggtattaaagggagaagaataccaactacccaaagacacagaggtgaacattgaacgaggtaacaaatttatgactctttgtaaggcagctcacattgatgtaacctttcttaccaaacgatacttcattaaaggtttcaacagctatgccaaagctacaagtgaagaacaagcatttgaagcacttgacaaattaaagttactgaatcttgatgaagtccaattaaaagggattaaggaagaagatgaatttgtagcaatgcttaaggaagcgtttgaaactcaagtctgaccagacagagagccaatgtgacaggttggctcttctactccaaattctcagaaagtggtgattttcccctatacaataatgctgattaccccaaaaaacagagctaagaaatgcctaaagtctgattaattgggcaacaggtagcagtttgtaattcaccaagcagagatgatgatagagtaaatttttcaagaaagtggtgaatcttcccattacaataggatggtttaccctaagatttggagtaaaggctctcctaaagtacgagaattaaggtcacagataacaaatttaaaatcaccaaagataaatgatgataccctttaaaattcaagaacgagatggttttctcaccatggacgacttcccaaaaaactgcatttttaataaggtcaagacgggatgcggtgctactacaatagcacttactaataatgagaattacattattgccgtacctacaaaagagttagtagtgaataagtgctacccacctaaagacaaggatggcaacgataacatttggaagaagtcacagattcaaccaggcgtaagtcctgttaatgagaacttgtttggcttgtatggcaacctcaacaggacagtaaaagccaaactaaagaaattccttacaaaggacgggaaaaagaagatactttgtacttatgataaggtaagcacgttaattcccctcattaacccactggaatttaaaatacttgtagatgaataccataaccttctaaaacaatacggctttaggacaaaggtaataaatcaagtaatagagaaatttgaactcttcaaatctcattgcttcttaactgcaaccccaattccagagcaatttaagcctgaaattttcgcaggaattacagagtacgttgctgattggaaaacagtagataagataacaatctatccttgtttatgtgatagtgcaagcaatacggcagctaacatcatcaagcattaccaaaatgttggttactttgttttggatggaattaaaagtgaagaagcctacttctttgtcaatagtgtaagagagattaagacaatacttacaaagagtaaattaactaatgatgattgtagaattatctgtgcagatgacgaactgaaccactacaaattggaaggttttgaaatttccagttcaacagctcctgccaaacgatttacattcgtaacctgcaaagcatttgaaggagtagacttctactctgaaactgcaatttgtttcattgttagtagtagcaataataagcacactctaatcagtattgacatggacattccccaaattgcaggacgtatcagaaccaaatccaatccgtttagaaacaagattgttcacatcttcaatcctaaggctattaattactaccgtccatttgatgtaatgaaggaggagatagaggacgaacttgctactgcccgcaaaagagtagagcagttgaataaagaaccagatacaaagatactagagcagcaggataaggaatttgagaaactaggtattgatacatacattattaagaggaacgatagatacgaagttaatgacatggttgcccaattaaagctctaccaacattggactatgcgtatcgtttacaagtcagcagaatcactaatagaaagttacaaagagctaggaatggtaataggcaaagcacatgaatgggacattaaagatgaagatgttatgaagaaagctcttacacctccccaattcagagacaggctcaaacgtttctgtgacttaaaggagaaagctactctaacggatagtgagaagcaagaactaaaagacattacagacaagtatccattcttagaacaaggatgtgagaaacttggactaagccagttaagaagaacgaggactataaaggagattaaggttttgactgaataagattagaactccagaccgttaaataggtttggagtttttcatgcttctacacgtatctataggctatctctttaaccttatttgagtatcaataaagtacaagtcgccatcaataccatagaggacattattagggactgcatcaaatacttcgtattggtcattatggtactcatcaaggtagtccatttcaaaaccaagagcttgcatgtaatcagttatttcgtcctctgttgcttcccgttctgcctttatgtgtggttgtatgagaactgcacaaaactcatgcagactattgtaagcaaagcctatcatttggtagggcacattgctaaagaacttattgtgtgcagtaatacggatgaaaaaattctccagattgtcacctgcatactcaaagttgtttaacttgtatacagtagctgcaccatcataaaacacctcattctctccacctttatccaaatagataacggaaagattgttaaagtcaatccataagccgtttgaatctgcaaatgaaattaactcttcaatttgccctctcttatagctctctgttggttcaagcgttcctgctgtttctttgcttcttctaacgatgcaggctgcttgctccaaaagactattgactgacgagtgcgctctatccattgcttgtgaaattcattaatgtattccataattcatgtaattatgagtttatgcaaatgtagccaattaaattgaatctagcaagttcatttaccctcccaactcaaaatgtaaggtacttaaatttctaccccctccccttcaagcatgagaagcatttccatttagactttacgttcttacgaagtgattacattgatttcagaagaatggcttacatggaaatttaaaagagatgtatgtctcaaac

SEQ ID NO: 6316 - DNA, 54729 bp, Unknown
  gut microbiota DNA sequence
aaatatgaaattgataaataaattactaataatattattaggatgttcttcctgcgacccaaatacacatgaatttggcttcgaggtgtataatcaatcggatagagaaatagatgtgtgtttaaacatgtggtatctgggtatccaagatactttagtacctgcctatcaagactatgatgctacatctcaatataattatggatttacaaccgtggaaaagaaatcagtaaatttgtttatagtacctggttcaattactgcagaagagatttttagaatggctaatgatacgatacgcatatttatttttgatactgatacgcttgcaaaatattcttgggaggaaataagtcgtaactataatatcttacaacgatatgatttgacgctaaaagatatgaaacttttaaaacatgatatctattatcctcccactcccgctatgcgtaatataaaaatgtggcctccttataatgaaaaagtatctataacgaataagacattaaactaatacataaaatatgaaaaaccaaatcattctattagcaatcagcattttgggagcattctctcttcatgctcaggagataaacaaaagtctgacgcaatccaaaaaggaagtaaactcacagccacgtaagggtacggactggaataaacaacctatcggttacgtttttgggggtgtaggtgtagggcatattgtctccacagaagaggttgagggttcttcgtatatgtccacaggacttgattggagggtgggaatgtctcgttattacaaccgttgggggtggggagtgttggtgcagcagtttcgcgccaaagagacaatgtctctcactgacggttttcaaacgatggagatgaaagacgtaggacgattattgtatattgctcctcaattcaccggacgatgggttttaggggagaagttaaccatttacggtgcagtaggatggggatggttacgttataaagaaacccttaaagcagatggtttaggtaaaattaatgctacagccaatgctttgggcggaaactttacgatggggcttgaatatcgtttaagttcagtaataggcttaagtgtggatgccggccttgtgggaggtgaaatcggaaaaccgaaagttgacaatgatgagctgcaagccgcagtgaatgaactatataccggcaagatggatgccacccgcctatatgcaacggtaggagcacatatttatatctggaagaaaaagagataacgtcttctatctgaatatgtccgggttgctttatttgatgtttaatcatgccatgcaaaacattttcctcaactaaaaggttattaatatggtatggtaacaaagatactatttatttataatttgtcattatctttgttgtcatatcatattaatgatgtcattgagttaggaagctacacttttgaattgattaagaatgagtaatattttgaaaaaactattctccatattggggaacgatgaaagtaaaccggactttcagacttgctgtacccctatggaggtatttgataaacagaaagtaaaagccattgtaaaacagtggcttttgttcattgctgaatacgaaaccctgcctaatgacatcattgcattgaacttcaacttgtgggaagctgtcgaagaaaatgggcagagctgctatacactcgaactgacaggctctaaacaatatgacgcggaaaatgatgactgggcttgtgaagaagatttcgatccgagagaaaggaactgtgatgctttgcaactttccagcgaaatcccgtgggaggaagtactgaacggcctggtggaagttctgaaagagttaaagaaagaactgaaagtaataagtctttttcaggtgaaacatataacagttgggtttgcggaaggcgatctgatagttataaaatagaaaccttccgcaatgtgctgtaaacagacctgattctaaggtcgtgctacttgaagaatgaactgggcgtttgcttatattgtttcacaaagcaacgggtgaagtacttggggtcattaaatcccacccggtaggctatttctgatacaatgatgttattggtgctactctctaatattttcttggcaatctgtagcctgtataattggatgaaacgtaccggcggaagtccggtgagtgatacgaatttcttataaatcactgtataactgatgttcagcctttctgtcagatcctttacaccgaattgaggatcagcatagttcttttccagaatattcataacttcgttcatgaactgctggtcgggctgtcccacttccagcaggataggattcaagtcttgttctacgaatttcttctgacgcaaatccctgttcttcaagatggagtctatgtgggctaataatacggattgttcgaaaggcttggtgatatatccgtctactccgttttcatagctttctatccgggcagtctcacttgaatttgccgtgagaagcaggaaaggaatgtgacttaaaagcttgtcctcgcgcagccttttgcagaagtcggaaccatcgcatacgggcatcattagatcggatacaataaaatcgggcacgatattctgggctgtcttatagccttgctcaccgttgtttgcttcagcgatattgtatttttctttcagcatattcttgatataatgacgcatatcgggattgtcttctaccaataacaaagtcggcttgctcctgtctataggaatgaacggctcgattttgtcttcaacgagtacgggctctttatattcctcatgaatttcattttccgctgcgtccgccagcgtaatggggaaatataatctgaaagatacaccttctttttccgaactcttgactttaatcgttccgtctaataggttgataagctcttttacgatgtgaagtccgatgcccgtactgctctgtccgtagtttgtatatttgttctgttcgggtatccggtagaaacggttgaatattttgtctatttcgtcaggagctattatgctgccactgttggtgacggagataaactgcatgagtttgttcgacttgtcgatgaattggttggcatgcaatgtgatttttcctttatcgggagtatgcttgatggcgttggataatagattgaacagtatcttatgcaggttttccttatcagaatagatatggtcactcttcaggcggtatatcttttcaaagctgatgtttcgttctttcatcaggttggaaaagtcggttattgttgtgttcaggaacttgctgaagttgaattgagagtaattgagcgttaagttctgggtatcgatcttgcgcaagtcaatcagttggttgaccagtgaaagcaggtattgagcgttccggttgataatctgtaagtcctctttttctttgggatcggtggtttgcctgacaagctggcttgccggtccttgtatcagggtcaggggtgtcttaaactcatgtgcgaggttggtgaaataggatagcttctctttgttgatagcctccatctgctcggacatgctttctatcttttctttcagaagtttctggatatgttgttgccttgcattataccaatagatgatataaagcagaatggacactatcaatatagcgataagtgagtagaaccatcctgttttatagaatgggggatgtacaataatgctgagacaggtggcttcggtagaccaggtgttgtcgtggttggtgcatcgtatttccagcgtatattttcccggaggcaggttggtgtacttggcgtttctctttaccaatcctgtgttccagtgctcctccagttcatgaatgcgatggaagtagaacaccttttcctgttcgatataatccaggcagctgaatgtgatttcaaaggaattctgtggtggatataaatgcagttccttggttgttgagatacttacgggcagattgtcgctgttcagataaggtatcagctggctgccgttacagacaacgctggtgagggttatcgtccgctgcttttgcttgggcaggtttaccagtgggctgaatgttacgaaaccatcgatagttcccagtaacatattgtgattgatggtcttacaaccggatcttttatagaattggggtaccagcaacccgtctccttcgtcgaacttgaaggcccgtttggtattgatatcgaagaagtaaatgccttttagggtactgatccataagttcccgttctcatcgtccagaatgttcgagatgctggtgtccgaaagaccgcagcgtacggcatagttcttgaaagtatatttttcgttgttaccgttgtcttccaacaggtagatgccatttccgaggctacccagataaatctccccttttttagtttcgaatatacaagtgatcttttcattgattttgctttcgggatcatccagtttgtgctgatagtatatacattcgtaggtattcctggaattttccaggtcgatgacgtacacgccgtttccgccaatccataatcttgactgtgagtcgatgaagattgtattcatgttatgaacgggttctttggactgtgtgtagaattttagccggttgatggctcccgtagagaaatcgagtgtattgatatggctgccgctgcatatccacagtgcatttcgggcagagtccagggctatgtcatggatgtcatcggaggtcagggaggaattcaaactgttgtaatgttcgaatacgggatgtgacagattgtttttatccagtttatccagccctccgcctattgttgatatccagtaattgccatgcaggtcctgaatgatatccgagatgttgttgtgagccagtgagtgcggatctcccgggttgtgtttgaagagcgaaaaggagtcagcacctttcctcttaatggcaagtccgccatctacaattcctgccaggatgtttccctctttgtcttcgagcaccgtgctgatgatgttgggcactcctttctcatacccttgcagtgaataattgaaagttatgcgttgcggagccatgatattaattccgccgaagtcggtccctacccagatattatcattcttatcaacaaatatccggttgacgatattatcattcagggaccgggcttgtatacctctgctgaaagtaacgaattggtcatttcgctggtatatgttcactccgtttctggttccgataatgatgtcgcctgatgaatttttatcaatatctgtgatgaagttggaggaaatgctgtgaggattattgggattatgctgatagagtatgcagaactgattctgggtgttatagcagtataagccactttgggtgccgatccacagatagtcaccatacgaaaacaggcggttgaagattaactgtgaagtatctaagtttgtaattacggggatattgctgtaatcctgtttgcccgaaggagtgaaatgcaataaacacttgtcgcctcccgcccagatatcactaccgtgttttacgatggttttgatatccacatctttcttcaatatccggatgtcttttatctgcctttcttcgttcagaatgatgtaggccagtccgtcacttttacctacccagagattattgaaatcgtcgacaagcaggacctgaacgggagagtaaagcacattattgttcttaccggagtattccttatagaagttgagattttcgtgaaggagatcaatgctcatgatgccggcttcggaagctacccacaaatagttgttgtcgtcttcgtcaatgtcattgatgtaattactttcaataaactgatacggttgcctgggagctgtggagtagtgtttcagttcgtaaccatcgtaacggtcgagcccgttggaggttccgaaccacatgaatgagttgtgatctttgtgtatggttcggatagagttgtcgcataatccgttccggatagtaagataaaggtaattgtattggtttggattatcctgggcaagcgctaaaccctgcccttgcaggaagcagagcagggttgtgattagtgctattatcttcgtatacttcatatccggcatggagatttagttattgaaaactgatccagtcgatttcaactttaccgcttccttttagagacacgtataaatcgtggatatcggtctgagcggaacgaaccggggattcaatatttgtccatttatcggttttgggaacttttatttccgagataaccggaccgtttgttccgtttatacgtatttgcagtgttcctccgttgtccgaggttactcttgctttcactttccggggggtgctatctccgaagttcacccggttgtactgcacccatgcaccgtttttgctcaataaagttttccagccttcgaatttgtttgcttggttcaggtaatcgatggccgctccctgattgcttaaccggctgtagcgatccagttgaatttctttccgggcgtctgttatgcccactccgcgcagggtaggggttactttttggatagtgccgtccgggttgaagaataaggaatcgacccgtgccgatctgtttttatcgaattcgggggagtaatcgttgtggtgatagaacaggtaccactggtctttgtattccaccaatgagtggtgattggtccagcaatcggttggtgattcatccataatgatacccttgaactcaaagggacccatgggattgtctcccatcgcataagccagaacttccgttttctcctttacccaggggaatgtgaagtaatattttccgttgcgttcaaaggcgaaaggtccttctttgaagccttcgggtaatccttgaatttgcatgggttctgaggcgagttcaagcatattgtctttcagttttgctactgacattccgcggcctgaccagtatatgtaggcttgcccgtctttatcaatgagcacgcaagggtcgatgccattgactccttcaatgggagtggcctgcggggtgaaagggccgtaaggcttgtcggctatggcaactccgatgctgaaaccgcgtttgccttcgcctttaggggtagatgggaagtagaaataatatttcccattcttgtatacacattcgggggcccacatggaataggagtcaggagctacccaaggtacattttcctggcttaggatcactccgtggtctgtccagttaaccagattgtctgacgagaaaacatggtaatctgccatacagaaccattctttcagacgttcgatagggctcggaatgtcatgtgaaggatagacatacatcttgccttcaaaaactttggcggtgggatcggcagtgaactgatccgtaataatggggttctgagcttttaatgtacctattattaccagaaatgcggataataaaaatagtcttttgtttttcataagctaattgttttttagtgcgcacggactgttatttctttatccggacacaaagataaaataaaaatccgttggcggaattaatttctttctatcgggttatgagttaaatgataaataatcttttagacgcggatgacacggatgacgcggatttttttatacttcttatagcgcagcctttaaatccgcgttatccgtgtcatccgcgtctgaaaaataatataccgaatggcgctaatcacttatcacaaaccctaatcacttttgttcctttctatcccgtaaagtgactttgacggattgcaggtcccgggctgcggaactcgttccatagaataactcgtattcacccggtgctacacgcatggtatttgtagaaggatcaaaacattcgaatgattcggatggcaactctatcttgacatcctgtttggctcctgctgcgagttctacacgtgcataggcttttagggactttaatggtccgtcagcatcatctgttttgcgtatgtaaacctgtacgacttcagttccggagcgcttgcctgtgttggagaccggtacagtcaaggtcagcgactcatctgtacggagttgggttttgttgcaactggctgtacctacggcgaaatccgtgtaacttaatccgaatccaaatgggaacagagggtcggacatataccggtatgtacgtcctttcatggagtaatcctcatagtcgggaagttgtttcgtacttttgtagaaagtgacgggcagcttgccggaggggttataatcaccaaacagcacgtcggctacagcatatccacccagttctcctccataccatgcctggagaatagcgtcgcaactttccgtttcgggcagcaatgccatagacgatccggaacagttgacaaatactacttgttttccggcatctttcagagctttcaggaagtttcgctgtacagcgggtaattctatatccgtacggtcaccccctttgaaaccgggaatattcacgggcatttcttctccttccagttgtggcgaaatgccacctacgaagaccactacatctatgcctttaagtttcgaaatgctttcactataattgatcgggaattctttgccgaggttgaacttcaggtttgcagcccagttttctacttgtgcatagagtatttctatcttatactctttccctttctccacttgtagcatggtgcgggtatcggtggttctccaagtgcggtgtttagtcatcgacttgccgtttaccaataattcaaagtaactgcaaccttcgagattgaggagaatttcgcctgattccttcggagttaatacggtttcgtatttggctgagaacttttcaagatttactccggggccaaaagtatgtaatccgtatgtagttacgttgataggctgggtggtacggagcgaagagacaggctctccctggcgttccgggttgttccagaatgtagcttttatgccgggtttcccatctatgctgcattggtcaagataggattccaatgtttggtcattcaccaagtcacagcctttcatgtagacgatctgattctttttcagtttacttttgaagccgtccaggatggtaatggtctgattcggagttccgttgtagttgccccacagcataggtttgtcatcggcgttaggaccgataactgcaatcttgcggatggatttacttaaaggcaatacattgtttttgttctgtaagagtgtcattgtctggcgtgacatattcagtgacaaatctttgtgagccttacagttaactaccgacatcggtatttttgtccagttcactaatgacgggtcgtccatttctccgagttcaaagcgtccttccatcaggcgaagcacatgtttgtccacttcttcttccgttatcaatcctttggatacggcttccggcagtttctgataagcatatccgtatccacattccacatctgtacctgccatggttcctttgacggctgcatgtacggcatcggaggaacttttgtgggaagtccagaagtcggcaatggctccacaatcggagactacgagatatttgaatccccactcatcacggagtatctgttgaagcagacgggtgtttccacaacaaggatcatcgtccaggcgctggtaggcacacatcacttcgcgtacatcggctttttgtaccagtgccttgaaagcaggcaggtaagtttcccacaggtcgcggggactgacgttattcagattggcggtatgacggctccattccggaccgctgtgtacggcataatgtttggcacaggcaagtagtttgcgatacttctcattttcaggtccctgcaatccttttaccactgcaatacccatttgtgaagtcaggtaaggatcttccccgtaagtttcctgaccacgtccccaacggggatcacggaagatgtttacgttgggagtccagacggagagactgtggaaacggacgtcttccagtccgttgcgtacgcgttcgttgtgtttggcacgcatttcatcggagactgcattgaagatttcgaataccagtttgtcattgaatgaagcggccattcctaccggttcggggaagactgttacatttccctgattggctaccccgtgaagggcttcactccaccaattgaatttctttattcccaggcgtggaatggcttccgaatcatcacacatcaagagcgctttctcttctgaagtcaagcgtttcactaagtccttcgctctttctgccggacttagttcgggattctgatacggcaatgtttgtccccaccccgatagggagaataacaaaccacaggttactaatacctttttcataataatgttgttttcatggtataaaattatgtttttatttcttggttgctaaggatgatatttccccagtattttaatttcgtctcctgaaatatctacttcgaacagtgtgggtcttcgtggacccgggttctcggagtcgaggctttggtggtgcaggcacatcagcaactttccatcgaatgtacggaataacataccatgccctgaattattaggtatcagaggagcattgcactgaacccaggggccggcaagtttacccgacccggaataagccactccctgcgcacaacggctgttgctccaactggaccacaacattcctaaacgtcccgtacctgtccggaacaggaacggaccatctgccacatagccttccagcgccatgccgaaagtgagttcacctatcgatttcatttctcttggccatggggcatcggatgctctgaaaagggtagtagcggtccctattgattctgacaggtccggagcaagctggatgtagttgatcattccgtttacggtttgcatccattcgtggcaaaagaccatataaggtactccgtcttcttcccagaaactaccgtcgagtgtagaccagtcttccggcagatagtccgtgccgctgatggggtggtagggacctgctgctttgtcggatgtaaggatatgggtggcacgacgttgcacattgtatctgttgggtacagtgtctactatgatcttgggattggtaaaggtgacgaaacaatagtatttacctttatatttatggagctccggggcccatatccttggagcggttccaatccaggaagttgtatccacagtaatgtattgatagggacctgtccacatctttagattcgtgcttttccataaactgccgccacttccaaccagataatacatctgtgtttcttcatcggccaggataaagggatcgcttaactgcaaagagtcaaaggaagtggtgtccatcttatctccttccttgccgccgataaatgtatattgctttaccggttccgggctcttagtctggttacaggccgccagactaagaacgagcagagttattgtgaagtgaaacagtatcttcatagttgcaagtattgttaaaactacatctgtattatctgaagcatcatttgaatattaagcctgcaaattgatgcaatgaacgccgccaggtgagccattcgtgggctgtaccgggagactcgtaatagatatggttgatgtttgcttgagtcagtgcatcatggaattccgttacatttttaaagcgtgcggcttcttcggttcccagactgatatacagtgttttcactttttgattgaaggcttcggcgtcagcaaaaacgccgttgtaggctgtattcagttcattgctgttcatccttcctccgccactgaatccaccgatatgggcaaatttatctaaatgggccagcccgatgcttacagcctggaaacctcccattgacaagccggctatggcacggtgttccctgtcgggcaaagtacggtagtttttatcaatcatgggtatcagttcattgataaccacccgttcaaaagtattgaagttgaacctgcctttttgtcccgtttctttttctttggggtctgtagcatatcctctgtccatgactaccagcatgggaacggctttttggctggcaatcaggttatccagaatgttgtctgcctttccttggttcgaccatccggtttcgtcttctccgctaccatgttgcagatatagtacgggatacttctgagtgttgttctcgtcataacctgctggagtatatacaaggcactttctccatgcctgagtgatgtcggagtagtacatctgtgtacggatttcaccgtgtggaacgtgctgaggcaaatagtaatccactccttcctccggaatttcaatgccgcttgacatccggccacatccgtagaacaattcgctggaaggatcggctacggaacacccgtctatctccaggaaataatagtggaaaccgggcacttggggatcggaggttacttcccaaataccgtctgcattcttggtcatgggatatttcttcattaagtccagttttaccgagtctgcatcgggagcatttaccctgacggttactgataagtccggatttaccaccggataactgataccgaggatattggtcgatgccgataccggggcagttgcttctttttctttgggtttctgtgcacatccggtaatcagggaagcgatcagagttgtatataagatggatttcagtttcatagtctgattatttaaagataagaggtgtaaattgatagagacagcgccgccaggtgagccattcgtgggctgtgccaggtgactgatagaataggctgttgattcccttcttgctgagtgctgcatgcagaagttcggcattgggaccttcttcttcaccgattcccagccagatgaacttgaaatctttattgaatgtgacgggatctttgaaagcgccttcgtagagtgcgtctatatccgtatttttgtctatgggcaatgctccgctgaatgatccgatgtaagagaataaatcccggtggtgcagagtggtttccagagtttgtttacctccccatgacaaacctgccatggcacggttctctttgtccgtcaatgtgcggtaagtcgaatctacaagtggaattacatcttttactatcatgtcttcgaaggcaacgaatgcgtctaccgatgagcgggcattcggctgttgttcgggatatttgtttcctgcatatacggcatatccgcagttcatcactacaatcatcggtttggcttttccgctggctatcaggttgtcgaggatggcatcgatacatccttggttgggccaacctctttcgtcttcgccacctccatgctgcaagtacaggacggggtaacgcttatccggattcttctcatactcggcaggggtatatacgtacattctgcgccattcgtcgcatactttcgagtagaatctgcgggaacggactgctccttgcggtacccctttctgcggtaagtagaaatctattttttcctcgggcacttcgaaggcacttgcctggcggctcatcccgaagtaggaataggttgaggcatcagttacctgcaagcctcctatttgtaccgagtaatagtggaaaccgggcacttgcggagaagaggtgagttcccacgttccgtcctgtcctttttgcatttcgtagggacggtcgagaacgatttgtacgctctttgcatcgggagcttttactttgaaagtcacagttcggtcggggttcaccataggatattgggcatttggaatattggtaactgagggtattccctgtgcccacatcgtccctgtgataatggaacaaaatatcattgcgcttcccgtcctgataattgctcttggtaatttctttcttttcattgttcgtctttttatacttttcaaaaaaactatttgattattaatgataaccgcaaaagtagtatgtaaccctcttaaggaggggtacaaaactatttttgaggaggacttttcttgctggcagggcatttatgtaacacttgtgttacatttgcaggacacaagtgttctgtttgttcaacacaagtgttctgcaaatgaaatgcaagtgtcttgtaaatggagaaccggagaccttatttcagcaggctgttgactgcgttcaccaggtagatgtagcttgctgccagatctattacatactcattctcgctccaaagaaaaggatagtcctccctgttctcggggaagtccggtttcaatatcctgatgcccggcaccacacctccgggaatgaaactgaagtcggcccggttgctcccgtaagctacctttttgggctgtgcgcctactcccgaaacaaaagacagattatggcacggatggcaaccgtacagatagttcaatcctctgtatatgtattccgggtttatcagctcgggatacgaacgatggagcaggtagttcgtaatacacgcctgaacaatgtttctgttacctgcccatccggcagtgctgatccttactccatacggattttctttgtctacttcggcaagttctccggcataagcttctaccaagggccttacttgcttcttgaacgcattatccatgaaaggaatcatttgtgcaatgacagaggcattccggttgaattgttccaaaagggtggggagcagttcgttcattcttgtcttgtaaccttcatagtccgttgagcgccagagttcgaaagcggctctgcattcgatggatttcatgaattcaggattgctgaatcgtccgctatacatttgttcttcgggatttgcctggtggttgtgttcgtcgtcccagatgaagcgagctactcgcagggcttctttgctcagttccggattgtaatccttcaatgcacgcgaagcggctgccagcgaaatggctgtgccataattcatgtgcggtgtccggttggtgaatgcccaacggtcatcgggagtgccacttgtacgtccgtcggtttgcagactatccaggcgagggttataaaccaggttatctgtcttgtttaccgcatctcccaaatggcggtactgatataaatgagactcgttgattcccggaatggcatagcctatcgcattcacctgcgctactaattgcagaacgccgtgttcaatctgttgcaatacatcgggtttgccgtcgggtacgtgtatttccgtatagcgtgtcttttggttaatggtggtttcatcgcggtttaccccaaaactctcccacaaaagggcgaaagcctgtactacggcatgttgtgatccggtctggatatcgaagtctcctgcatcgaaccatccgccgacgttcagaccggggatatgctccagtggtttgtacttgttgccggtggtcggcccttgtctccaaccgtcccaatggatgcggttgacgggagcttgcagggcatcatccagatgtgcggcgccatgccatacgcgataggcttcgcggacaaacatatgatccatctgtacagggaagaatacgtccagtgtcgggaaccatgctttctgaaacacatctgttgcgatggggaaaggtgctgtgcgctggtcgccatattccagcatatagatgcccggttctgtgacagaggagaaatcaaattgaaggtaattgtagcgtgtgtacattccccaggttttgggagtgccggacagggctttgctgaggcttccgtcactacacaccttatataaagagacggtggagagtggcttgtcatttttatccagttccactacggccaccttcttttgtgtggggtggtaacctacttgtgagtagctcaacacgggtttgcgcacccagtcggattgggtctccgctgtgataaaccattcggctatcttgccggtttttcctgccggaagcagggtacgcacaacgaagtttccgttctgttgtttgttccttccgtcaaacaatgacaggttattgtcatcggtggtgcggatggtgatgtgtttcaacggttcgtccggtgcaatgtctatcagtttgccggtggccatgggagtgggttccacttcaccgttgatgatagtcataaagtcggccggagaagtggggaacagaccgtgcttgccgtctattatgtaggaatggccgaagaagaccgggggcatgaattccatattcagtccggctatgccatgcaatgcttcgggtaaaggtttgtctacgtttacgctaaggtagaaaccgccgtcacgggcttctcctgtcaacttgtattcgaagttgtattcgggatattccagcatgacgtcgatccggttatgttctttatccggcatacgctcgacgaactttggcaacttgtcccattgtccgggtgtcggattcatgcggacatctccgttggtagcggtgcggatgccgtgatgaatgatttctacggcactgatcttggaatcatcgaaggtagcatcgtataggttgctgaatacgaagaagttcaacccgcgtgtttcgaagtagttagagtcatttaatgccagatggctgttgcgggaaaaggaggtactttttccgcaaccggtgaatatcaggcatcccactactcccatacaaagaatgattgcttttaatttcatactattcattttcgtaatcggttcacttatcaaataattaatcatgcgaatcaggagttgaattgattcatatcttttcggttatgagggaaagttgacgagttaacaagttgacaaggttccatgcggcatagaagcattgcgcagccccttgttcccttgtcaactcgttaactggtttccttcctttcttttccgttataaatcaaattcagcccctgattcgcataaataactaatctttaattatttgcccatccgttaagctgatgaagttctttgtttaagtctataacatctttggggaatgggaagtattcatgtttaccctttacgaagccataagagcttgcaggtaaattttgatctactgataaaggatgagtcaactcagcacgtagatgatgttcttttccatagtatggtgtaccttggatgaagaagtcgtcatacagttgcggaacctggtcaacgacagcatcctgacactctttagcaatgccccaacgaacgatgtcgtgaaaacggcaagtctcgaaccaaagttcgtactgcttttcatcgcgaagagtctgagttgtgagttctgtttcaggagcttctgcacgtttctgaatagcattcagatattttttaccttcatccaaattacctgtttcaagacaagcctctgcataaagcagatacgcttctcccaatctggcgatacggaatgatgcagagttatgagtatcgctaatagtcatattgcggtcgttaggagattctatattcttgacttccatatatacgccatgtgcgaacaggccttctgtactcttgataccacgttttggatcttttttcttgtcggcaagagacatctcatttccgtcagcatcgaaatccgtttcccaaccgcagagtttagaatcgtataagaattcgtccggagtgaggaatgtagctttgcgacgcggaccgtcaccatcattttgatacatcttctcggcaaacttccagttgatggcaccaccgccccaaccatcgttagcgccgcagatggatgcgcgagagcctaagcggtcataacgccagttcaatacgttgtttgtcatccaacggccacgttggatattaccccaaaaacctttatcaatgttaccgaagcaattagcctcgaagattttttcttcgcagccattaccctctacatggaataggtcacggaaacgatttcccggaacaagtgcatagttgggagattcaaccaaaggcttaagattcctctctgcacgagccatatcgccggcgaatacggcagacttacccgctacgaaatatgcaaaaccttttgttactttaaaagcaccttctacatcattaggacctttacgtgagtcaagatcatttacagcttcttcacactcggaagcacaccactcaagcagagatttttggctttcgacattggtaggcctgtcatcggcgccaagcagtttgtcgacttttggaggacactggaatgtgagagcagccatcatgtggcaataagcgcgtaacacgcgggcctctgcaacacaacgagccataatcgtacttgcagccggatctacatatgttattacaaggttacttgcataaatagatttatagtaacgctgatataattcttttagagcagcgttgcctgtatcatagcggaactcatcgaatacacgtatatccatgtggtcaacataatctgtaccggcggagaaaacatcatctgctgaataattgagtaaagtgaactgcggctgatagattccggcagacgaacatacattgtcaaggaactgcgcataagcggcagtcatagcatcaatagcatcttgatcggttttatagaagttttcagtagagctaacagccttctgttcgatgttcaaacgactttcatcgcaagatgtgcagaacagtgcggcacataccgcaaacgaatatatatattttttcattttcgtcagtattaatggttggtttagaatgttacattaagaccaaatgtcatcttgcgcattgtaggatatgcgccggcatcaagacctacattattgccacttcttgaagcaatttcagggtcaagacccggatacgatgtaaatgtgaagaagtcatcaagtgacacgtaagcacgaaggttctctataaataccttttttgtgatagactttggcaatgtgtatcctaattgcaattgcttaatcttgaagtatgatccgtcaaatacaagagcagaagatgaccagtagattttatcacctgcaattgtgttaagactgggcatattccccttcttggcttcatcgtagaaatgcttggagatattgttgtagcctgtacgatacataccgtagtagacatcgtttcctaccgtacctgtaccgaataccgagaagtcgaaacccttgtactcaagattgattgtaataccgtatgtaagatcaggaatacctttaccgatattgaattggtcttcatcacccggagttaatgtctcattgccttctttgtcaagataaagaggctgtccttctgaattcttacctatatatttgtaaccacgcatataccataccggcatgccttgttcgaagttggtgtatatagtattgtttgcacctactatacttccacccgatatacgtgtgatacggtcatcaaggtaagttacttcattcttcaatgttgcaaagttgcctgatactgagtaattcagcctgcctatgttgcctttataagttgcttcaaactcaaaacctttgttctgtacctcacctgcattgatcatctgtgaagatacacctgtctcaggcagacatggagcgtctacaagaaggtctttggtcgttttcttatagtagtccatgctgattgtcaacgcatcgttgaataaacgtaagtcaagaccgaagtccagctgatcggaagtttcccaagtaaggttaggattagccaaaccgcttggcatagaaccatttgtaacagttgtaccgttgctatattgataccactggccaccagttgcaatagaagaagaatatttatagccgctaagtacattgatattaccgttacgcccccaagatgcacgcagtttggcaaatgaaacaatgttatcaggaactaaatttttaaagaacttttcattactgagtgtccagcctgctgataatgatgggaagtaaccccaacgtttatctgctggaagttttgaggtatcgaatgcgtcagcacggaaattggcttgcaggctatagcgatcgtcataagtatatcctaaacggccgaagtatgaaatgcttgaagacttacccggtgttccactgaatgtacgggaaactttatctgatacaagtacacaatccaagtaacggaaattttcttcgtatgaagaaagcaattcttcacctgacgcacctgctgtcgtgccgttactttcgctttggatgtatgacatacctgccatcgccgaaatgctgtgcttgccgattgaagtcatgtagttggcaaagttctcccactgatagtataggccgttgcttgtagtctggctgatagagtacttggtatcacttacacgaccggtgatatagtaaggttctgcgtagctgtaagtattgccctgagtaatgcgagtaccaaaacgagaagtaaatgtaaagcccttgaatggggtcaggtttgcgaagaacgtactatgtacattgatgccgccatttttattgttagcattcttgtcacgctgtgcaaatggagtgccgccggcaagttctgtattaaagtatgaagtagcatacatacccctatcatcgccgtagaaacgatagtttgtatcagaagttccattctgaactgcgtcataaacagaacctgtggcagcgagatattgactgcggtctgtccagtgtgtaggagtcagaggatccattacaagaagcatttcaaaagcggagccgtaaccatattctgatacgctgcctctacgccatttctctatagaagtgttggtacctacctgcaaccagggttttattttataatcagcattaatctgagcagttaaacgttcgtagtagtcgtttttgccttttacgataccatcctgattaacgtatgtgaggtttgcaaaatactgccctttgtcattgctaccctggaatgaaagagagtgctgcttgctccaagaagttcccataaactcgtcgaaccaatttgtatcagtattttgatcccaattataatcgcgaatagcatccgacatggcagcctcgacgttatatccttgcatgcccatccagtccttgaactcttccgcattcagtaattgtggaacatgtccaagttggttcatagtataacgtacattatatgtgatcttgccggtaccttttcctcccccattcttggttgtgataagtactacaccgttacctgcttcagaaccatagattgctgcggatgcggcatctttcaatacttccatagactcgatcaagcctggatcaagatactggatgcttgaaaccttcaaaccatccacaatcaagagaggaccaatatttccggaattggaggaataaccacgtacacggatttcagcaccgctacccggagcacctgatgaattcaagatttgaatacctgcggctttaccttgaagggcagcggcagcgtcggttgttgccaagcctttaaggtctttagagttaaccgaggcaacagcacctgtcaggtcactcttgcgctgaacaccataacctacaaccacaacctcatcaagcacttgtgtatcttcttccaaacgaaagttgattacgctacggccattgactttaacagtctgcgttttgtagcctataaaagaagcggtaagggtagcattactgttacttacctgaatagagtaattaccattgagatcggtaatacgaccgttgctggttccttcttcaagaatagccacaccaatcattggctcagaatcattggctgagacaacagtacccttgatttggatttgcgctgatgctgatatgcacgtaaaaaacacaagcacaagcataaacagaaaaggaatcttctgaattttctggactacatttttcatcataattagtttaagaattaataattgcgttttttattcatcattagctaccgctacaatagttctctagccatcatcatacatacatttcatagtttttaattatttaagattaatataaaaaggcaattcattttttaattctgaatcggcaagacaattgctgagtcgcattattaattcaaactgattgcctgagccgattcgttatttttgagtggaattacccggtaatagtactttagagtaatagggcttgttcctaatgatcgcggaaattccatttggaattgtcgctattcatattgaattcgccgagagaaggagtgctgtcacctacggataccagagccaattccttgtcagttcccggcacttctttgggcatgatccggtaggtgccgtctgtcaactggtcgattcgccacagttgctcgggggcccccgtgaactcaggcactgtcacgacttccgcatctgccgtggcggccagtgcgcgattggttccttcaatcacaatcttgtaataagggccacccagatatccgcctccatcgggtacggcagtaatggtccacttctgatgaggacggaacatataatcaccgattcttacgttgatttttccttgtggccaggtcccgatcacatcttccaacgtctgcgatttcaaaggtacgacgggcgtgtcatctttttcccagaagcggtgtttggtatattccatacgtacaaaatcaacggcaagttcaagggcataccctctacgttcggattcaatctcatacgttccctctttgaagacctcgccggcaacgggccagccgttcttccataaaagcgggcgtatgcccagtacactgcggccaccccggtcgaaatcggcttcaaagtggcatgacatcttctctactccgtcggctactttgaaaagcccgaagtgtcccggaccggtttggcggttacctgcggcaatcaccatcttgccaccgccttccagcatttttcttcccatattatcgacatatggccccgtcactttacgcgaacggccgacaacaatattataggtggagttcggaccatcgcagcaagtgccgtgtgttcccagaagataataccagccgtcacgatagatcagatcggttgcttcacagtcaatggcgatgtcgatttctttgttgccctccatccgtttgccggttgcggggtcgagttctacaagcctgataaagccgaaatacgtgccgtaagacaaccacaagcgtccgtctgtcgggtcgagcagaagtccggcatcaatggcatcgcaatcttcatcattcactgaggaggccacttctataggctccgtatatttaaaatccggggaattggggtctaaggttttattccacatggttaatactttaccgctgtgtcctccaccgagtcctcctcctgtggcactgtaagcaatcaggtagcggtcaccgattttcacggcatcgggtgcggcgcctccgccgggtcttactccgccaccgttccatgtccagccgtcttcagatatcaatccgcctccacctgtgccgaaagtataatatttaccatcgcactccatgatagtggacgggtcgtggatgtatggagtgccgatttgtgcaattgctttttcagatgtcaatacaaacatcagggctgccgtgcccagaagtatagcttttgttttcatgatcatttatagctgatagtaatgttgttaacgggtgttccattctcattgaggaagcgaacacagaaatcactcattccgggaccgttgatgatggctccgcgaatgatgttcttgcccttctttaaagtcagccggcgcgaaaggcagtcatccttgaccatacgtcggtcgcccgaaagaataacagcctcctcaccgttcagccaccacatggatgcggagttggaacctactgacatccggatgttctccatgtcttcgggacattctatgactgtgactgcccagaacagcacgccgtacacttgtttcttcaggccggaggcgaaacggaagagcttcacgttgaacagcttactgtcgagcgcgtgccaggttagcttttgtttgcctactttcactttatccccgtctttgggcagaacggtgaattgattggggaaatactcggttgcaaatgcttcgcgaatgtaactgtcggtaaagaccgtgttggaacggttgggcttgtcgatgggttccagcaacagccagcgctggataaagccctcactgtcgggtgacatcgtattcgtggttgccggagaaaagtagtctgacaaccggggggacgcttcattcttttgagcatagccatgtaaacccatcatagccgcgatacaagccgccaacaatgattttcgatggaagatattcatcgttatagtctgttttattgattatacattatttcgttttaaataatagaggaacaaactctttcagacatctgcgccaggttaggaactcgtgggcagtgcccggagactcataatagattgtattgattcctgcggcctgcaagccgtcactgaggttcttggttctttcgggatgttcttccgaaccgatacccaggaagaagacgtgtactttgtcgttgaatgctttacggtttttgaataccccgccgtacacggtatcgagttgcttcagatcgatgctgcctgctccgctgaatccgccgatataggcaaacttatccaagttgttcagggtagtgttgaaagtaagaagtccgccccaggaaagtccggccatagcacggttgtccctatcagtcagtgttcggaaattggattcgatatgaggaatgatttcattcactaagatagcaggaaattctgcaccgaatctttttcttgcaccgtcgggagtttcacccggattggtcttaaacacctcgatattgccattgtccatgactacgatcattggtttggctttaccttcggcaatcaggttatccataatgaaattcatcttgccctggtttgcccaactcgtttcgttttctcccataccgtgttgcaggtagagcaccggatacttcttggtagggttcttgtcatattccgccggagtatagacgatacatctgcgccattctttgcggatatcagagtagtaccagctttggctgatcaacccgtgaggcacgttcttgatggaatagtagtccacacctttctccgggatttcaataccgcttacccatttgcccataccgaagaacggtttgccattgggatcggcggcacttactccgtctattataacctgatagtagtggaagcctattacttcaggttcttttgatacgagcgaccaatatccgtctgcctctttggtcatttcacctcggaaactgatttctactttctgggcgttgggagcgtgtatcctgaagtgcacacgtctgtcctcacctatgcggggataatcagccccattgatgttatgctcattgggagtggttcctgccggaaaatcttgttgctgggcattcatagtgaatgggaacactaacaaagaagaaaaaataagtttcaatacatttttcataagcattagaataaattatatataaaattaatgattcagtgaatttgtctattcagtggatgttgagcgtaaaattactatgctaatgctttgtgctggattactattttgctttcggggaggatttttttaggaggataagattaatccaccggatagaaagaaaaatccccttcctgatattgaataggaaggggattataacccgtcttttgccttatgtggaaggaatttggactcgtagtcaagaaaatacattttctgttaagtggcacaaaagtttcttacctgtggcacaaaagtttctcgcctatgaaacaaacgtttcttacctgtgaaacaaaagtgcctcacctgtgaaacaaagtcaccttaactgtatgccttacgcttgcgatgtctccagcatattaatcagttgtacccgctggatagagaaactattgctttctttctgtacatacttcaataattcaagcccatcctgatgaagcttggatttccgcagcaagtcgtcggcttccatatcatcagatatcttcagcatagtcatggcggcaagttctatttttcccatttcattgggatcgcctttataccggtctaccagttcttgcgtatccatacttaacagctcatcggtagggaaacctaatatctgccgggtcagaccgtcatattcagtccattcattccagcgatacttctttttcttgagcagggcgttcacaatcaaagaaatgatctcttgaatcattcgtatcaggtaatcttgtttaatcataattatctatgtttttaataggtaatggtaaatccggttaattgtttctcggagctttgacaattccggctttttataaagcagtactttgtgctcacaaaattagtgatatttttaagatatcgctgaaaatccatacctttgtgcgcattaataatataaggtatagcaatttccatgaataagataacttccgtatgcgtatattgtgcttcgagcaccaagattgattccgcttattttgaagcagcccgcgaattgggtactttgttgggacagcgccacatccgtctgataaatggcgcgggaggcatcggactgatgagtgctaccgctgatgcagtgctggcggcaggcggagaggtgaccggtgttattcctcactttatggtggaacaaggctggcaacacaaggggcttacggagatgatagaagtggaaaacatgcaccagcgcaagcaaaaaatggcggatctgagcgatgctgtcgtcgcattgcccggtggatgcggcactttggaagaattactggaaattatcacctggaaacaactgggtctctacctgaatcctattgtcatcttaaacactaacggctttttcgatcccctcctggctatgttgcagcgtgctatggacgaaaactttatgagacagcagcatggtgccatctggcacgtagcaagcactccgcaggaagccgtcgaactgattcataccatacctgtctgggatagttccatacgtaagtttgcggcaatatgatcgggctcctgttgacatggatagcgggctttgagggaatacccattccttattctcctaagttggacgatgggatcacagtgctcctgttgtgctgctttttcatgtcagcctatgtattgtcccgcagtcgcaagttcctggtgcagttggtgaaggacttccttctcaatcgtgaacgaaccagcatctttgccgctaccaccgctacggatatgcgctatatgctgttgttgattctacagacttgtgtgttggcttccgtctgtactttcaactattttgttgatgtcaggccggagttgggcgaacgcgtctctccttacgttttgctcggggcatatctcgcactggctttgctttatcttttctggaagtgggtgacttactcctttctgggctggattttttttgacgcgagtcgtaccggtctttggatggagtcctattctactctactttactaccttggatttacccttttcccgtttgctttgttccttgtttacttcgatttaagtcttcaagcaactgtgataatcggtttatttttggtcttttttactaaaatattgatgttatataagtggataaagcttttttgtggcaatttatatggcattttgcttttaattttgtacttttgtgcccttgaaatcataccttgttttatcatgtatcgaggtgtgttacaactaaatgattatttgataataaatttttaggacgttgaaaattaagaaagtacttgtgtcgcagccgaaaccggcatcagagaaatctccttactacgacatcgcccagaagtacggtgtgaaaattgattttcgcccgtttattaaggtggaaagtgtatctgctaaagaattcagacagcagaaagtgtctatcctggattacacagcagttatcttcacatcgcgtcatgctattgaccatttcttccacctgtgtacagaattgcgtgtaaccataccggaaactatgaagtatttctgtgtgacagaagctgttgcattgtacatccaaaagtatgtgcaataccgtaaacgtaagatcttctttggtaataccggaaagtttgaagacttgttgccttctattgttaagcacaagaccgaaaagtatctggttccgatgtcggatgtacatacggatgagattaagaatctcttggataaaaacaagatacagaacacagaagctgttatgtatcgcacagtaagtaatgattttacttcagaagaagagtttgattatgatatgttggtgttctttagtcctgcaggagtgacttctttgaagaagaacttcccggacttccaacagaaagaaatcaaaatcggtacgtttggctccactactgcccaggctgtacgtgatgccggactccgcctcgacttggaagctcccagtgtacaggcgccttctatgacggctgcgctggatatgttcatcaaggagaataacaaaggaaaataattttagagttacgagctacaagctacgggctacaaatgtcatgcggaagcagtatgccatttacagcttaaacttgtagctcgtaacttatttactgcgaactacttgtagctcgtagcttgtaactcgtagctaagaatgcttaataccctgcacaagtccgaaaggctggataagaagaaagtcatcgacaagatgttttcaggcggcgcacgttcgttttccgtctttcctctgcgtgtggtatatctgccggtagaggagttggaagcgcctgtttccatacttgtcagtgtgtcaaagcgtcgttttaaacgtgcggtaaaacgtaaccgtgtaaaacgccagatacgtgaggcataccggaaaaataaacatggattattgcagacgcttcaggatgaaggacggcaacttgctgtggctttcatttatctttccgaccggttagtcgattcgttggagatagaggaaaggatgaaggttgcgctggcgcgtatcacggagaaggtattggcggatgttgccgttcagaaagccggagaaaatgctacgtctgctgagaaaaccggtagtgcggggcagtcatgaaaaagctgttttcatacttgctgttgcttcccatctatttctatcagaagtgtatttcacccctgacttccccttcatgtcgtttcactcctacctgttcgcaatatgccgttgaagcgataaagaaacatggaccgttcaaagggctgtatctggcaatccggcgtattttgcgctgccacccctggggaggttccggatatgatcccgttccataaaaaaaactattttctgtactattcgcatgataattcctgttgatatacatacacatcggcggccccaagtgcccggaacggctattgtgaactgtttccccaaatcgtttgttccgcaaacggaaggctggtattctgtgggaatacatccgtggtatatcgcttccttcgcagcttccctgaatgacagtaaggcccgttttgaagaattactggaccatccccaggtattggctgtgggtgaggccggattggataaattggctgaagcacctttgactttgcagatagaagtgtttgaatatcaggcacgtctggccgaagaggcggataaaccgttaatcattcatctggtgaaagcggtagatgaacttctgaaactgaaacagaagatacaaccggtgaaaccgtggattattcacgggtttcgtggaaaagcggctcttgcagaagaatatctccgacatggtttctatctttctttcggagagaaatatcaggaggaagcgttgtgtataataccgtctgaacggttgtttatcgagacggatgaaagtacggtatctgtcgatacgctttatgaacgggctgccatcctccgtaaaactccccttgaggaactcaggagaacgattcgtaagaatgtgagcgaaatcttttttaggcaataagagttgttagttcagataaagagtcgtacttttgcaattacaaagtatatcaaatatttaaatagttaatcattcgatgaattttgtagaagaattgagatggcgtggcatgctccacgatatgatgcctggtacggaagaacttctggctaaggaacaagtgaccgcatacataggttttgatcctacggcggactcattgcacattggacatctttgcagtgtaatgatactgcgtcatttccaacgttgcggacacaagccgatggcactgatcggtggtgctacgggtatgattggtgacccttccggtaagtcggcagagcgtaatctgctcacagaagaaatcctgcaacgcaatctggatggtatgaagaagcagttgagcaagtttctggatttcgaatccgatgctcctaaccgtgcagaattggtgaataactatgactggatgaagaacttcactttccttgactttgcccgtgaagtaggtaagcatatcactgtgaactacatgatggcgaaagattctgtaaagaagcgtctgaacggtgaggctcgtgacggtctgtctttcacggaattcacttatcagttgttgcaaggctacgacttcctgcatctgtatgaaaccaaaggttgcaaactgcaaatgggtggttctgaccaatggggtaacatcacgacaggtgccgaactgattcgtcgtaccaatggtggcgaagtgttcgctctgaccagcccgctgattacgaaggctgacggcggtaagtttggtaagactgaatccggcaatatctggcttgatccccgatatacttccccatataaattctatcagttctggttgaatgtgagtgatgctgacgcagcacgctacatcaagatattcacttcactgtcaagagaggaaatcgaagccttgacagctgagcatgaaactgcaccgcacttgcgtgttcttcagaaacgtttggcaaaagaggtgactattatggttcattctgaagaagactataatgcagcggtggatgcatctaatatattgttcggcaatgcaacttccgatgcattgaagaagttggatgaagataccctgctggctgtattcgagggggttcctcagtttgaggtttccaaggatgctgtgtctgccggtgtgaaagctgtcgatctgttcacagataatgcagccgtttttgcctccaaaggtgagatgcgtaaactggtgcaaggtggcggtgtttctctcaataaagagaagctggaagccttcgaccaagtggttacttctgctgaccttttggatgaaaaatatctgcttgtgcagcgcggaaagaagaattactacctgattatagccaaataaaaggcaaattagtagcaaataagaaaaaaggccccgaaatatttggatatttcggggcatacttttatctttgcaccgctttttaacagaaagcacccgagtttgtcctatggtgtaatggtagcacaacagtttttggttctgtttgtctaagttcgaatcttggtaggacaactaaaatgaaagagctctatagagaattatctctgtggagctctttttttgtattattttctgttaaagaacttccattttcttccatttgaacaatattactatataattggtacaaaaacacaatgtttctccgttttcttttgctacatttgcatcgtgtacgtaaacgaagtatgccaataaccgattattatcaactttaaaacgtaatagaattatgaaaacgaactatgaaattcgctatgcagcgcatcccgaagacgcaaaaagttatgataccaagcgtatccgtcgtgattttcttatcgaaaaagtcttctctgctaacgaagtaaatatggtatattccatgtacgaccgtatggttgtaggtggtgcaatgcccgtgggcgaagtgttgaaactggaagctattgatccgttgaaggctcctttcttcctgacccgtcgcgaaatgggtatctttaatgtaggcggtcctggtgtggtaaaagccggtaacgctgtattcgaattagattataaggaagctctttatctgggttcgggcgatcgtgaagtaactttcgaaagcaaggatgaaaagaatcccgccaagttctacttcaactcactgactgctcatcgcaactatcctgataagaaagtgacgaaggctgatgccgtagttgctgaaatgggtagcctggaaggttccaaccatcgtaatataaataagatgctggtgaatcaggtattgcctacctgccagttgcagatgggtatgacggaacttgctccgggtagcgtatggaatacgatgccggcacatgtgcacagccgtcgtatggaagcttacttctattttgaagtacccgaagaacatgcagtttgccacttcatgggcgaagttgacgaaacccgccacgtatggatgaagggtgaccaggctgtattgtctcccgaatggtctatccattctgctgccgctactcataactatacctttatctggggtatgggtggtgaaaacctggactatggagatcaggacttctctttgattaccgacctgaagtaataaattgagtaaaccgagactttgaatcgtaattagaaacaagttattaataaacctaagtaaataaattatggtaaacttttcattagaaggcaaagtagcacttgtaaccggtgcttcttacggaattggcttcgctctggcaactgcctatgcacaagccggtgcaaaaatcgtgttcaacgacatcaaacaagaattagtggacaaaggtctggctgcttacaaagctgaaggcatcgatgctaaaggttatgtatgcgacgtgacaaatgaagagcaggtgaacgctatggttgcccagattgagaaagaagtgggcgtgatcgatattctggtaaacaatgcaggcatcatcaagcgtattccgatgcacgaaatgtctgctgctgaattccgtcaggtgatcgacgtagacttgaacgctccgtttatcgtatccaaggctgttatcccttctatgataaagaaaggtcacggcaagattatcaacatctgctctatgatgagtgaattgggtcgtgagaccgtgtctgcttatgctgctgccaagggtggattgaagatgctgactcgcaacatcgcttccgagtacggtgaatacaacatccagtgtaatggtatcggcccgggttacatcgctactccgcagactgcaccgcttcgcgaaccgcaagctgacggttcacgtcatccgttcgatgcatttatcgttgctaagactccggctgcacgttggggtactcctgaagatttgatgggtcctgccgtattcctggcttccgacgcttctgatttcgtaaacggtcacgtactctacgttgacggtggtatcttggcttacattggcaaacagcctaaataagtatatgaataaataatgggaaatggataattgatgctgtcagttatccatttttcccattttctatatcttcataatccattatccgtttttcaattatcaattgattaagcaatatgaaaaagttattccttttactggcaacagcattcgtatgttttgcctgcaccaacactaaggatgtagttaccgtaacggtaagcaatcctttggcaatggagcgttccaatgaaatggttgaggtggctatgagcgacatcgccaaccaactgaaactggctgacacagcacagattgtggttctgaatgctgacggacaacaagtcccctatcagattacttatgatgaaaaagtgattttccctgcaagcgtagctgctaacggtacggctgtttataccattcaggcaggcacgcctgaagcttttgcagtaaaggcttgcggaagatattatcctgaacgtgtggacgatgtagcctgggaaaatgacctggttgctttccgtgcgtatggtcctgctttgcaaaagactggcgaacgtgctttcggttatgatgtttggacgaagtacaataccaccgaaccggttgtagaagcccgttatgcaggtgagttgaatccggagactaaagcaaagatcgctgaattgaagaaaactgatccgaaagctgcacaggaattgtatcaatcggtatcttatcacgtagaccacggaaacggtctggactgctataaagtaggtcctacgctgggtggcggtactgctgctttgatgcccgacggtgaaatcgtttatccgtattgctacgctacacaggatattctggataacggtccgttgcgtttcactgtgaagctggtttacaatccgctgactatcaagggtgactcaacagtgattgaaacacgtgttatcacgctggatgcaggctctcacttgaacaagactgcggtttcttttgataacctgaaagagactactcccgtggctacaggtatcgtgttgcacgaaccggatggtgctgttgtagctgatgctgctgccggctatatcacttatgtggaccctacggacaatgtgaataataataacggtaagatattcgtaggtgctgctttcccgactacagtgaaagaggcaaaatcgttgctcttccctgaaaaggaaaagaatgaactgcgtggtggtgccgatggccatgtattggctatcagcgattatgaaccgggttcagagtatgtttactactggggtgctgcctgggacaaggctgacatcaaaactccggaagcatggaatgaatacatggcaaactatgctcagaaggtacgtaatccgttgacggtgacaattaaataaatctcgtcttgaaatagtagagtcccactgagttcaatcaatttgaaatgaactcagtgggactctgtgttattctgtggtgaaaccttatagcaatttaaactcgtatccttcctcttccagaaaatccaatgcccgcggcagtgcatattgcaggttgccgttattccaggacttcagcgagtcgtggaaagtgataatagacccgttccgtgcatatctcatcacattggcaagtacttgcggaccgcgcaatttcttactgtagtcacgcgtaaccaaatcccacatcactatcttataatgccgtttcaaggtgaaatactgtccccagcgcatgtgaccgtgcggtggacggaagagatctgttttcatcagttcattcgccttgtccgtattggcaagataattgtcggacagatattcgaatccgcggatatgattgaatgtatggtttccgatgcggtgaccgccatctactaccatttggaatacatcgggatgcttgcgtatattgtctcccaccatgaagaaggtggctttgatgtcatgtttatccaatagttcaagtacccatggggttacttcggggatgggaccatcatcaaaagtcaggtagacggatttctcgttcggatccattcgccaaatggcaccgggatatagctttcggacaaactcgggaggctgttctataaacacggttattagtgattaacgattagtgataagtgattagtagttagcggttagtgataagtgattagcggttagtgtgcgatgttacggcacagccgttaatcacttatcactaaccgctaatcactatttcttatttcatacggtcaacgcacatctgatacaattcgttcagcttgctgtcatatatcggagccagttcggaattatacttctgcataagcttcacttctgaactgaggataggcagctgatagtcgatgatttcacggctggacatagcaaaacgttgttcatccaagctcagataccaagtgaggtattccacggccttgtcggcaagtgccttcataatgctgtcggctttttccgtttcgcccagttgatagtatgcttctgccatttgtacggcaccgttctgccagtcgtacggcacattgtaggcaggaatcatcttctctgcgtagtccaatgctttcttggccttgtcattcttgccttcacgtatcaactgacctacgagttgtgagaagatacgtcggtgagaatagcacatacgcatggcgttttcatcaatatagataccttccttgtcgatgccaccgaacttgaacttgttcatcaggttgtcatacatcttttcgctatccagtttgacgcctgtcttgtcggtatcgaacggagtgaagcgataggttaggccttcctgtatgaagtgattacccatgccgaggtgattctccgtacctacgctgactgccatgtagataggacgttcccaattggcttctgccagcatttcaagcatcatcagttcgctcttataaagggcgcgtttgcctttcagtgagatgtgcatgtaatcggggatactgtcgcccggtatcatcatgccgctacggcgtacagcttccttatccaccttcagtacaatgctgtccgtaggaattactttgagatcttcatttttacttcgtacccaatatttcaggatgttctgcaattcgtacgggttttcaccgaactctttcttcacattcaccagagcttccgggttaccgttcagtgcctgcttttcagcttcggcatagagggcgtcgatgctcttcttgtaatcggcctgtacaggaatgtattcattggttccttccacgtaatccatacggtcccaagtgatgggtaatgacggagaatcgtaggcaggacgcttcatctggtcgatataccaatctgtctgtaagtaactgaggttacaagtacgtgcgtccgtgcggaatccttctgtttcctgattgtaccacaaggggaatgtatcattatcaccgttggtgaagataatcggattgccggtttcttgcagagacatcagatagttctggccgaagtcacgtgccaggtagcggtcgctgcggtcgtggtcgtcccacgtctggcttgccatctgtatgggcacgaacaggcagacaacggatgccagtgttgcggccggaagttccttcatcttggcgtagtgttgcaacaggcggataatacctgccacacccatacctatccaaatggcaaaggcgtagaatgatccggcgtatgcatagtcgcgttcacgcggctggctcggtgtctgattcaggtagagcacaatggcgatacccgtcatgaagaacaggaagaacactacccagaattgttgaatacccttctgtccgcggtatgcctgccatagaaggccgatgataccgagcaataaaggcagacagtagaagacgttgtggcccttattgttttgcagttcctgcggcaacagactctggtcgcccaccaggaagttgtcaatgaacgggatgcctgtgatccagttaccatgttctatttctccgctgccttgcaggtcgttctggcgtccggcgaagttccacatgaagtagcgccagtacatccagttgagctggtaggtgaagaagaacttgatgttttcccattgtgtgggcatgttcaccatcaccatttgtccgcactggtcatagggaacgtcttcgcccttaatgtctacccaggcttgatattccctggcgtgctggctactgtacatacgcgggaaaagcatattctgcgcgtattcgtattcgatacgtccggggatttcaatatagctgtccttttcatcgggagtggctttttccttgcggataaatttggttccgttgtacgagatacgcggttcgcaatagccatcttttacatcgagggctactttggaagagaatgcctgtccgtagaataacgggcgggttccgtattgttcacggcccagatattcacccagcgtgaagatgtcttcgggtgagttctgatccatgggggtgttggctgtagagcggatcacgataatggcgtaggaagaatatccgatgacaatcatcatggtacacaacagcgaggtgttgagcgtacgcgcagaaacacgatatttctctttcatacttgcctgcatcttcgggctgaggtagaagaacaggaaggcgataacaataatacctataataacagcgctcgttccgtgtccgtagaagggaatacctaacaaggcaattgtcagtacgaaggagacggacatgcgcatcttgttcttttccgtgtagctttcgtatactccccagatgatggaagctgccaatacaatgatgtaaaccattacaccgctgttgaaggacattcccagtgtattcacgaagaacagttcgaaccagcctcctacttttacaatacccggtaccatgccataaagtacggcggcaaccagaatgcccgaagcgagcaatgccagtaatgaacctttggcatttgcgttgggcactttcttgtaatagtaaaccagtacgatggcaggcaagcagagcaagttcagcaagtgtacgccgatactaagtcccgtcaggtaagcgatgaggataagccagcggtcgctgtgaggttcgttcgccacatcctcccatttcagtatcagccagaatacaacggctgtgaaaagagaagagaatgcgtaaacttcaccttcgacggcactgaaccagaaggtgtcactgaatgtatatgccagtgcgcctaccagaccgctacccatgatggtaatcagttgtccgcgggtaatattattctcatctgtaacaacaagtttgcgcaccaggtgcgtgatgctccagaacaggaacaggatacaagcgccactcatcagtgcactcatatagtttaccattttggcaacggtgctcgggtcggaggcaaattgtgagaacaggttggctaccagcatgaagaaaggtgctccgggcgggtgtcctacttccagtttgtagccggtagtgatgaactccgggcagtcccaaaaacttgcagtcggctcaatagtcatgcaatagaccgtagctgcaatgaggaaagtaatccaacccacaaggttgtttacggttctgtactgtttcattcggaaagaattcgttatgtttttaagttatagctctgtatttttgtatatacggccgcaaatatagtgatttaactgctaaatgcgtggaggtaaggcatatttattaggataggttaaaagatatacattgattttttgtagagaaaagtttcaaatattatagctttgatgtttaatgttcgcaattacagcatccacattcgtcgccatgtttatgctctgccaatatgcgatggggcagtgctccgtgccctaataactctatcggacagttgaagttccgttccaaccattcctcacttatccccgtgtcgggatgataatccagtgtttcattcacgcaggcgatggacttcacttgttgcagtactgtgccgatatcatggctgacaagaatgatggcgcagtcgtggttaatctctgccaatagttcgtaaaggcgggcttcgaaacgcttgtcgatataggtactgggttcgtctaggacaacgagttgaggatcggagatgatggcacgccccagcaaagcacgttgcaattgtccgccgcttagtgcgccgatggcacgttcttccaatccttccaatcccatgcgggcaatcacttggcgggctttcttctgatgtgctgcggtgaagcgtgaaataagtgacttttgcgagctgagtccggaaaggattacttcttccactgtaatgggaaacttacgatctatactgttgtattgtggcagatatcccattttgagtgctcgtccacctctataaagaatttcccctccagtaggtttcaacagaccgagtatacatttgatgagagttgtttttccgccgccattagggccgatgatgcccagaaagtcccggtcgtaaacggtgaggtttatgttgcgtaataccgtgcggctgtcatagccggcactgagattctttatttcaataagaggcgtacccatttgtttactgcttgacgatgtctttagttcttaacgaccaattccttggcaatgttcaacatttcttcttcccaatcgtaagaaagcggattgatagggattaccttcgttcccgtctgtttggcaatgatctccgcattgcgacggtcaaattcaggttgcacgaagataacacggactttctcttttttacaagtgtctatcagattcttgaggtgggagggagaaggttctttaccattttcttcgatggaaatctgatgcagaccgtagtcgcgggcaaagtaagataatgccggatgataaatcatgaaagcacggtccgcattgggagccgacagcatgtgacaaataaggctatcggtatgttcaatctggttgcagagacttttgtaacgctccatatagacttcttcattgcctttgtcgatggcgcacagtgcatttacgatatttccggcaataatctgtgcattataggcagaactccaaacgtgtggttccacacccaaaagatgctgatgctcatcgtcttggatggaatcgtgagcgtgaggttcatcggcatcgtgatgatggtgggcgtgtgaggaatcataaatcaggtcgatgccgcgggaagtatcgaagaattgcaggtgcggagcgttatccgtcagcttgtccatccaggtttgttcaaaaccgatgtagccgatccggaagtaggctttgctcttggcaagatctacgagttgctggggggtagggtcgtaggtttccgggctacttcctttgggaaccatgctgataacgttgaagttatcgcctgcaatggcttcggtgaaatagcgtaatggctcaatagtgacagtgatgacgggcttatcgccttcactcttattattttggacgctgttgttcttgcaggatgcggcgagcaaggcagcgaggatgtacaggaatgttcgtttcattattatatttatggtttttataattgattactctttatggtttctctttcgttgccctcagtatctcccgttttccccccggaggtcccggaaggcgctccacacggaagcccacagcttgcaacatacggcggatgacacctttggcgcaatacgtcgtcaatattccccctgtattcatataaacgtaaagagagcgaaataattgctcgttccacatttctggttgcttttcaggggcgaaagcatcgaagtaaacgagatcaggatttagtgataaccacttatcactaatcgcatccatctttatcttccgcagggtgaagtgcggggatatttttacgtcttcttcccacggggcggtgtgcagctgcttgaacagcgggttattgctatatcctagtgcatcgacttcttcccaggcaaggggatagagctcgataccggtataatgtacgggacgcgcatcctgttcggcagcttccagtgtgagcaaggcattcagtccggtgccgaagcctatctcaagaacgtgcggttgcggtgcggcagaggctttcagccccatgttgataaagatatgctgcgactctgtacgcgcccctttcaccgaatgataatgttcatccagttcgggcacaaacagtgttgcgcttccatcttccgtacgttctataattcgtttcataacttaaaacatagatattactccctgtaatgccagcagcatcacggcataccgtatcagctttccggcaaacatggacgaagtagtcagccatacattgctacgcatgaaacccagcgcaatggcaattacttcgcccacgaagggcaggaatgcgaaaaagcccatcaatgctcctttaccttgaaggaacgtctgcatcttgtctactttttctttttttactttgaaatatttctctatccagactacgttgcccagacgccccatgtagtagcacgtcataccgccaatcgtattacccaacgtggcgaagagtacacacatcaccggactgagccctacctttatcagtgctatcatcaccagttccgaactgaacggaacgatgcttcctgccagtaaggcggagataaataaaccgagatagccccagtctatcaggagttgaaccaatgagtctacaaaagcatccatacgttaaatccgaataagagtataagcccggcaagggcacaaatgaaaaacacattagaagcccgactgttcgtcagtaccacgaaatgtcctgtcaggatgctgacgcctatcagcagcaagggcaggaggtgaaacgtttgtgccggttgcaacaggatatagacgaagatgcagaacgtcaggaaaataaggaaatgcagataactgcgggtacgtatcttatcttcgtaacctgccaccaggcagtgaacggagcttactatgaacaacaggaacaaatagcccaatgtagcgatttcccatactgggaagttccataaagtaatgggatggaacgtcaccagttcgatgaatggctgatagaataattctatttcaccatagaagtaggcatgtccaaacaggaaccaataggggagcgtccagccgatcagacctccgaaaaagctcttaggagtgagtgcctggaaactgtatgcaccgatccagaaaatgggaatgaacaatgtcagttgcgggaagaacagactgcccgccccgataaacaggaacgagtagaataggatgcccgccggatgtggatgttgatagcccttgaacaggaagaacaaagatatcagaaatgctgtcgaggcaatgtctccagcatataattggtgcatggcaggacagacagatatcagcagaaagtaaatggctgtctgcacggatgcccgcatacggataatggcgaaggtgttgttcagctctatcaggaagtaaccgattataccgtaaagcagaaagcttaggggcgcacttgcccatgtcggaatccaatcgttgtagatggtttcccacaatgggtaattgcttttcatcactggaatctcgggtaataagatggaagtcagtatccagcagaacagtgatagaaagacagcagcggggagggtgaagcgccccgctgtaatccggttctgtaatcgtttacttcgtatcattataataaaggtgatggggtgattagagatcgaacccgatgtcgcggcggaaatacttcttgtcgaagtggatcatatccgctactttataacttttggcaagggcttcctccttggtttcaccatacgaacatacggcaatcacgcgtccgccgttcgttaccacttgtccgtctttcattgcggttccggcatggaagaggatactgtccgtggctgcttcaaacccggtcatcactttgcccttttcgtaagcttcggggtatccaccgctgacaagcatgacacaggcggctgtccgtgggtccatcaccaatgtcttggtgtcgaggttgacatcgcgtacaccttccagaagttctacaaagtcgctttgtatacgcaacatgacgctttctgtttccggatcgcccatacggacgttgtattctatcaccattggttcacctttcacacggatcaggccgaggaagatgaagcctttgtaaaggatgttttcttcctgcaatccgcggatggtaggttcgatgatgcgggtacgtaccttttccatgaatacctcgtcggcaaaggggacaggagttacacttcccatgccaccggtattcaggcctttatcgccttcaccgatgcgtttgtaatctttggcaacaggcaaaaccttatagttcttactgtctgtcagcacaaatacggagcactctataccgctgaggaattcttcgataacaactgtggcgctggcctggccaaacataccgccgagcatttcttccagttcccgcttggcttcttccagtgtagggagaatgagcacaccttttccggcgcatagaccgtcggctttcagcacgtagggagcttcgagggtttcaaggaaagcaaggccttcgtccagattagcagcagtgatgcttttgtaacgggcggtgggaataccgtgacgttccatgaagcctttggcgaactctttgctgccttccagttgcgcacctttagctgtagggccgatgatggcaatatgttgggtggaggcatctccggtaaagctgtcgtagataccttctaccagcggatcttcgggacctaccacgatcatgtctatcttttgttctaaagcgaaggctttcaaggcagggaaatcggttgccttgatggatacgttctcacctaccgcactggtgccggcattaccgggggcgataaaaagtttctctactttcgggctttgggctattttccatgccagggcatgctcgcggccaccacttcctaataataatactttcatctttatatttcttttaattgtaatcacttatttcctaaatactcttcaaaataatgggttatcttttcatgcagatgtacccggtcacgtcccctgacattgtgcttatgtgtgggatagataaacaggtccggatatgtgcgtgcatccacacaagcctttatgaacgaaagtgtatgttgaggtacacaagtatcgtcatgatcatcatggatcaatagcagatgtcctttcagattgccggcaaggtttttcaggttgcactctttgtacccttccggattactctgtggggtatccatatagcgttctccgtacatgatttcataatatccccagtcgatgaccggaccacctgcaacgcctaccttgaatatctcgggatagcggagcagcaatgccgtagtcatgtgaccaccgaaactccagccgtgcacaccgatgcggttgccatctacataaggcagacttttcaggaattccacacctttcacctggtcttttccttcttcaatgccaagatgtcggaaagtagcattttcaaattccagtccgcggttgtcacttccacggttgtcgaggctgaacatgatataacctttgttggccatgtagatatcccagccacgtgcaccgttctgccaaccgccggtgaccatttgggcgtgcggtccaccgtatacatagacaatggtggggtatttcttattcggatcaaagtccgcaggttttatgagacgatagtaaagatcagtcataccgtcggcagctttgatggtgcctacttcgatgctcggcatggtgaagtccttgaatggatcttctgctgtcagcagattgatgcttttcccgttttgtgtggcgataaggttgatgctgcgtggcacttcagggctggaataggtatctatgaggtaactgccgcttgcactcagtgtaccgtggtgtataccttccggtgtgcctagcgggctacgtttgcctgttgctatgcttactttgaagaggttgctttgcaacggggaatattccgtggaagctatgatgatttctttctttccactgttgaagccaagcacatcttgcacaagccagttgccggaagtcagttgcttgaccagcttaccgtctgtgccgtaaaggtacaggtggttgaagccgtcgcgttggctttggtagataaacttgctgttgtcccacggcaggaatacgatggggtgctggggttctacgtatttgggatgtgtctcttcaaaaagagttcctatcagttcgcctgtttctacgctgtactggcatagcttggcatggttctgatcacggttcagttctatgagataaaggcttttggcatccggtgcccaacttatattggtgaagtaacggtcggtaggatcacctgcattcagataaattgtcttctgcgtttcgggattgtagatgcctacagttactttgtggctcgtcatacctgccatcgggtaacgtacattgttcaattcgcccacccgtgcggtgatgtccactaacggatattgtgttaccatgctttcatccatgcgatagaaggcgagcaagtcacctttcggactccagtaagttcctttgctgatgccgaactcgttacggtatacgctttgtccgcatacgatcccttccggttcgttggttacggcgcgatcgttgacataaagattattattcagagtgtaagcaatatggccgcttacggtattataatcctcattggctgccttttctggcaaggcttgtttgctgatgattttatccgctttccagtcgtaaacgatataattaccgggcagggtgataagcaactgagtcttttcagcccaaggcaggctcacctgatataaatgactcagtttacccagtttttcctgttccagtgcttggttgattctctcacgcgtcaggagtagggtttcctttcctgttttagggttcactgcaaacaaagagtctatttcgggcttgatgcatgtgtctccccaccattgcagttcgtacaggctttttgcaaagcgataggtttctccgccggggatcaggtcttccagcgtcggtttctttaaatcttgtgccataacgttcgttgtgaagagagcggatgatgccaataatatcactcccatccatttactgattatcttcatgttcatagtcttttgttagtcattctcttttctaaaacctttcacttctattctgcccattggtgtacttttcacttgtacggcggcactcagcttggcaaaggcagagtatctaacacctcctttgtttgaggtgacaatttggcacctcaaactgtctttcagcaacttactctccctcttcccgctttcttggtttaaactcccttttcggcttgaactccccgtttcctcccggacgacgttctctgtcaaacggttttctttccctgtctccatccttgcggaattcccttggcttgaattcccctctgggcctgtcttctctcgaaccaaactcccggggtttactgtctcttggtctgaattcccttggcttgtcatctctggatctgaattctcctggtttgcggggttctctcggtctgaattcacgtgattctcttggtctgaactcccgtccttctttcggtttgaagcctgattctttagagtcttctccctcttcactttcgccttcctgtttcttgaattccttgtatttaccgtcgaaaatctcgtatttacggaattcacattccagtgcaccgttgaacagaggtattttggcagtcggtttcagtcctatctggtcgaagcactcttcacgataagagagcacccatgccgtgtttccggtgaaagcgtgtttcagacgctcgcctatcatctggtacagtcccagcagattattggtagaaatacgttccccataaggcggattggtgataatcatggacttttccgccggctgttcaaactgctggaagggctgcaacttcaaggtaatgtctttcgatacacctgctgccttgatgttgtgcgttgctatttcgttggcctgcggattattgtcgtatccgtatatcttatgtgtaaactcacattcctgactgtcgtcgttgtaaatcgtatcgaataaatcctggtcgaaatcattccacttctcaaaagcaaattccttacggaatactcccggagcaatgtttcgtgcaatcagtgctgcctcaatggggatggtacccgaaccacacatcggatcaatcaaatcacattcgcctttccagcccgtcatgaggatcattccggcagccagtacttcgttcaacggagcctctaccgcttcctggcgataaccgcggcggtgtagtgactcacccgatgagtcgagcgaaagcgtacacgtggtttgtgcaatgtgtatattcagcagtacatccgggcggttgattcgtacggacggacgtttgttgaatttctcgcggaaataatctacaatggcatcttttactttataagatacaaacttagagtgacggaattcttcgctgaacacaacggcatctacagcaaatgttttctccacatccaagatgttttcccaactgatagctttgatttgttcatagacttcatcagcatctttggcagtgaagttcttgatcggtttcagaatacggattgctgtgcgcaagcagaagtttgccttgtacatcatttccttgtctccactgaaagacaccatgcgtcggcctatttctatgtcgtttgcccctaatgcagtcagttcttgtgctaatacttcttccagaccttgaaaggtcttggcaatcatttgaaaggattccatctgtttattattgattttacgatttgcaattttacggttgaagctgctgtaacttcttctgtatctattgtttctattgatgattactattctcttaatatcccttttacggaacacttgtacttctcggatgtaacgcttgtgtctctcttccgaaacacttgtgttgctcagccggaacgcttgtgtccctcaaccggggcgcttgcttgctgactgccggttactttttggctttagtctgtacaattcttgctccggccggaacgtcttccgtcacccagatattaccacctaccgtggccccctgtccgatagtgatacgtcctaaaatggtggcattggaatagacgattacattgtcttccagtatcgggtggcgtgggatacccttgatcggtttaccgtccgcatccaatggaaagctcttggcacccagagttacgccttgatacaacttcacgttatttccgatgacgcacgtctctccgattaccacacccgttccgtggtctatggtgaagtggctgccgatggcggcacccgggtgaatatcgattcctgtttcgctgtgagccatttcagtgatgatacgcggaataaggggcacaccgagtttcagtaactcatgcgcaatgcggtaattgctgatggcacgtatggcgggataacaactgattacttctccgaaactgtgtgctgccggatctccattgtaggcggctgccacatcagtggccagcacacgacgcattcccggcaaattactgatgaatttagcggcaatcagtgccgcttcttcacgctgaagttcagtgcaacaggtacattctccgtttccggtgaagcaaagccctgcaagtacctgaccggtcagcaagtcgaacaagcgttcgatgtttacgccgatgtgatatttgatggtgcggctgttgactgtggaattaccaaaataaccggggaagaggatggcacgtgatagctctacaatatcttgcagtgccctagccgaaggcaatggagtgccgtccgtgtgctgatgaaacagtcctttgtaagatgagctttccgatagttcatcgactgcctgtgtcaaaatgtgagtaaagttcaatggactcattgggatatcctttttataataaggtgggtacaaaggtaactattctcagcgaaaatccctcatttatagtatgaaaatcccacaaatatggtatttcctatgaaccgttaaccctctatctttgtcatttagaaagaagagtataaattaaaacccaatatgttatgaaaaagatagcaaaacagctcacggatctggtgggcaacactcccctgatggagctgagtaattacaataaatcaaaggggctgaaagcccgtctgatcgtgaaactggagtcatttaatcctgccggaagcgtgaaagatcgcgtggcactggcaatgattgaagatgccgagacttccggtttgctgaaacccggagcgacaatcatagaacctaccagtggaaacaccggaataggacttgcatttgtggccgcttcaaaaggttataagttgattctcaccatgcccgataccatgagcgttgagcgtcgcaacttactgaaagccttgggtgccgaattggtgcttacgcccggtgccaatggtatgaaaggggctattgcccgtgctgaagaactgaaagcggctacacccggtgcggtgattcttcagcagtttgacaaccccgcaaatcctgccatgcacgaacgtactacaggacaggagatctggcgggatacggaaggtcatgttgatatttttgttgctggtgtagggactggcggaacagtaagtggagtaggcgccgccttgaaaaaacataatccggctgtaaaggtggtagcggtagaaccgaccgactctcctgtactttcaggaggtgctccgggagcacataagatacaaggtatcggtgccggttttgttcccaagaactacaatccggcagtagtggatgaaatattgcaggtaacaaatgacgatgctatccgtacaggacgcgagttggcgcagaaagaaggcctgctggtaggtatatcttccggggcggcagtcagtgcagccactcgtctggcacttcttccggagaatgaggggaaaactattgttgcattattgccggatacaggcgaacggtatctttcaacgttgctatatgcatttgatgaatacccgctgtagaatattagggctacaccctttcaccaaaagggtgtagctatttgcagtaaagggtgtagctatccgggggaaagggtgtagccatcttgaaatgggtttgtaactactctgaggtgacctcgctgggtcgcagtccgaaggatctgcaagtcattttgtctatttttacttcccaaacctttacgttgcgcacggcaggttcactgtatttaaattcatcgcttgtatattgctgcatgattatatcaagtgcctctcttttttcatccatatcttcgatgaaacggacgtttccgtggcatatcacgctgcgcgacttcatgctgtaactgcatgccacttgccggtgcatatacaccaactcgtgtccttcgcagaaggtgatgcagacacgaggatgtttttctgccatcgttactttgctgccttcgggaccggagtgcagatagataattccgtccctgtaagcaaagttcatggggactacgtaagggttgccttccagatcggtgatgcccaccgtgcagtaaggacatttgcgaatgattgcttcaatttctgtcagttcggtgattgcaattgtcttcatagggctgaatgggtgttttattcggtgcaaaggtaatcattttattgacaaaccccagtcgtctgttgaagaagcgtgcgaaaagtcctacgatcaatgcggcaatgattgtaccttcgcgtacaccttctatgcttcctgctatcatcagagaggctgcacaggcaaggagtgccagtgtagtatcaaagccgatcttggtaattccgaattcttttcccgtacgcaaagtgatggctttcacaaaggcttctccggatagcatcactacattggcaattacctccatacttactcccaggccaagtatcgcacagccagctatcagtgatagaatctgcgaggcatagcctgcaggagtgaatcctcccaataatgccatcgagcaatctatgaagaaactgaagagtattgctacgggaatttgtagaaactgctcttttctgaagtcccttttcagaagccatatttgtccggctatcagcgcggcattcagcagaagcgtgaactgtcccagtgtgacgggaaaatttaaactcagtgtgtaaggaaggctcgatataggtgaggagcccagatttgctttaataattaaactaataccaaacgcatttacaaataagcccgcaatgaaaaacagataccgggctgttaattctctttttgccatattacaatctttttttcttgagttcatcactgtatggttatgaattaatttaccacagattacacagattgacacagattctattttactgattattagattgataaatctgtgtgaatcagtgtaatctgtggtgagtcttattcattcctataccgtatatatccaatctttgatgagcaaataaccaaaattattaaccgctgcaaagttacggcttctattgcctgtctcacggttcaaaaatcgaagcgaattgttcaaaaagtgggattattttgttcataagctcctttaaaactatatttgtacttcaaaaatagaactttatgagtgaggaatacctgtttcatacccggaagaaatccgatttgttttcttatccttatcggatggagagaggggaattgctgttttgtctgcaaggaggagtacagctttacattaaccagcagaagtatgctttagctgccggaagtgtaatacttgttttccccgaacagattacgttttataaagatgctacagatgaccttgaactggctgtttttgctttttccgcccagttccgacatgagattttctattcgctgccttcggataaggtatccttcatgcgtgagcataattatagttcattccgagacgaagagtgggatgggatatgcaatcattatcttaaacttctgcaacagaaatctgtggacagtgataatatatatcaacgtgagctggtgatttactgttgtcggatgctgttttatgagatctgtaatcagtcggagcgtctttaccggcaaacgaagccgaatcatttgcgttggcggttgaaggaccgctttattgcgttagtgatagagtcgttcagggaacagcgttcggtggattattatgcggataagctttgtgtcactacgcggcatctgagtaagacgattcaacaaacggtgggatgcacagcgaaagaatggatagacgattacgtgatacttgagcttaaagtgacacttcactctacagcactttccatacaggagatagctaatcagtttaatttccctgatcaatcctatctggggagatacttcaagcatcatacaggaatgtcgcccacggcttacagggagaattatggtgcataggagaacgaaaatttaggcacgtattacgcggattacacggatttcttttattaatcaacaacccttgatccgtgtattccgcgtaatccgcgccttttattctaccagcgcaaagtccaactgtttcttttccagattggcccgtgctaccttaattgtaattgcatcgcccaaactgtaggtacggtgcttacggcgcccgcgcagacagtagttcttctcgtcaaactcgtaatagtcatcgccaagatcgcggataggtatcatgccttcgcatttattttcgttcagttcaacgtacagtccccattccgtaacaccggaaattacaccatcgaacacttgtcccagacgctccgtcataaattctacttgcttgtatttgatggaagcacgttcagcgttggctgcaatttgttccatattgctggagtggtcgcagaggtcttcatatttagtttcggaaacactgcgcccgccattcaggtatttagtaagcaagcggtgtaccatcatgtccgggaaacgacggatgggtgaggtgaaatgtgtatagtattcgaatgccaatccataatgtccaatgttgtgcgtggaataacgtgctttctgcatggcacggatggatacggtttcaataagattctcttccttcttgccctgaatatcgtccaacagatgattgatggatttggaaacatctgtcttggtcccaccggtacgtatcttgtagccgaagcgggcgatgaattgtgccaggttatccagtttctccgggtctggaaggtcgtggatacggtaagggaataccttggccttcttgtttttcggtacgcgaccgattttttctgctacggtgcggttggcaagcaacatgaattcttccaccaacttgttggcatctttggaaattttgaagtagacgctgataggtttccctttttcgtctatctcaaatttcacttcataacggtcgaagttgatggctccggctacgaaacgcttttgacgcagtgccttggcaatggtatccagcataaggatttcttctttgaagtctccttctttcgtttcaattatttgctgtgcttcctcgtaagtaaagcggcggtcggacttgattactgtatgtactacgcgtgagtctttcacatctcccttttcgttgatgttgaagataacggagtacgccagcttttcttcgtcgggacgcagggagcagatgaagttgcaaagacgttcgggaagcatcgggatggtacggtctacaagatacacggatgtagcgcgtttttcggcttccttgtcgatgatgctgccttcggttacgtaatgggtaacgtctgcgatgtgtacacctacttcccacaagccatctttcagtttgcggatggagagagcatcatcaaagtctttggcatccttcggatcgatggtgaaggtagtcacatttcggaagtcctcgcgtttggcaatttcttcatcggatatttcagcggggattttgtccgcagctttttctacagaagaggggtagacataaggtagtccgaattcggcaaggatggcgtgcatctctgtggtgttgtcacccgctttgcccaggatgtcgataacttgcccgatggggtttttcgccttgtcgggccattctattactttcacgatggctttgtctcccgtctttccgcctttcagcttttctttggggatgaagatgtcattggcaagcgtacggttttccgtcaccaggaaggcgtaggaactgcctacttccagtgtgcctacaaaggtgtcgttggcacgttccaatacttctatcacttctccttcggcttcgcagccacggcgtttggcgtagaaggaaatgcgtactttatcattgttcatggcgtgtgccgaattacgctcagccacgaatatcgggtcacctccaccttcgggaatgaaggaattctttccattgcttttacgctggaaagtgcctgtcatttccactccatgattgttcagtttatatttgcttttctccacttcggtgatgtaatcatccagtagcatatcgcttaggatatccttacacagcatcttcagaggatgcgtggtaaggtggagttgttcgaatat

SEQ ID NO: 6317 - DNA, 26863 bp, Unknown
  gut microbiota DNA sequence
aactatatatactttatttatagtgttttgtataccaaaaatcagtaaattaagtcatattgtaatagtacttgtatttcttgaaaagagctattccaaaatatattacttttatttcaaggggaatcgtttcaacccaaacgagataaaaaatccgtcttattagatggtgaaaatcatctagtaagacggattttttatctcgtgaacttatatttcacttcataagacattatgcaactcccttatcagtttttacagaagcataaattttctatgtttgacaccttgtttagattgtaaagataagatataaattccaggcggacaatcactacatgagaatgtaatttgctgttgtgaccccacatcaaatcgcttctgtaatacaccagttgtgctatagacgctaatttgatcaaattcttccatatctatcaccgttatattgcgattagcatcagtttctatatagaaggaagattcgtttggctctacttcttccactcccgtacctgtatcttctttaacgattatttcataagaagcatattcaactttactctgcgaacgatttccaaaacgccctcctactaacatccattctgaattccctttgctcttcgcataagtacggatacggtctcctggttcgatatcgctcttctcaatagtcaagtcaattacggcggcaacagcattagccgtggttgtttggtagttattcaaaaccatatcttgatttaacagtacttctttactatttccttctttgtcttccagacgtatttcaatcgtaccatcgaattttgtagccatgtaattcgtcattacaccaaactgcacactaaaaggctttcctttctggatattagtctctgtagttgtcaatcctttataattaacaccatcatatttgtctataacaaacaatagaatgtctttacatttaggagccgttccagctttttccatacctaccactgcgctttgcatcattgagtaaggctcatcaatggtacttccaccagttccctgcgtatccggttttaaattggttaacaaaaagaatgcattggccaaaccaccccatccccagttcacatgaaaatagtcaccctcatatccgtccaccacaaactgatgcccggcattgctgggcgttactcctccatacagaataggacgttcgtcattcagttcatcccgtaatactttattccatgtcggcatatcataccactcacgataaatctcttgcatacccttattatatttcatatgtttcatgagattctcaatcaatgtggcggtaacagccccgctggaataagcaccataggacatttcagccaacactccacagtgccacattaaagtggctacagccgatgcttcttcagttgtataatctccattgtaatcattcaacattttatcccactgatatggcgtttcaaaattagctttccgattcgtgaatccatctttataggaatgttctccttctccactatcgggccattgatgatatttcataatgatggctgcagctgtcgctacacaaccagtcatggcctttgaaccactgatggaaggacatttattgttgaaaggtttggcttgattccacaaggcagtctccaacaatcgtttttcctcagctgtttggcgtttggcaagaacagttatgttatcccaggtatcaaggatctcgacctcagatgtggcattgagttcacgagctttgttcaactctatccggtaatgcttcatccataaatccaagttaacagggcgttcttcgacaggaaaatttccattacggctatatgctatgacagggctggaaatatcatcaccggctactatcacgaagcctccttcttgtctgttaaatacataaaaagcagggttatagacgttctgggtctgtccatcttccccatcccacactaatcgccattgggacggaacgcttcgggttgcaggttccagtgctgcaaaaaactgctgtgcaacggcttgtgcgcgttccacactaacactatcagccaataaggaagaagcaacaagacataataaaaatagaaaatataatcgtttcataaattgtcttatttagaggttattcatattcaaaagcaacagaagcgtctaccggacaatcaatggcattatcggctataggattgcggtattcatcagttttacggcttacaatcacgagtacatggcatttctgtatattcgccacgtttctaaggctgaattcatgatggaattccacttctgtacctgcttctgtcgtctctttatctcccaataaaacaccggcagctgctgaagtcgcgcttgcagaacgaagtgcattattgtgcgtactgagatccatgctcacactcgtttgattggcttgagaggctttgataccatcttccaacaaccatgcggcaatgtgataactaccgctctctcccacttttaccttggcagaaaggttaatagagctttcattcttgcttacgcttgcggaaataccgcaacgagcctcttcccgcaagaagccttccatgcctgcaaccatttgcgtatagaatgctgaagcattaaggctcgttaatagattcttggagtttaagttaagaacaatggatggatatgaactgattgacattctgcgagctaaaacaaatgcgtcatcattactcatcggatcatcgctactatagctgtggatagcggcaaacaacattttgcccgcatgttcactttctttaaacttgcttatggcagatatggcgttaggacaataaccgcagcctgttccggtaaattgtgtggccacgacacgatgtttaaacccgttgaatttttccggttgggcatcttccggcagaggagggaaatctcctgcggttgcagatatctttattttatctgttgtcatgcctttataggtagcaaaaaaagtataactgcctacctcggtcgttctaaattcagcagattccatacgttcaacacctgaggatgtttccttataaatccgggcatcggcagtcacatcttgtttatcggagtacactttaaatgtaatcactgccttgccatccgatttaaagaaagcgcctgaaggtacaagtacaaagccgtcagggatttccggaagcgtaggtccctctaaatcttctccggggtttcctacacatgcagtcattattaaaacaagaaataagtaaaaatattttaaacatttcatatttatattcatttgtaatagttagaaggatgttgttaatgtaatgcctgcccctgtatatgccggtgtatagcggcacacaccacccgagcaaacatagccggctcgattacgtccatagttcacctgaatgcgggtacgttcgaaggtataactgacgctgccgttataatagtgtatttctgtctttccatgattgtacatatcactgacagagacactccaatgcggagcaaagttaacttctatcaaagctgccatccaatctttttcataatcttcagaatagagatactgcaattctccgcgaatggaagttttccggtcaaacttataagtcatatcataaacgaaaatgttggaagcataggtcttttcagtactgccatgagtcgggctccattcctgtaccgaaaccagtaaggatgttttcagcttcttattccattgatgctcaatatcaccattgacatctctccatagcaagcggctctttccggtttgcttcttgtccgaatagtaagttgaataattggcatgaaaattccaatacttgctacgctgccctttagggcggatagaataataggcatctatttgtccacccgcttctccattgacgttgacttgataagggttaaggttggcgagcatgtaagtgtattggcgtgttaaagcaggaaggtaatttaggacattgccggtaccttgtccttccagcgtcaacatggtgttcatgtgctttaatacgcggaaagttcctaaagcggagaactgcttataattgtaaccgacttctcccaaccaggcataaccgatgcgcatatcctccatcgtagcttcactgagatccttactcttatttacatattccacacgggcgctcactccgttccaatcgaaattggcgcgtgccgaatacatattcagattgggagtggtaactatcggcttcaatgcttcggctactgactcatgtcggtttacataacttccttccagactaaaatccgctgactctattttagccaatttcgtaagcgacaagcttaaatccgctcctcctacccaagaatcggcatgatgcatatacaggcgagggcgcccgtacattccacgaactttcacatagtctttcaggtttacgcgaacctgcccgccttccagcgagttgttgaatcccagttgccgatcttcatagctacggaaaataagtccgctgccaaactggtcaaagatgtcacccgcgcgaacaccgtaatatttatcttgccaactgatatatttattgccaagtataaaactgtgtttatcatcatacccccccatatcgtatccctgcaaagtaggaaagtagccttccagttggaatccggcagagaatttctgatttgtataatctattttcagatagttgttgctaccaaagtgcgtgtcagtaacagaattgggcaaatccttatcatctacatagataatactattcgattcaagactgccggaaagttgtccgtacttgcctaaatcaacctgggcatgagagcatacactgcaacctgtcagccctaaaataaagagaaacttcttcatttcttctgtagttcttttagttttttcaatagttccagttcactgccgggagtatagcctgaatgtgcataaaccacatttccctctgcatcgataatgaaagtttgtggagtaagagatacgttcatagcccgtttcaaatcttgattcttgtcgaaaatgcaagtgaattcccatccgtaaccttgcgccatggaacgggcgcgtgaagtaaaacggctgtcatcaatagaggcggcaacgatgtcaaaatccacttcctcacgccattcctctaaaacttcattcaaggtgttcagttccgtaatgcagggcttgcaggtaactccccaaaaagaaaggataaagggcttgccggtgatcaaagattgagtagagacagcttcgcctttggcattctccacatttaccacaggcaaggtttgcgccgtaattccggctacgtagagtgacaggatacacaataaacaaaatatttttttcatttgtcgcttaattaatgtaatataaaagaataagactctgcatactgttccgatatcgagaaacagtagcagagtcttatatttaaaaatcaatctatcatttagtcagctttatcaaacatcatttcttggtttgctttttcatccattcattcagaggaatataggtagcttctatgtgcttacgcttgatgctgaaacctggcagataggtagtcttgtaatgattaccttttctattaccaacgctctttcctgtacgcgttacagcagctttgagagctttttctgttgcaccagtccaccctctcttcatgacgatcggtgtgtcatttgagaatatgctataagctgttgcaccataaaattgcgccaatgccggattaaaaatagtttcaccgtccgttccggttattgaaccgatttctaaagtattaccatcttctgatatatttaacggaaaatcggcgaaaccacattgggagccacctaccggtttggcagccagataataagccgcatccgaccagtccattacaggaggaataaacatagtattagtcggaacgactacattgtcattggttacttcaataaacatcttcggtccataatcatagaacaagtcagatacaccataagaattatatccattaagagtacagaacaatgcccatggagacatataagtgctccgttcatccagcacatcgaaacctgttatcactatacggttctgtccacgatatttgctaacatatttagcctccatttccttataatcttcaaaagattctttcagtcttgcctctccggtcacttctggtgtagccgaacctgattctctctccaactcaataaaataagctaataatcctgcgtaattttcattatttttgaacgcagcgtaattagatggactatcacagaacggattggtggttacagtcatcttaatatctttcggttgattatccactgttaagcgggctgtataatcacttggcaaagtattgaataaatcagattcaatgcgtgttttatccggttcttctggtgtccgattgcgcccttcacttattccgtaagcctcatcttcgttatatgcggcaactttcagtatagattcagtaccttcccatgaactgaaagacatattagcacctgcatcactattgatactctttaaagtttcttcatccaaaggttgtccataatatttaaacagatcatctatactggtttctccattcaaggtagacgtccattcggcgacactatttaacagatacttcatagcaacgcaatcatggtttacagccttgacgttgaaccatacattataaggagcgccggcttcaaagccttcgggagcctcaatgggggtaatctctattacaggcagtggtttggtagattcaatcgtgctaacctccatctctgtataggtctgaacagcaccttcttcatcacaaatacctgtaataaacagatgatattttgctttcttttccaagccaggtatagaaaaagaagacgcttccgtttcttgagctattaccggaactatcccagtcaaaatagctgcttgcaatccatctttgccaacccatctcttcactgtttcgtattcagtttcatcaagcattgacaccaaatattctttaacatcaccggtcggagtacaatcgaaggctaaagtatgctctgtttgagtcgctatcttcactttcacttctccattacctttctgaggagcctcactgcgcacttcttgtcgtgcgaaaaaaccatgaaatgttaccccttgatctataggcttatccatacaatctcctaccaatcccggtagagatgaggttcttgtatcaatagcagaccccaagataggaccatcatcaccaccgccgccttctgattcaaaattcatgttgccatctttatcgcattctgcaattaaaatataataagcggtacccggatatatttgataggttccctcgtctggagcatcggcgtatatgggaactttttcccattcaatggtttgcggacctttggctatgggagcaccatattccaagtaagtcatatccatcccggtatattcaaattgcatgttacgagattcatacgtaagcttgtccgctacagcatatttaaaatatttgtcggctggacattctacatggaatttaagcccaaacatggttgtactgagcacagtcaatagcttatcatagtttgcggtagttacagacgctgactttacaatatattctaccgttttatcagttttctcatgtttcagagaaacaagtactgtatacttcttgttaccttccaaaccgagaatagacagtttctctgtttcactcttgcattctactacgttaccctcgccttttgccgccaagaataattcttcgccatcaggaagtgtgcttacatcgccttcttttacctgataagcatactcactgataccttttgtttgcaaaacaagaacggcagatgttgaggcggtctgtgtatcgtctacttctacgtttacggtataatccggttcacccggtccttcttttccattgtcgtcgtcatctgaacaactccataaggctgttcctgtgagtaaaaggctcatcaaaaacaggcatgaataaaaactttttctcatgttcgtctctttttaaattaataaattcatattattgtattttcgtgttcggaaagtttttaatatattttcgtcaaggctttgataaagaggacatgtctcacgacatatccccttaaaacactttatttaaaaacaaccgatagacgaattgtctaagggtacaactattttacttatcaaacggatctaaaatctcttctttctgcaatgtaatcacatttgccttttcagcattgtcagtcattgttatgacggaaggattctttatgtcatctactgttagtgtaaatgtcacaccatcatcaccgctgaatggataaatcatataactccaacccagtttttgatagaacaatattcccacatcatttccatttaatgcaaatttaattttaacctgatcatcacctatcgctgttaccttaaacaatagcatcccaggattatagcctttacatacccaatagaatattaattcatcagatgcattcggagtaaatgcagccatactcaaatggatttcattcggatctaaagcattttccttaacatagttccaatagaattgccccattgcccccatgttactaaaagaaaaataccagtcaccattcattaagaaataattcagcgggaatttaggagtcaaaattacgtctcctgatacaagttgtccatcttctcctacatcctgaaaatctaaagtctcaatacttttgccattcaactctaaaggttccatacactttaagcctgtagcagtcattatatatggaactgttatatccttatcctctccattctcctgatatgtgattgccagagtgcgatatgactgcacgactgatgccttgaaatttccatcagtataggtaaattgaggaattcgtgatatcttttgatccatttcgatgacaccattgaggtattcagtccaacttccatttaacggagtcatgataatcgtatttccagtcttttttccttgcaatactactttctcagcagttgcttccatgacagtaaattcataatctccttccatccctaatccgtctgaacctatttgtaatgcattgctaggatctgaaaacacgtggaaaatatcattataggtgtcgaatgttaatgtagaaccagcctgttctttcagtctatacgtacttgtggcctgggcggtagccactcctgtgatatcggccgacacagtcaccttaccatcctccttaaaaagaaccaatacattatagcctccataaatttgcccacttgccggataatactccattagccaaccattttgcgctccagttagtacagctttatccgccgccatccttttttctattctattcgctgcattctcaccgaaaatgtcttccacctccggtgtgcacgctaccataagaagagaaaatgcaacaaagaaaagataaatatattttttcatattctattctatttataatgttcctaaatccaaatccccaattttctgttcacgttcctgaacaattttatgtaatttatcaatgtcaattccccaagactctgccaaatattctttcaccatttcaaatttctgaagaataatgggagctccctcttctccagctgtctccaagatagcttgccattgttcatcagtataggtaacataaatcgcaatggtttcaacaaaatcttcctgagtttcagttgtagcatatttggatacaaaccccatcttcatggctacagcatcgctctcaagatttacccaacccggcccggtatatttaccggcggatatcgtattaaaatcagttgaataattctttgtctgatgcagaatgtgagcaaattcatgatgcatggttttgaaataccaataattcagtgattcaatatccggatttttagtatccaaatcgttaacattgaacaaggtaatttttaatccaccttctgctgttcctaacaccatagacccaccggatttctcgtactcaggagagcctataagatgcatgattttgggacaataggtggcaataaattctctacctaacaattcttcataagcatcaatccatagaaatttcaccaatttggctaaagctacagacttgtcataatctgctggtgtaacattgtacttcatatctgattctacatcatcaaacttatatttcagatcaatgttatagggcttggtgtaattctccaatatccatgtctcaaaagcattacgttcctgaggatccggattaaaaatgctattgggatccagatcatcttcactacaagaaactgcaaccatggctaacgccaacaatattaataatttaaactttttcatactctttctttttttagtttctaggattagcttccaaaccggcatcaatcacatcctgaggtaactggaatgcgcgtctgggatcatcttttgtcaatacatcaggggttaaaccgtctctgttatgagaaatttcaataccataacgtttaatatcaaaccaacgcagaccttcatgaatggtctctaccctgcggagatggagaatacaatgaatgaaattctcctgtttggcgtcaacgaaagcgattataggattcaattgcttctttactgtacgctctgccgcatttgtaatgacagtaggcatacactttatacttttatagaagttattgatgtcatcttctgtcacagtgggcgctttaccggcatagcaaacggagactaaccaatcattaatgtctgttactgcttttccgtattcaggttgtgccttcattatatatgcttcggcacgacaaagaatggtttcattcgctgtgaaaggtaccataatagcatggcgatgccctattccattcaccttgtccgaatattcaaaatacatacccaatttcgggaaaggcattttttcttgaggattccaaatcgtattagccgctaccagattctttgctgttccccaaatgccatcagcgcgaaggttctcattatcgcaaatttctttcgcctgtccataacgttgcgacaagttccaaggaccataagtataaggccatgagctataaataggagtaataagcaaattagccggtgatttggcagagataaaagcatcggctacattggttggagaagatagggtgccaaaatccgcatcataggtgcgcaacactttggtgggtgttgctcccaatacagcatttgcatattctatcactttttcatagttagatttatccgcttgcaaatagtacaaatagaatcgagcggcgaaggcatttgctgcctttttattaaaatgatatttaggtactgagtataagttatcatcaatcaaaggcaatccttcttgaatatccgccgctattttggaaaaggtttcttccaatgtacctcttatataatcaggagaaacttcagtctctggattgattgcataaggaatacctaactttttactcgcagtttcgtaattatacgcttcacaaaatgtatttgctaaaataaaatgaccgtacgcacggcaaattaaagcttctcctctttgcggtgccaggctggaaggatttcccatcgtttcgatagcctgcagtgcatggttagctgacgctatagcaagataacatgcatcccaaaggccttggggagcatcttcatctgtatcggttacaatatcttgccatagataagcatcttcctgtgactgaaattctaccgaaaataaaggtccattatccatggcattatcagatgccatttctgccatcataacgggaaaagcagcgggataagctgaaaccaacagagaggttattttcgcttcagtatttatctcggctctgttatccggcatcgtatccaaaaaatcgctacatgatgaaagaagcaagacagccattgttgctgaatatagtatatttatctttttcatatttctaagattttaaattattaaattcccattctcaatgtcagggtaaactgcttgggtaccggagctgcaacaccacctgtattgaagaattccggatcttgaccgttcagtttgtcgtcagagtaaatcaaaaatagattggtcgcttgtaactttaaagaaagatcattcaatttcaaatgactaatccacgtcttcggaaaatcataggatactgatatttctttcattcttataaaatctccttttgcaatgcgttctgttgaataattgtaggcattataagcgcgttttagatattgatcctgctgattcatgcgtctgtctgcaataacagggatactggttctgttttcatcacctgtaacagtccagcggttcttgaattctttaggcatagcatccaaatcagaatatttattgctgaagacaggatccaagcgtactacatttccaaaagaataagttatgaaggcattcagtttgaaacctttatagctaaacacattaccaaaacttcctgtaatagttgggtctgtaggtccttcataaaccaggtgatctttattgatgcgctcctgaaaattgatatcactcgtggtcaattctcccttttcgtttataaaggtaggtacaccattcttattcaaacctttgaaatccattgaatacaaagagcgtaccggatatccttctaatgcaaatccagctcctgaaatcatatcaattacacgtgaatgtgattccagctttgtaacggtatttttcgcgttagagaaaataaagtctgtattccacttgaagtctttagtcacgatgttacgggtagaaagggtaaactcaataccatgtgagcgcatgcttgctacattcgcatatttagcggtctgtcctccaactccttttgtattgataatacctattaaatcgtaattattgcgtttgtaccagtctactataagatttattctattgtctaagaagccaacatctattccaagattgaattcatgcttcttttcgtaagttagttcactattttccagatctacaatctgcaacccagattcgcccacactagcaaatggcctataaggattataagaccctatcactgcatgtgagtttgttacatcagccggtcctcgatcagccgtcaaggaataagatgctctcagcgttaggttggataaagtgggttttaaatcttcaaagaaagcttcttcgtgcatgttccatgctcctgaaagattccatgtcggcaaccagcgtgaagaacggctcttgcctaacttattggaaccctcatagcgaatagtaccatttaccgtatatctgcctttatatgaataagttccggttgcaaaaaatgctacttcacgggcacgggtttcttcgactgtatagtattgagtattttcttctttcccttgtttaaagaatagatagtcataagaaggtaacatacccatatcatattgcatgcccacaccattgaaccatgttttacttctgtctgtcgcagtcaattgcataccgccaaaaagattgattacatgatcttcggcaaatacgtcattgtaactaatactagcacggaaatcataactgttcattccatatttagtttcccgatagaaaccacccacgggcaatacagacagaggaagtgaattaataacatctgggtctgtatataaccaaggatttgcatctctcattgtagcatcatccattgctcgataggcccatgcttgattagaataatcggttatgctatgagattgagtcgtagcagagtgcttataagctcctaaagcagccaattcgactttcttaaatggtttccatttcaattctccctgaaattttaggtcgactaccgttaaatccatactgttattttcaagttcatgcaagatgttgaacggagcatagttgcgaacataatattcatcaggatcaagagcacgtgaggtatttaaggcataagaataaggattaatatcaaagtcacgtctaacctcaccactaactacatctatactagaacttagtgttcccggagctttctgcttacgataagaggtattaccgattaaattcagcgaaagttgtcgagagatattatataatgcattaatgttggctgtatagcgttgcacagaactttgttttgtccatcccggatcgaccattgcactaagtgaagtgtaataggatgctttgtctgtgccgctagacatgctgacagcatgattttgagatatactattattaaataagatatcgaaccaatcggtgtttcgatattccgcttgctgcaaatatccatccattgcttcacgcgtattgtctagagcaaatccaccattagagtagtcattaaccaaatggtacattttaccataaactccactatcagaggcgcgataaacatccgaaaagtttagataaccattattagccattgttttgtaaacgtccatttgttcttgggagttcattatattgaaattattatagctaggtttcaagcgcattgagaattcccccgtataactgatcttattactgccagctttacctttctttgtagttacaacgattacaccagccatagctcgtgcaccatatatagatgtggcagaaccatctttcagaatttgaaagctttcaatatcatcagcatttaatccggcaatagctgaactgatcaatgtaaccgcatcaccggaagatagattatctgctccaacttctgtaacatcttccataataacaccatctaccacccataacggttttgaactaccataaatagatgtagcaccacgtacacgaattttaggagctgtaccaaacgttcctgatacattctgcacagacacaccagcagctcgcccttctaatgaacggctgatttctgccataccgtccaactttacattatctgctgataattttgttgctgctcctgtaaaaaggcgcttatccatacgttgcatacctgtcactacgacttcttgaagtatctcactatcagtcttcatagtgacttttacatgaggcttaatgcttacctcttccgtcttcattccaatatacgaaatctgcaacgtattcgcagaactcggtactatatatataactgatattaagatgattatatttgtttgcagaactcaatgaaagaaaataaatatttaccaaaacattgattttaaggtgcataagaaatgctagtgcatatttgtatctaccggaattatccttgatttgtattttaaatatctaattataagattattatcattatataacaagcgaaaataaacaataaaaccggtactatgggttctcatcaatacataattgtataatatattttaaattgttaccaaaatcagaacgatatactttatatctaaaattgattcttttaaatgtcttgatttttattcaagaaaagcactatattcgatcggatgcaatgtgaatgcatacaactaaaaaataagaaaagaatatagagatcaaaaacgatagatccttgttattgactacattctcattatcgaaacttgttcgggaggtatactcaatagttgctcatgctgaatgaatgtaaaaagatcgctcgctccccagtgaacggtcttaaaaaaacttagctaaatataggtatacaatgatttatataaagaatcgcactcttgatttttgaaaaaataagataagccccactctttcatttggcataaaacaaatgaaagaatggagcttattaataggttaattcactaattccttatttagcagcctctaaggactctaaataagcatccccatttaagtacagatatgaaggattagcacaaggtgaggcagccccttcgctataatccgccatcttaatatacaaggagttggcagggaaggtaatacagccagccttttcatcataagtccccaatgggtatgtcgcaatatttgttgacagatttccatatacagaaccgatagagaacattccatatccccagtccatgcctaaatcaactggtgataatgccgctccctggttggtcacatcaatagtaaagaggtatttgcccggtaccacatcgctttcctcattaaaaggataaccatcgtagccaccatactcatctaccgtttctgtcgctacacgtgcaaacggactgtcaaagcggaaacgaacgctggtagccgtttctgcccgttccagttttacagccatcggcattgaaggatcaacgccgaagaaagtagatacagtaccgtctaaataataaccggtgccgattgattcccatttaatgatactgaaattaacagaaatttcattatatccactagtgtattcacttacattatcaccactcacggccagctttagattataaagaatccctgctgtcgctgatggagtctccacagtcaacgtcgtagttgcctctccggcagcaaatgatgctgtagaagggcatataaatatattctcttcgttattcaagacctttatatccacagaaccagctgcatcagttacagaacgttttagtgtaaggataaaagaagtaactccaggttcaacttctaccgtttgggtataattacctgcaaaacaaattccttggttgccctcctctaatcctcccggagtataactttccgcatccggatcgcaagccacagccatcaatgcaatagcaaacaggctaaatattttattgatatatttcatattctatcctttttataattaacttattcttcatcaggtatcggagttggagcagataccaacggattattttccaacaatggattgtattgtacctctttgttggggatactgtaaatttggaccggatcacctgcagcaatgttaaataccgcagtttttgggaatccgcatcccaaacgattaacacctttattcaggcgcatgatatcgaaataggctaaaccctcaccccagaattcgatacgtcgctgatgccaaacagcttcctgcacagcttcacctgttgtagctgtacatttataagacggatcacgataggtatttacaaatgaattgagagtgttcacaccaccgcttacatcattgttcatggcttgtgcttctgctttaattagatacatttcctctacacgcatcaaaatcacatcagttgcattgttatttgatccccattcgtcattcattgggccatatttcacttgtgtgtaaaccggagcaccttttttagtaatataagcctgtgctgctgccggcagatttacagatacgcctgtatcatccagaaaccatcctttacgtacatcactttcaggaatctggttgtagagttttggactgattctgcgccatcctcccacagaggcatagccataattcagtgaccccatgtgagatggaaaattacaaataccagtagtacttacacggtctttatccgtaattaagataccccacatccatgaagcatcttcaatatcaatgaaagttggtttgctcaccgctgcgctactatatggaaccgaagatgtactggcaagtgcagcttctgcatctttcaatgcatctgcataattgtgcatagtcaggtgaacacgagcacgtataccataagcaacatcaagactaacataacgcttgtcggaacgggttttcttagtgttagccaataactcaatagccttattcaagtcacccaaaatgaattcataggtttcttttaccgtagagcgggcacagccatttgcagctgcctcttctgcattctcgggagtgataatgggtacccctggagcatcttcatgtcctttatagttgaactgatataactgtaccaacgtaaagtaatcgaatgcacggatagccaatgcttgtgccaaataaaattgcagagtagggtcagacgtttcattatctacagtgccaataacagcgttggctgtataaatctggttgtaaagcgtaccccaaaattcgatggtagccgtactcgtacttaagcaatcgctataatcggctgaattagaataccaattgtagcctgttatatcagctacaaaatccgtagttcttgaatcagtagctaacataatagtaggataacctatatcactatgtacgttatcatcttcggtataaattttagcatattgtgtaaagttagctgtaatagcagttacactagcttcaattttagaagggtcagcagcaaccacatcctctttttggtcggctgtaatagtagaacttagtggggcagtatccaagtcagtacatccgactactaatgcaccgaatagagcaacttgcgttatcttatatattcttttcatattctttcttttttataaaattcaatcatttatcagaatgttactttcaggccaccagaaatggtacgtataggagtgtagcggtctgttgaggcagtcgtatagctcatacgtggatcaagtcctctgcgggcagagaaaagagccacattatcagctgcaccgtaaacacgcaagcttccaatacccaaatttctcaaccatcttttaggtagtgtgtaacctaatgtaatgttattgatagcgaaatagtcagaacttgttaaccaacgatctgaactagaattggtatatttatcaattgcatctatacgcggtatatcagaattcgtgttttcgggtgtccaggcattcagtatatctttgtgccagttataaccaaggtcatgtgagccaccaccatgcatcaacgcctgataaccactatcatatatcttgccacctaactgataagcacactggatagaaaaatcgaaaccgtaaaaatccaatgtagtaccgatacctccataaatagtgggaagaagatcaccgctggcctggcggtttgtgttataagcagccgaccagtcactggttttatattctgctccgtcagtatctttagcccaatactgcgcctcaccactttcatggtctacacctgcatatttcgtcaaatagaactgatataaagattcaccttcacgatagatataagatccattaatcatttcccctttcaggtcagggtgtaattcaagaatcttatttttcatcatagttccgttccaattgatgacccatttgaaattgttagtctgaatcggagtgtaattcaattcaatttcaatacctgagttacgtactgaaccgatgttcatcgggaactgtgtataaccgttggacatagctaccggcttgtaatacaacatatctttcgtctggcgattgaaatattcgatagtaccatcaacgcatcctttcaaaagagcaaagtccacaccaacattgaatgaattggatgtttcccaagtgatatctttgtttcctttatagaagagtacaccgtcagagaatactccttccgaaccgctcactgtaaattgatcttggtaaggataatagtttgtgtatcctttataaagaaggttatcgttaccttgttgtccgaaagaagctttcaatttcagcatattaatccagtcaatatgagaaatgaagttctctttagccatatcccatgcagcacttacactccaaaagttaccccagcgattatccggatggaaacgtgaagaagcatcacgacgataagaaacacttgcatagtacttttcatcgaaatcatagctggcacgtgtgatgataccgatagtagcatattcattgtagctgccggaaccatttttacggtcgatcacatttgaggcagtccagttcttatcactatacatattgtagcccagaatataatgagattcagtattataatccatactctcatatccggccaaaatatcaatgtgatgcacatcaaatgcttttttataagtcagtaaatattgttggtccagagaatacgtgcgtgatgaatactgttgcacagaaccgttttgggatgcagactggccataatacttgttacctacaatatgtaaacgtgtattatccacatgcaaacctaaagaagcagtcaaagacagaccatccagaatatctactttggcataccatttcccattcaggatatccattaaatattcttccgtatcatagagaaaactactcattgggttagacatactcataaagttacgagtgaagtttgtactttcaccatcaccataatcatatatccgataaccggtattagcgtcatgcataatctgaccttcagcattacgaacatacattggataaatgggggcaatgaagttacctacaaaaaaggcattacccgatgaagtggctgcatctgtgtcctgatctccaggatagcgactttttacatttgcatagcttaaatttacaccgaacttcagccatttcttagcttgataatctacgtttatacgactagaaatacgttcgaaaccagagttctcaataataccgtcatcggcaagataagcagcagagaaataataactcaatttgtcagtaccaccagatacgctcagattgtattcctgacgcatgttactttcaaacatttcatctgaccagttatccggtgtataatagtaatcaccatcactataacctaacgttgcatatggattcagtttgccatcccgacctatcaggttctgaccattgggcacattgtaaatctgatatcctaaacctggaatcaaatcggcattagcctgttgataggctctctcagctgtatatttactattatatacataaccattatatatggcagagtatgcagtttccatgtaagtagctgcgttttgcaatacatcgtagttcttcactaaacgcgaattagctccccaacgtgcatccaatgataccaatgtctctccggtttttccttttttagttgttaccaagataacaccattagcgccacgagcaccatacaaagctgccgctgctgcatctttcagtactgtcattgactcaatatcttgtgagttgacggcagaaatgtcaccttcgtacggaataccatctactacatacaacggattattactggcatacatggagccaataccgcgaatacgtactgtagctttttctcctggctgtccatttgtactttgtgtctgtacacctgatactgttccggaaagagcatttgatatatttgaaacctggcgtttctccagagtttcggactttatcacagaagctgaacctgtaaatgccgatttcttagccgtaccataagcgaccaccattacttcatcaagcatttcagagtcggacttcatgaaaacttttacagtcgactttatagccacctcctgcgtctgcatacctatgtaagagatttgcaatgttttcgcagaactcggtaggtcgtatattgttgacaatcaataacaaatatatatttatagaactcaaatcaagacaaatataatttattaaatatctagaaactagatatatacagaacatgaacatatatttgtatctacctaaaagttcctttattttattttcaaatgcttaattatcaactagttgctgtttgattgtgaatataaatgagtgacaaaaccaatactatgggttcaagtagagattaaaatgtatgaaatacttgaattttctacccaaaccagattggtaaattgcatgcatatcaataatttaccacgtagtcttgatttttcaataaaaaagtactatgtacagttgggcttaatacgaacaatttcattctcacaaacaacaaataacagtatcgataaaaacgataaatagaacatttactctaacttccaattagcctatattaaatcaatatttattctcttatataatagagaattacaggtttaattagagaaaataaatataagaaaacaccctaaaagtcatatataaaacttttagggtgcatttcagctaaaacaactttattttaagaagactttattcgtatcccggattctgctgcccttgaatattagggttaacatcaacttctgcttgtggaatagctaatattattctgtaatcatcccagttcggagatattaaatccgttgaatttaagtaatggtcagtaccctcacctggtgttttttcacggtttagggttaaacctagtcgcattgcatcgtagaagcgatgaccttccatgaccagttcctttcttctttctttcaaaataagctcttctgtcgcagtaacatctgttaactcgggaactgcacgttttcgaatctcattcaaatagaaatctgctttatcctgattgggagttgattttttcagtgcagcttcagcagctattaagtagatatctgataaacgaagtacgcgtacattattaaccggtaatttcccattatagcccgggtatttattgataaaccttatctctccattattatccgcttcaaaaagtcctgcacgtatatcatttggatattcagatattaaagtaacaaatgcttttgtagcaattaactcgccatatccatcaggacctgctacataaccaaataattcaaggttacctgaacgagtttcatcaatgtcaatatcaaaaactgattccgaattttctttttgtgcccaaatagaaagatactctgcattggaaaccaatgaataggggccatcctgtgctacttcatcagcatatttgaaagcattgtcccaatctcctttataaagataaacacgtgctaacaaagcttttgctgcccaacgattaatatgcccatagttcgtttcttcatttaaaagaccgatggccttctctaagtcttctataaccatcttataaccgtcagccacacttgcacgtgagggtagttcatcttctgagataacccgatccgccaaaggaaccccataagacgtaccattatctttcaaataaggtgtaccataagttagtaataaattgaaatggcaaagagcacggatagcaagtgcttcaccttccgaattatcacgttcaactgtttctggaatattatcaataacagccagcattgtattggcgctattgataattccataaggaatactccaaagaccttcaggagaattgttaatccggtgaataaaacgataataattctctgtgcgagaagcggtctgacctataggctgtatatcatcgccaccgacttcacctcgtaccaagaaattacatccataaaaactggtatttgtcagcgtataatacattccattcagcgctttgtccaagtctttttgctcgctcaaagcttcttctggggggagagcatcgtcgggatttaccttcaagaaatcatcacaggaggtaaatacaatgatcgacacaactgtagctaatattaaagatttgattttcatatttgtttcttttttaatgtcagttaattataatccgatttcgaaaccaaatgtaaaggtctttaatgccggaaatgcaaaggaggtgactccattgatagcttgttccggatctacattcttataagcggaccaagtcaataggttacttccggagaagaatacacgtacattattcattttggcagaacgaacccatctggatggtaaggtataggataaacttgaagttttcagacggagataattggaacttttcatatagcggtcgctggcataacgagcatagggattgccattaacacgacgaggaacatcagttttatcacccggtttctgccatctgttcaactggtcagctgagatattgtagtaaggagtttcaccatctgttcccaaataaagtaactcaatatcatccatgatatgtccgcccagtgaataagtaaataaagcatttaattccacacctttccatgaaagagtatttctccatccaccaataataaccggatctggttttcctataataacacgttgtgctttactcgggtccttggtcaattctttattaaggcttccatcattgttcttagtatttaaaacccattgctcttcaccggtttccggatcaacaccggcccattcgcgactccaccaagagtaataagactcaccttcacgaagaatactggtaccatcaataatatctttgcctccatataattttttcaccttattggaattatgtgataggttcaggccagtagtccatttcagaggagtatctttaaatacatccacatttacatccaactctacacctttattttgcatttcacccacatttttcagaattgaggaaaaacctgtaactaaagataccggttgactctgaagcaaatcttttgtgttgcgattataatagtcgaatgtaatacctactctatcgaaaagtcgtgcatcgaaaccgatattgaaattataattcttttcccatgataaatcgggatttgctaactgactagggaatgaaccaggattcttcatatagttataaccatatccgatgagctgcatgtgtccggtcagactattgggtaatgtaccattaacaccataagatgcacggattttcaagtcattgatataagcaagattctccataaatgcctctttgctgattctccaagcggcagacacagaccaaaagtcggcccaacgttgattttcgcccaaacgggaacttccatcacgtcgataattagcagaaacataatatttgctatcataatcataattaatacgagagaggaatgataacatacggtcatcgctatggccagaataagcggtttgaggatctgaagcattccccatttccggtaatttatctgttggataattttggtttacagcttgaaccatttgcgtatgacgcatatctatatcccatccaatcaaagcatctaggttatgcaaaccaccaaatgaatgattgtagtttaatacagtggaagaataaagattctggaactgatatggaatcttaatcatcaaaccgttcttacccgcatttgatccattttgggaattgcttggccaccacgtttctgaattattgagaatgaaatcatagctaacagtttctttcaaggttaagccctcaataaattgatattgtgcccataaggagttggcacttctgaatacatccgaagtattcctttccaatcccatattttcaagtggattcatcattcctaactgtgggaagggaaaatcattgtaataagaaccatcttcattataaatagggatattcggcatacatacccaatttaccaaaaagtagggattagcgtatgaacttccttcatctgccattcttgagaattgcttggagaatgtcacattagcaccgaattccaacttattatctgatgatttatggctaacattcaagcgaccggtaaagccttcgataccagtatgaatagccttaccctgctcatctttataagcaagggaagcataaaacttatttttctcatttcccccctgagcagagaactcataattctgactgaatccgtgatctctgaaaagtacatcttcccaattagaatatttatcgagtagaggagcataagaatcggccagttcttgcgcataagcttttgcattggcatcatcataaccgccataaataactgcttcgttatatccggcttcgtaaaccagttcatgtgcttgttccccattcactttcggatgattattcaccgcccagtctgaaaaaccaaaactagctttgaaatttacgcttgtttttccttcttttcctcttttggtcgtaatcaagataacaccattggcagcacgcgaaccatacaaagaggcagcagctgcatccttcaacaccgtgatggattcaatatcatcaggattaatcgatgccattacattataggctttactgtcaccactaacaccagatacagcgatatcacctgagatgacagggacaccatctataacataaagtggattatttgaagcattcatagaacctgtaccacgaacacgtatacttaagccagctcccggttggccactactttgatttacggttacacctggagcactaccttgcaatgcctgttcaaatgtagttacaggaatgtctttcaatgctttctctgcattcacgttacttgcagctccagtgaacgaagatttcttagctgtaccatacgcaactaccataacttcttcaagctgttgtgcgtcggctttcattacaatctttaaagtagttttaatggctacttcctgagtttgcataccaatgtaagagacttgcaatgttttcgcagaacttagtacgtaatatattattgattatcagacttgtgttttcaagaatagaactatattatagatagcaataagtagctaaatatctgataatatgtgatataaaaacagtaagatatatctgcatctaccctattcatcctatttttatccatatatgcgtgataataaagacaatacaactattatggttaaaataaatagttctaaaatggctaccatgagtttctgacaagacatgaatgtatgaaataaatgatttttataaaaaaaactatttatagctaatgtatgaatgaaaagcattttattatgtctctttttttgtacaaaatagtatatctagcaaagttgaatacatatagtcttacttttataaataacaaatgattttttaggcaaaaaaacgagtaatagagtattcttatttacctgtatcctacttacataagctcaatatttattcttatgtgctataacttaggaagtgaagagttaaacttgataatataagattatttatttactacatataaatacatattctaaaaattctcataatcctgagtcagttaaatgatgaaagaaaaacatattatattaatttataaatatg

SEQ ID NO: 6318 - DNA, 6054 bp, Unknown
  gut microbiota DNA sequence
aaacctcacctatctcggattattatccgttcccttctgccttggacagcatgtgtctgcacaaaccgcagaacaagcaaagtcagcatcccagcaaaagccgaacatcattttcatcctcgccgacgatatgggctatggagatgtctccgcctacaacaaagactcgcatatccaaacccgccacatcgaccagatggccgccaacggcgtaatgttcaccgatgctcattcttgttcagccgtcagcacccccacccgctatggcatcctcacagggcgctacaactggcgttccagcctcaaaagcggtgtactctatggctactcccgccctatcatcccctccacccgcagtaccatggcatccatgctgaaagcaaatggatataccaccgcctgcatcggcaaatggcatttaggctggaactggggcacgaaaccgggacatgagaaacccgacgccaacgccctcaacgacgaagacgtggactactctaaacccatcaccaacggtcctgtcgacttaggcttcgactacttctacggcttctgcggttccctcgacatggctccctatgtatatatagaaaaccgccagcccaccaccacccaaataggcaccgtacccgcaggaaagaaaccgggcttctggcgtgcaggcgccataggcaacgacttcaaccaccaagactgtctgcccaacctgacccaccgcgcagtagactacatcaaccgtcacgcgcaagacgaacgccctttcttcctctatctgcccctgcccgccccgcatacccccatcctgcccaccgaagccttcaaaggaaaaaccggactgggtgattacggcgacttcgtcctgatggtggacgatgtagtgggacaagtgcgcgaagccctgcgacgcaacgccatagactccaataccatcgtagtcttcaccaccgacaacggttgctctcccgccggaggtatccccgagatggcagctaaaggacatcatgccaactacatctggcgaggcatgaaagccgacctcttcgacggcggtcaccgcgtgcccaccatcgtggaatgggccaacggtgcaggccgaggcacctgtgcacaaaccgtctgcctcaacgacttctacgcttcttttgccgccctcaaccattatcccctgaaagataacgaagcggaagacagctacaacattcttcccctcatccggaatccacaccacacgccaaccatccgtgaagccaccgtgcaccactccatccgcggagagtttgccatccgtaaaggagactggaaactgttgtgttcccccagttccggcggttggagctatcccaagccaggcgtggacaaggaagccattgcccagctcccaccgatacaactctataatatgaaagacgatcccaccgaaagcaaaaatgtctatcaggaacatcccgaaatagtcagcgagctgaaagacctgttgcaaaagtacatccgcgaaggccggagcactccgggaaaagcacagtccaacgatgccgtgaacaaatgggagcaaatcaagggaatcatgcacgacgattgatggatttccggcagaaaaagacaaccggaagcactcgtctgaaagctaattttgaagaagaaataaaaaaaatatcattttttgcttgcatataagagaaaagtattacttttgccacgaaattaaaaacaaaaagaaaacgaaagtatgaatttgtttacttatacatattacttctttttttacttttactttagccagaaagtagagcgggagtttgtatgtgtcaagtgacagtgatgcttaagaactgaatagagaactaaagtaatatacttaatcccgctccattgtatggaagcgggattttttattttaaagaaacagtatgaaaagaatagccattcaaggaacattagggtcgtatcacgacattgccgcacacaagtacttcgaaggagaagaaatagagttaatctgttgcgctacttttgaggacgtgtttgcagccgtgaagaaggacagcaagaccataggaatgttggcaatagagaataccattgcaggtagcctattgcacaacaacgagttgctgcgacagagcggaacacaaatcataggcgaatacaaactacgcatttcacacagctttgtctgcctgcccgatgaggactggaacgatctgacggaagtcaactcccaccccatcgcactgatgcaatgccgcgagttccttgcccaacacccgaaaatgaaagtagtggaagcggaagacaccgccctcagcgccgaaatcatcaagcgggagaacctgaaaggacacgccgccatctgttccaaggccgctgccgagcgttacggcatgaaggtgttgcaggaaggcatcgaaacaaacaagcacaacttcacccgttttctggtagttgccgatccctggcaagtagacgaaatacgccgccatccacacccggaaaccaacaaggcaagcatggtattcacactgccccacacggaagggagcctctcgcaagtactgtccattctttcgttctacagcatcaacctgaccaaaatacagtcactgcccatcatcgggcgggaatgggaataccaattttacgtagacgttgttttcgacaacctactgagatataaacaatccatcgcggccatcacaccgctaaccaaagaacttaaaatattaggcgaatatgcagacggaaaatcaaacatctaagatcaagcccgccgaccggttggccagcgtgagcgaatactacttctccaagaagttgaaagaggtggcacaaatgaatgccgaaggaaaagacgtaatcagcctcggaatcggcagtcccgacatgcctccctcggaagcaaccatacagaccctgtgccgcgaagcacaaaatcctgacggacacggttatatgccttatgtcggtatccccgaacttcgccgcagctttgccgcctggtataagaaatggtacggcgtggagctgaatcctaatactgagatacagccgctcatcggctcgaaagaaggtatcctgcacgtcacactggccttcgtcaatccgggcgaacaggtattggttcccaatccgggctatcccacttatacctcattgagcaagatactgggcgcggaagtcatcaactacaacctgaaagaggaaaacggctggatgcccgacttcgacgaactggaaaagatggacatgagccgcgtaaagctgatgtggaccaactatccgaacatgccgaccggagctaacgccaccccggaactttatgcaaaactggtggactttgcacgccgtaaggacatcgtgattgtaaacgataacccgtacagcttcatcctgaacgaccaccccctcagcatcctcagtgtgccgggcgccaaagagtgttgcatcgagttcaactccatgagcaagagccacaatatgccgggctggcgtatcggtatgctggcaagcaacgccgactttgtgcaatggatcctgaaagtgaagagcaacatcgacagcggtatgttccgcgccatgcaactggcagccgccaacgccttggaagccgaacaggaatggtacgacggaaataacaagaactaccgcaaccgccgccatctggcaggggaaatcatgcatgcactgggatgtacatacgatgaaaaacaggtaggtatgttcctctggggaaaaattcccgatagctgtgccgacgttgaagaactgactgaaaaggtgttgcacaacgcacgcgtgttcatcacgccgggatttatctttggaagtaacggaaaacggtatatccgcatctcgctttgctgcaaagaccataaattggaagaggcattgaagcgcatcagggagatgaagtaatatatttacaaaaaagaactcctgttacacaagccactcaccgttttaaaaaacgtgcccgacgtttttaaagaataagggcaacgtttttaaaaaacgaggcctgtatttattaacacgttcgaaaggctttatcgacgggggttgcagagggttcaggagacactgagaaatatctatacaataaaaatataattgaacaaaaataaaagaatatggaacttgaattagaatcgattttgctgccgggtattgaggacaaacgtcccatggtaattgcaggtccttgcagcgccgaaacagaagaacaagtaatgtgcaccgccaagcaactggccgaaaagggaatgaagatattccgtgccggaatctggaaaccgcgtaccaaaccgggtggtttcgaaggtgtaggcgtagacggtctggcatggctgaaagaggtgaagaaagaaaccggaatgtacgtttctaccgaagtagccacttcgaagcatgtatacgagtgtctgaaagcaggtatcgatatactttggattggcgcacgcaccactgccaacccgtttgccatgcaggaaattgccgatgcactgaagggtgtggatattcctgtgtttgtgaagaacccggtaaacccggatctggaactctggatcggtgccctggaacgtatcaacaatgccggtctgaaacgtctggcagccatccaccgcggtttcagcagttacgacaagaagttgtaccgcaatctgccgcaatggcatatccccatcgagttgcgtcgtcgcatcccgaacctgccgatcatctgcgatcccagccatatcggtggtaagcgcgaactcatcgcaccgctttgccagcaggctatggacctcggtttcaacggtctgattatcgaaagccactgcaaccccgactgtgcatggagtgatgcttcgcagcaagtgactccggacgtactggattacatcctgaatctactcgtcatccgtaaagagacacagaccacggaaaacctcagcgaactgcgcaagcagattgacgagtgcgacaacaacctgatgcaggaacttgccaagcgtatgcgtgtggcacgtgaaatcggtacgttcaagaaagaacacgatatgacgattctgcaaacgggacgttacaatgaaattctggataaacgcggttctcaaggtgtgcttctgggcgtggattcggaatttatcaagaaggtattcgagctgatacacgaggagagtgtgaggcaacaaatggaaattataaacaagtgattagcgactggtgataagtgattaatggctacgctatctttcacttatcactaatcattaatacctaaacactaaatttatgcgtattttaatactcggagccggcaagatgggctctttctttacagatattctaagtttccaacatgaaacggcagtgttcgacgtgaatccgcaccagttgcgttttgtctataacacgtatcgtttcaccacgttggaagagataaaggacttcgaaccggagttggtaatcaatgccgccacggtgagatatacgctggacgcattccgcaaggtgctacctgtactgcccaaggattgtatcatcagtgatatcgcctcggtgaagacgggattaaagaaattctatgaggaaagtggctttcgttatgtatcgtcgcatccgatgtttggccctacgtttgccagcctcagcaatctgagcagcgagaatgctatcatcatcagtgaaggtgaccacctgggaaaaattttcttcaaggacctttaccagacgctccgcctcaatatcttcgaatatactttcgacgaacatgatgagacggtagcctattctctgtctattcctttcgtctctacgtttgtttttgcagcggtgatgaaacatcaggaggctccgggtactacgttcaagaagcatatggctattgccaagggtttgctgagtgaagatgattacttacttcaggaaattctctttaatccgcgcactccctcgcaagtggaaaatattcgtctggagctaaagaatttgctggaaattatcagtacgaaggatgcggaagggatgaagcagtatctgacgaagattagggaaaagataaaatagataggt

SEQ ID NO: 6319 - DNA, 52491 bp, Unknown
  gut microbiota DNA sequence
tttgcgtcattttgcgtagttaactctttgatcttcttcattgtattatgacctgtctccgttacacctggaatgcacttgctccgtatcaaggccgtactttcttcggtcagaggtacctgtgagtggagatggtacggagcaagtatctgctacatttgggcaggcgctggaattggaattgcaaaagcgcgatacggttttggtattttaggagcgtacgtcagttgctcattcaaaatatatttttgaaataaaaaatcccccttccccgttttaccggtaaaaggaggatttcacttaaaattatgatggactttttatttcaagtctctcagttcccagcccagtgcactggcacctaaaacagctgcatcagagtccttcaactcagacatcaacaatttggctttacctttatagatgttcagcacattgtcatcgatagctttctggatgggtttgaagatataatctccggatttggccaatccgccaaacaggataatagcttcggggcttgagaaagcgatagcatcagcaatagcttcacccagaatgttgcctgtgaagtcgaaaatatcttgtgccagtttgtcaccttgaaccgctgcatcgtatacgtcctttgaagtgatattctcagcagggatagagcgaagcaaacttggttcggtacgtgcagtcaggaattcgcgggctgtacgtgctacaccggtagccgagcagtaagtttccagacagccgtgacgtccgcatccgcaaagacgaccattttcgcggcgtatgataacgtgacccaattctccggcaaaaccgtcgtggccataaaccatctgaccgttgataacgataccgctacctacacctgtacccagagtaatcatgataaaatctttcataccacgtgcagcaccataagtcatttcaccgatagctgcggcgttagcgtcgttagtcaatgcagtaggtatacccaagcgctcctcgaacatagctgccaaaggtattacacctttccacggcaagttgggggcaaattcgatagtaccgctgtagtagttaccattgggagcaccgataccgatacctttgattttatctacaccgccattagcgataatcaaaggcaacagattcttgcagactgcatctacataatcatctgcttgatcgtgagcgccggttttgatggaaccgcttgcaataatagttccgcgtgcatccacaataccaaagacggtgtttgttccgcctatgtcaatacctactacgtagggtttttccatgcttgaattcatgatattaatgttttgtttaaagggttagttaattagtattatggttacaaattacacaaagaaaaacgacacttcaaaatctttttgaaaaaaagttcaccctctttgcaacttttcgtaacatagctgcgtctaatagtgaaaattaataagaaaacagactaaaacagaggtatacgtgatacaactgaaagacattaacaagacctacaacaacggagcacccttgcatgtgctcaaaggcatcaacctcgatatcaagcggggtgagtttgtttccatcatgggagcttcgggttccggtaaatccaccttacttaatatattgggtattttggataactatgataccggtgagtattatctgaatggtacactgatcaaaaacctcagtgagactaaagcggctgaataccggaaccgtatgatcgggttcatctttcagtcgtttaacttgatttcctttaaaaatgcagtagagaatgtggcgcttccgcttttctatcagggagtaagtcgccgcaagcgcaacgccatggcactggaatatctggatcgcttgggattgaaggattgggcgcaccacatgccgaatgaaatgtccggtggacagaaacagcgtgttgctatcgcccgtgcccttatcactcagcctcagattatcctggccgatgaacctaccggtgctcttgatagtaagacttccgtggaagtaatgcagattcttaaagatttgcacagtacggggatgactatcatagtggttacccacgaaagtggtgtagccaatcagacagataagataatccatatcaaggatggtattatcggcagcatcgaagagaatcgtgatcatgatgcttctccattcggaaaagacggatttatgaaataaaagaatgtacaatgtacaatttacaacgtacaattgaagcttcgccaacattccggaaggcaaattgtaaattgtaaattgtcaaatagtaaatgaatatatgtttgatatttggcaagaaatatacggaaccattaagcggaataagttgcgtacgttccttacagggtttgccgtggcatggggcatctttatgcttatcgtgttgctgggtgccggaaacggtatcatccacgccttcgagcaatcgtcctcagaacgtgcattgaactctatccgcatttttccgggatggacttccaagccttatgcgggattgaaggagggacgtcgtgtccgtttggagaataatgacctggaggctactgaaaagtattttccggattatgtaatcagtgccggtgctaccgtgcggcagagcaatgtaaacgtcagttttgggcaggagtatgtgaatatctccctgatgggagtacaccccaactatacggaggtagagacggtgaaaactgctgacgggcgttttgttaatcagaatgatttgaaagaacgtcgcaaggtgatcgttatacataaaaagactgccgatattctatttggcaaaactcataccgaacctatcgggcagtttgtcaatgcaagtggagtagcatatcaggtggtaggtatttataatgaccagggagaccgcgaagccagtgaggcctatattcctttttctactttgcagactatctataataaaggcgaacagctgaataatattattttcactactaaaaatctggaaacaatagaaagtaacgagatctttgaggccaactatcgcagggtaattggtgccagtcgtcgttttgatcctcaggacaacagtgccatctggatatggaaccgctttaccgattatatgcggacacaaaacgccatggggatgcttcgtacagctatctgggtgattggtattttcaccttgctgagtggaattgtaggtgtttcaaacatcatgttgattacggtgaaagagcgtacgcgtgaattcggtatccgtaaggctcttggagcgaaaccattatctatcctttggctgattattgtggagagcgttgctatcactactttgttcgggtatatagggatggtggccggcattgccgttacggaatggatgaactcggctttcggtaatcagactatggatgcgggtatgttccagcaaaccatgttctcgaatccgactgtagatttgagtgtcgccattcaggctacgctgaccttgattatagcgggaacgctggccggtttcttcccggcaaagaaggctgtaagcatcagtccgatagaagcattgagagcggattagtggctatagtatgaatcatttatcactaatcactaaacattaatcactattaacatgagaatagatatagactcttgtgaggaaatcctcatcacgattacaagaaacaagacgcgaagcttgctgacggcattcggtgtattctggggtatcttcatgctggtggcgcttatcggtggcgggcaggggatgcagcaggctatgagttcccagttcgaaggctttgccacgaattcggctttcctggtttcgcagaagacgggagaggcgtataaaggtttccggaaaggacgttggtggaatctggaactctctgatattgagcgtctgcgcaatggggtggcggaaattgatatcatcactccttctatcgcctattggggaagaacggcagtgcatggagataagaaatatgaatgtagcgtaaagggattgtatcccgaatatgagcatatagagcaccaggagatggcgtatggacgcttcatcaacgatgtggatattaaggaagcacgtaaagtctgcacaataggtaaacgtgtgtatgaaagtttgtttcacccgggagaagacccttgtggaaagtatatccgggtagacggtatttactatcaggtggtgggtatgtgctcgtccgagggcaacatgaatattcagggacaggcttcggaagcaataacattgccttacacaaccatgaaacaagcctataatctgggcaaccggatacatgtggcatgtttcaccgtgaagcccggtgtcaaggtgacggatattcaggataaggtggagcacatagtaaaggcggctcattacatctctccggatgataagcaggcagtgatgatgctgaatgcggaggccatgttctctatggtggataatctgatgacgggagtccgaatattgatctggatggtaggtttgggtaccttgtttgccggagctattggcgtatcgaacattatgatggtgacagtgcgtgagcgtaccacggaaattggcattcgccgcgccatcggagcacgtccgagggatatcttgcagcagattctttctgaaagtatggtgttgactactattgcgggtatggcaggtatctcttttgctgtattggtattgcaggtattggaggctgctgccaatgatccggggcatatcactactcattatcaggtttcatttggcctggctatcggtacctgtgcgctattgattgctttaggagtgcttgcaggtttggctccggcctatcgtgccatggcaattaaacctattgaggctatcagggatgaatgataagaggagcgataactccttaatttcctaatataaaaataaagaaacaataatataataatagtatgaaaaagtatctgaaaatcgcgttattggtagttgtagctgccattttcatcttcacgtttgtattcctttaccagaagtctaaacccaagattacggtgtatgatacagtaactccgacagtggccgacctggaaaaaacgactgtggcaaccggaaaggtagaaccaagggacgagattctcattaaaccccagatatcgggtatcattgacgagttgtataaagaagcgggacagactatacgcaagggagaagtgattgctaaggtgaaagtgattcccgaactaggtacgttgaactctgccgagagtcgtgtgcgtctggcggaacttaatgcgaaacagggcgaaacggactttgcccgcatagagaagttgtttgaagacaagctgatcagtcgtgaagaatatgaaaaagccgaggtaagtgtaaagcaggtgcgtgaagagttgcagacagctaaggataacctggaaattgtgaaggaaggtattacaaagagcagtgcttctttctcaagtacgttgatccgttccacaattgatggtttgatactggatgtaccggtaaaagccggtaactcggtgatcatgagtaacacgttcaatgatggtacgacaatcgctacggttgccaatatgaatgatttgattttcagaggtaaaattgatgaaacggaagtcggtcgtgttcatgaaggtatgcctgtgaagttgacaattggtgctttgcagaatctttcatttgacgctacactggaatatatctcgccgaagggggtagaagagaacggtgccaatcaatttgagataaaggcagctatacaggtacccgatacggtgatgattcgttcggggtattctgctaatgcggaaattgtactggaacgtgcacaaaaggcgcttactttacctgaaagtactattgagttcagtggagacagcacatttgtatatgtgatgacggatagtgtgcctgcccagaagttcgagcgtaaagaggtgaaagtgggtatgagtgacggtatcaagattgttatcaaagacggtgtggacggcaaagccaaagtgcgcggtgcagagaagaaggataaataaatgtcggtgaagtaaccttgtataattcaataataacagattatgaagaagaacttaataataggatgcatggctgtctttgctgtctcggtgcaggcacaggagggctggacattgcgccaatgcatcgactacgctatagaacataatatcagtatccgtcagagtgctaatgaggcaaaacaaagtgccgtaagtgtgaatactgccaaatgggcgcgtctgccgaacctgaacggtagtgcagggcaaagttggaactggggacgtacggatgtgcgtataggagatgagcaaaagtacattagtgtgagtagccacagtactaatatgtctttgtctaccaatgttcctatattcaccggtttacagattcctaatcagtatgctttggccaaactgaaccttaaagctgctatggcggatttggaaaaagctaaagaagatatttctataaatattgcttctgcttatttgcaggtactgttcaatcaagagttacatcaggtttctcttggccaggtagagttgagcaaagagcaatatgcccgtatatctcgtcttgcggaattgggtaaagcgtctcctgcggaggttgctgaggcgaaagcccgtgttgcccaggatgagatgagtgctgtgcagactgataataattttcagttagcattgcttgatcttagtcagcttattgagttggaaactccggaaggattcagtttggccgctcctgtagtgaagcttgacttggaaccccttactcctccggatgaggtctatcagacagctttgtcgactaaagctgccattcaggctgcacaatatcgcctggagggtagcaagcacaacatccgtattgctcagagtgctttctatccgcaattgagttttagtggtagtcttggaactaattactattctaccattgaccgtaattttggtgatcagatgcgggataatttcagtaagtatgtaggatttagtctgagtgttcctctctttaatcgctttactactcgtaaccgtgtgcgcacagcgcgtttacagcaggagaattattctctgcaactggataataccaagaaaacgctctataaagaaattcagcaagcctggtacactgcactggcttccgaaagcaagtataccagtagtagtacggcagccaatgccagtatggaatctttcaagctgatgagtgagaagtatgataatggcaaagctaatgccgtagagtataatgaagcgaaacagaatttgatgaaagcccagtctgatgagttgcaggccaaatatgaatatctgttccgtacaaagatattggacttctataaaggaataccgattgaataacttttttagtgtctttctcttgaaaatccttctttggctgcgaggctgggggaggattttctgtatatttgccacatgactccttttatcagtataattattcctttttatggtacagcagacccggtattgctgcaacgctgtattacttctatccgtgaacagggaatggaagaggggagttatgaaatcattgtagcagacgatgagagtcagactacggggggagcacgtaatcgtggaatgcaacaagcgcatggtgaatatcttttttttgtagatgctgatgatattttagtaccgaatacacttcgttcttgtttacctttgttgaaactatactctcctgatattctgaggtttggttttaaagagtttaccagtgcctcttcgttggagaagcagaatccgaccaatcaagtgccgtcttatgtagaatactcatccggtgcccacttcatggcattgaataattttacgggagttgtttgggcgaatttcttccgtcgaagtttattggagacgtcttctctttattttagtaagacaagcctttttgaagatgaagagtttgttgccaaagcttacttcttcgcccgaaaaatgttggtgacttcttataaagtgtatggttattactgttcatcttcttctttaacgagaatgattgctgaagatgaatgccggaggagggtatctgattttaaagaaatgctttttcggttgaaagcgtttagtcaggcttgtcagtctgatgcctctgttgagcgtttggaggcattgaatagacgaatccattttcttgttatcgactatatccgtcagatgtggcggaataaatgtagtataaatgagatgaaccggcaattagctatcctgaaacaagagggattagtacctttgccctataaaaagtattcttggaagtatcgtttggtttgtcctgccattaatgtttatattcgttttgttatatgaagatattgttacttggagagtttagcgggctgcattggaatcttgcggaaggacttcgggctttggggcacgatgtctgtgttgcctctgatggttgtggttggaggaactatccgcgtgatatagctcttgaccggccgacggatagtttgcgtgatggtatctgttgccttctccgtatattgcgtcatttgccgggttttcggggatatgatgttgtgcagattatcagtccttattttttgcgtttacgcagtgaacgtactttgcctgtttaccgttatttgcagcggcacaatggcaaggtctttttgggagctttcgggaccgactattattatattcgtgcttgtatggaaacaagcacttttcactattcggattttaagatcggagaccggtatcgtgatacggcttttaatcagattactcttcaggattggtattatggtggggcagctcgtgccactcgggctatagccgaaacttgtaatggcattatcgcctgtttgtgggagtattacgcttcctatcaaccttacttttcagataagacagctttcattcctttacctatcgatttgcgtgaggtaacatcccgcgttcgcggtgtgccggagaaactgaatttcttcatcggtattcagtctgcccgtagtaatttgaaggggactgatgttatgctgcccgttttgcaagaagtgcagcgcaagtattctgagctttgccgcatcactgaagtgcatgatgtgccttatgcccgctatcagcagttgatggatgatgctgatgtccagttagatcagttgtattcgtataccccttccatgaattcactattggctatggcaaaaggagtaacggtagtgggaggcggtgagccggagaactatgagatattgaatgaaacagaacttcgtcccattatcaatgttctgcccgacgagcaagatatttatcaaaagttggaagatatagtgcttcataaagagcgtattccggaattatcggcgcaaagcattgaatacgtagccaagtatcacgatcatgtgaaggtggcccgccaatatctggacttctgggaaaaatattaatcatttcttcttgtattttgcccttgcaataactaagtattgtaagggcaaaattttattaagcaaagtaatcattttcctttgccaaggtaactcgtgttatgccttctaagtacttatagatgcccgatgtaacgtgagtgaaagattatgaaacatacatcggtaaagatgtaatatcagcgaaagaatgtgtaaaatgattataggtatctcttggattcgatactgtatatttgctgtcggtaaattttgtcttttcaaaaacaataataaaaaaggatataactatgcgaaaacatttttgtctttttctgctggcatctattttctacagttatgcgactcttgcgcaaaacgcttctgccaaaaatccggtgattcatgccgatgtacccgatatgtcaatgatccgggtgggagatacttattacatgagtagtaccaccatgcacatggctccgggagtacccattatgaaatctaaagatctagtgaactgggagttggtgagttactgttacgatatactggccgatgtggatgcactgaacttgaacaatggtaagaatgcttatggcagtggtacatgggcaagctgcattcgctatcataataatatgtattatgtgacaacatttgccggcaccaccgggaagacctatatatatactacgaaagatatagagaaaggtccttggaaagcaatatcctttaatccttcttatcatgatcattctgttttctttgacgatgacggtcgtatttatatcatctggggaggtggtaaactgcatatagcggaactgaagcccgatttatccgggatcaaagaaggtaccgaacgtatctttatagagaatgccagtgctccgtcaggagataatgtcggattacctgccgagggttcacagttatttaaagtaaatgggaagtattatttattcaatattacttggccgaaaggaggaatgcgtacagtggttattcaccgcgctgataatataaatggtccttgggaaggtagagtagctttgcaggataaaggtgttgcccaaggtggcttgatagatacgcctgatggcagatggtttgcatatcttttccgtgacaatggttctgtaggccgtatcccttatcttgttccggtgaaatgggaagatggatggccggttctcggaataaatggaaaggttccggaaacattggatctgccggcaagtaaaggtttgataccgggtattgttgcctcggatgagtttacacgcaagaagaaagatgcggctttgccgttggtttggcagtggaatcacaatccggataattctctctggtcagttagtgaacggaagggatatctgcgactcaaaaccggacggatagatactgatttcctgtctgcaagaaacacgttgacacagcggacgattggtccggtatgttcaggaactacttctatggatgtgtctgatatgagagaaggcgattttgcagggcttgcacttcttcagaaaaaatatggatggattggtgtgaaatatgaaaacggggtaaagaagattgtaatggtaagtgcgcagactgacaaaccggaagaggtggaaagtctgccactgaaccaaaatacagtattcctgaaagccgaatgtgactttacagataagaaagatatagcggatttctactatagcctggatggtaagaagtggacaaaaataggaagccagctcaagatggcttatactctcccgcattttatgggataccgtttcggactattcaattatgctaccaagactcccggagggtatgtggactttgattatttccgtataagtgacagtaaatgagataactagtaattataaatcataattgatattagacatgaaaaaggtgaaatcgacgctttccgtgggtaagcgcatcattttgttgtcactttgtatgacaatgttttcagtggcaggttttagccaaggggctaaaggtaaaaaggtgaagggtgctccggtattcttgcaggcggtttatcaggggaatgatcaggtgtacaacgagaatccgttgcaggccggtgagttttataatcccattttgcaaggttgttaccccgatccgtccataacccgcaaaggggatgattacttcctggtgtgttcatcgttcgccatgttccccggtgtgcctatcttccattcaaaggatttagtgaactggacgcagataggccatgtactggaccgtacctcacagctgaaagtacatgatacgggtatcagtgccggcgtgtatgctccggccatcaagtataaccccaataatgatactttctatatgatcaccacccagtttgcggggggattcgggaatatcattgtaaagtcgaaagatcctttcaaaggatggagtgatcctatcaagttgaattttgacggtatcgacccctctatcttctttgatgataacggcaaggcatatgtggttcataatgacggaccgaagcgtggtgaagaactctataacggacaccgtgtgattaaaatctgggagtatgatgtggaaaacgatcaggtgattcccggttcggatcaggttattgtgaatggtggtgtggatttgtccaaaaaacctatctggattgaagctccgcatatctataagaagaatggacgctactatctgatgtgtgccgaaggcggtaccggagattggcatagtgaagtaatctttgtgagcgacaacccgaaaggtccctttattccggctcccaataatcctatcctgagtcagagatacctgaaccagaaccggaagaatatggtggattgggccggacatgccgatttagtggaaggtcctgacggcaaatattacggtgtgttcctggctatccgtccgaatgagaagggcagagtgaacattggccgtgaaacgtttatcctgccggttgactggtcgggagaattccctgtctttgaaaacggattgattccgatggagccaaagttgaaaacacctaaaggagtggagaataaagccggaaaagacggttacttccccaatggcaattttacgttcactgaaaacttcacatctccgcaattggactaccgctggattggtttgagaggccctcgtgaagagttcatctcagtactgaaagacggaggattgcagattactcctttcccggtgaacataaaagaggtgaagcctacttcaaccctcttctacagacagcaacataataacttctcgtttactaccacattgcagtatgttccgaagacagagaaagatctggcaggcatcacttgcgtacagagtgaaaaattcaattatgtctttggcttgacaaaaaaggacaaagatttctacatggtgctggaaagaacggcaagaggtaaatccggacttgttgcaagtgcaaaagtagatgtgaaaaatcccattcaattgcgagtaaagggtgaaggagatggctatggcttttattattcaacggatggaactgacttcgtacagttgggaaataccgtgcccggtgatattctttcaacgaacgtggcaggtggttttaccggttgtctgataggcttgtacgctacttctgcgaatgatattgttgtgaacaacctgaaagatgcgtatgctgattatttcactgtgggatgtgccataaatatggcaaatctgaattcatctcaacagatggcattgattacttccaactttaacagtatcactgcagagaacgatatgaaacctcaacctacggagcctgtggaaggacagtggaactgggagagcgctgataagatagccaactttgcccgtgctaataaaataggacttcgcggtcattgccttgtctggcatgcccaaactccggactggatgttccatgatgaaaagggaaatttggtttccaaggaggtattgtttgagagaatgagaaagcatattcatacgattgtaaatagatataaggatgttgtctatgcctgggatgtagtgaacgaggcgatgacggatgatccgaaagcagaagttccttatcgtcagtctctctattataagattgcgggggacgagtttataaagaaggcttttgaatatgctcatgaggcagatcccaaagcattgcttttctacaatgattataatgagaccaacccggcgaagcgtgaccgcatttataatatggttaaaagcatgaaggctgagggaatacccatctccggaatcggaatgcagggacattataataccctttctcctacggaggatgagttcagaaaggctatcgagctttattcgcaggtggttgataatatccatatcactgaactggacgttcgtatcaatacgagagagcagggaggacagttgagtgtgaaccaggataacaggacgttggaattgactcctgaagcggatgcggcacaggtagcccagtatgatatgctgttccgggtgatgcgcgaatacaagaatgtggttagcaatgttactttctggaatgtatatgatggtgattcatggctggatcgccgccgtggtaaccgtcagcgtaactatccgcttctgtttgacgaaaacttactgccgaaatcttcgtattataaagtgatgaatttctaaataaaggtatttgcacagtcaataatccgctctatatcttcattcatcagtaatggagatatagggaggcttaactcctcattatggatgcgttccgtaatggggagttgttgcattccatattcttttttcaatgcttcctggcgatggggagggatagggtaatgaatttgagtacaaatgccgtgactattgagataacgttgccattcatctctgcgggaagaaaagacggggaagatatgaaaaacattggcttcattgatatcatccgtatggacagtactctgtaattccagacgctgccagtcaatcccttctttatataattgcgctatttcccttctacggatattatcctgatccaaacgagagagtttcacggaaagaactgccgcctgcaactcgtccagacggctgtttataccttgataccgatgtacatatttctccgtggagccataattggcaatggaacgcactgtagcggcaagccttgcatcgtgagtggttatagcgccgccatcccctaatgcccctaaattcttggctggataaaaactgaaagcagcggcatctcccagattaccggcacgcagaggatgattccctttccccggtaaacctttgttccagacagctccatgtgcttgtgcagcgtcttctatgactttcagtccgtagcggttggctaacttgcatatctctttcatgtcagctaaacggccatacaggtggacgggcaatatggcacgcgtgcggggggtaatcagtgtctcggcataggcagcatctatattgcatgtttcgaaagaaggttcacaaagcattggcttcaggccggcacgaagaatggaaagcagggtggcaatgtatgtattggcaggaacaataacttcatctcctgcattcatcactcccagttcccggtaagccagaaatatcaaagtaagagcatccaaaccatttccggtgccaacacaataagaagtaccgcaataagcagcgaactcctcttcaaaacgggctgtagcttccccgtgcagataccatccggaatgggaaacacgcaacagagcatccgacagttcgggttcgaaggaggcattgatcttttgcaggtctaaatactttatcataagcgtaattcgtaaacgtcatacataattgctcttgcgccgaaaccttctttttggaagagtaatccctcattcaatatttgtccgccgtgttcggtagatatgccaaagtcgaagtatcgcttctgcgcataacggtcgtatattaattggtggaaaagcaggtcgagcgcaccgcatttctttccgcgtggggaagctgcgatgtattgcacgtgggctacttcgtcagtctcatacacaatgcatccacccaatgtttcggctccatcgcatacacggaaaagggaaatctggcggggaaaatagctgtgcagacgggtaatctcctctagcgaatgtacgggagagacaccgtatcgttcgtgcaggttttcttccagtatcggccagaaagaagcaaagtcttcatcttctgcaatcgtcagtgaggatgccagggctttcttcagttggcgacggcggagagtacggaaaggcaggcggtcgtccagtggaatgacggatgagatgcttcgtgccacaagggttgcacccagccgggtgaggacataaaggtcttcttctgcaggatagcggtgatagatatgtggaatagcacgatagactatcgactgcacactgcattccttctgcagataatcgagtgcggcatgaaatacgctttctacttgttgcagggtgatggaaggagaaaggagcattccgccatacgtcagtccttgatgggaatagaaacaactgccggaaagattaccgggaagcagggctgttaacttccggttacagaagatcattagggaacaatcctggaaacggtcggcatgataatccatatagtcgcgttgcatgaggaacgtaccgtttttggagcggcgcacgaagcggtcccagcgctctttatctcctgctgagtagcggattatatgccattcctgatcggttgccacacttatttccatgtatctgcctgtcttttatattactttcggaattcaaatataggtatatttttaaagttttgcatatatgtcagcctgaaaggctatatgcggaacttacgtataatttaaataacgtgagtttaggtggtttattatttatgcgaatcatcaggagttgaattgggatcatatcggaaaagttacgagctaccggctacaagctacaagtagctacgctatgttccgaaaggcacttgtagcttgtagtcggtagctgattcataacggaatagaaaagaacaaaagtgattcgtgtttagtgataagtgataagcgccattcggtatattattttttagacgcggatgacacggataacgcggatttaaaaggctgcgctataaaagtggataaaaaaaagatccgcgtcatccgtgtcatccgcgtctaaaagattatttatcatttaactcataaccctacagagaagagcaaaccaaagttcatatgtcccgtaaccacctgtatgacaagaaacttggtgttccatcatgatcagtcgtagtgaaacacgagttcagtcctagtgggaggtaccttcagtcgtagtgggagatatcttcagtcgtagtgggaagcaccctcggtttagcatagtgaatgaatcattgtattgttcatgccccgccataactgtgtctcaaccgtacttgcttcgtaccttcttcgctcaggagcacctctgaccgaagaaatcccggactaggtacggagcaagtgcatctcgggtatagtcagaagttgtgtaagccgtttaatgtcgaaatatcccgaaacttaaaaaatgtgtctgaaaacgaaaaagttcatcttttttctttccgtcaggacaggataagaaagactattcgttatatttgtagcaatttaaaaacccgaacaaaatgaaaagaataactttgaaatttattcccggtgtatttctggcagttatattcctgctaagttcttgtacttctgcatataaggtgacgaagtcagagggaaccatggtggcgattgactctacttgggatgtgaacccggatgctgaagcggtggcactgcttgctccttataaggcaaaagttgacagtatcatgtatcgtgtggtgggtactgcggaaatgagtatggataaaggagctccggagagtttgctttccaatctggtagcggatgtattgcgcaatgctgccgcacaagtactgggcaagcctgccgatatggggctgataaatatgggtggtttgcgtaatgtactgacagaaggccctatcactaccgaaaatatctatgagatattacctttcgaaaattccctttgtgtattaacaatgaagggagtctatctgaaagaactgtttaataatatcgctgtgcgtcatggtgaaggtatcagtggagtacagctcctgattacgaaagacgggaaattgctgcaaggtacggttggcgggcgtccgatagaagacgatcaactctatacgattgctacaatcgactatctggctgacggaaacgacgggatgactgctttgcctcaggcagagaaacgggaatgtccggacggagccactttgcgcggcctgttcatggactatgtggaacgtcaaactgctgccggaaagaagatcacttcgcgtctggaaggtagagtaactgtgaaagatgagtaatcctgctcaccgagaaaataaatcataattcataaatcagaaatcatgaaacgatatattcttttaatgttggcagtctgctgccttcttccggcatcagcacaacaatctatccgggaaatctccaaggaacccctttgtctgctgactcccgactctgcacagaaaaccaagcaattggtgattctgcaaacaagtgatacacatagccgcattgagcccattgccgtaaatgctgccgaccgctatgccggtatgggcggaaccgtgcgccgggccacctttattaaagaggcacgcaaggtgaaccctgatctgttgctgttcgactgtggagatatctctcagggaactccttactataatctgttccagggagaagtagaagtcaagatgatgaaccttatgggttacgatgccatgacgattggtaatcatgagtttgatttcggtctggaaaatatggcacgtctgttccgtatggcaaacttcccggtggtatgtgccaactatgacgtaacaggtacggtgttggaaggactggtgaaaccttatactactttcagccgcaatggattgaagatcggtgtctttggtcttgctccgaagatggaaggattggtgcaggccgataaatgtgaaggtgtggtttataatgatccgatagaagtggcacagaagacgacggatctgctgaagaaccaggaaggttgtgatgtcgttatttgcttatcgcatctgggttatcagcttaaaggtgctccttgtgacgaagaactggcacagaaaacaaataatattgatgccatattgggcggacatacccatactttcatgaaagagcctgctatttatttgaataaagacggtaagaatgtacctgtgatgcatacaggaaaaagtggaatttatgtgggaatgttgaaactgacacttacagaagaagaagcccaaccatcatctaagtaatacataataaaaatgaagagaacaattctcttgttgttggctatccttttatggggtggcacatccttgcttcatgcccaggcagaagccccttttctaccttcagcggcagatgcacgttgcaaacagtgggtagattccgtattttccggtttgaacctgcaagagaaagtagggcaattgattgtcaccaccttcccggccaaggcggataagcagaaaaagaagcagatacgtgatcttgtgaagaagtataagatcggaggtctgctctttgccgaaggtacgccggaagaacaggcaatactgacgaatattgcgcagaagaactccaaagttcccgttatgatcacttttgacggtgagtgggggctctccatgcgtctggaaggtacgccctatttcccaaagaatgcggctctgggctgcattgaagacaatcagttgatttatgaatacggacgtgaggtggcacgggaatttcgtgaattgggtgtgcatgtcaattttgcacctgatgcggatgtgaataccaatcctttgaatccggtgattcatgttcgttcgttcggtgaagatccgaagaaagtagccgaaaaggtgctggcttacagtcgtgggttggaaagtggtggcgtgctgtccgtaagcaaacactttcccggtcatggagatacggacgtggactcgcataagggactgccggtgctctactataatcgtgaacgtttggatagcgtcgagctgtatccgttccgcgaaatggtgcgtgccggattgggcggtgtgatggtaggtcatttgcaggtgcctgctttggaaccggacgccaaaacggcatcttcactttccagaaatgtagtgacgggattactgaaagatgaaatgggttttcagggcttggtgtttacggatgcgctggatatgaaaggtgtttcgtctgtgccccagcttactacaaaagccttacttgccggaaatgatatggtattggtgcagtacaacaccgcaaacgctgtgcaggaagtgctgagtgctgtgaaagagggcgttctctctgagaaagaagtggaagcgaaatgccgtaagatacttacttataaatatttgttaggcttgcgccagccacgcccgcagttacaagttagcggaatgagctatcgtatccatacggatgaggcgaaggctctggtaaccaggttgcgccaagcctccattacggtgcttggcaatcatttcgggatattgcctttgacaccagtcggtggtgctcctattgctcttctgagtataggcgaaggcaaagacagtgtttttgtggatgagatgaagaaattatctcctgttcctatggagtgttttcgtttgacaagagaaatgtcggaagatggccgccgtgaactggcgcgtaagttggcggactatcggcgtatagtggtcagcgtatcgggaaaagatgccgatgtggttgcttatgccgatttcctggcgggattggacttgtccgtgccgctggtatatgctttttttacgtcttatcgtggaatgcaaccgttagagcctgctttgaaccaagccagcgccgtagtgctgggacattcttctgaagcggatatccaacaatatgtggcaggtgtcatctttgccaaagtgcctgcccaaggcaagctttccatgagtatcggaagtctttatcaggccggtgagggaagtgtgatcactccggggatgaagccgggaagtattattcccgaagatttggggatgaagtccaatgagttgcatcgcattgatgctatcgtgcgggcaggactggctgccggagcttatcccggttgccaggtgctggtgctgaaagacggtcagacggtgtatgataaatgtttcggtatacattccgataaggataccactgctgtacgtcctacggatctgttcgacctggcttctctgacaaagactactgcaacgctgcttgctgtgatgaaactttatgatggtggtaaattaaaactgacggataaggtttcccaatacttaccttttctgcgaagtacgaataagaagaatattacgattaaggacttgcttcttcacgaatctggcctgccgccttatattcgtttctatctggaggctatcgacccgaactccgtgcatggaccgtatgctcaaagttgggtggatgaatggcatcgcacgcgggtaagcgaacatagctattattgttcggatttcaagttcaagaaaggactggtgtcggagaaagaatcatcggtttacaacttgcatgtagctgataagatgtggttgaataagagctttaagaataccatcctgcaaaagattgcccgttgcgaaatggacagtaagcggtatgtgtacagtgatctcggctttatcctgctgcaacaggtggtagagtcaattgtcaagttgccgatggacctctatctggctaaggagttctatgcgcctatgggcttgcagcgtaccatgtacctgcctttgcagaaatactccaaagaagagataatgcctacggctgcaaacgacttcctgcgtcgtcaggacttgtgtggctatgtgcatgatgaggctgctgcctgcatgggtggcatatccggtaatgccggtctcttctccaccgcctccgaagtggctaaaatctatcagatgatattgaacggtggcgaatggaacggtaaacgctatctgagcgaagcgacctgccgcctgttcactacggaaacttccgctatcagccgtcggggattgggcttcgacaaacctaatctgaaggatttgaagaatagtccttgtgctgcctctgctaccgctgccgtttatgggcataccggtttcacggggacttgcgcctgggtggatccagaacacgggacggtgtacgtcttcctcagtaaccgcctgtgtcccaatgtgtggaatacgaaattgggtgaaatgaatattcgcacggatatacaagaggcgatttataaaagtctgaaatagctggagcatagaaatacgggagacacgggaaatacagcgttttttactaattagtcgaaaaaactctgtgttttccgtgtctttgtgtttgaaatactataactttggtagccttaatgtatagataataatgaagaaactattcctattcctcttgatactattcagttgttgtgcccgttttgatgctcagacacatcgcttaccggcaccgcaatcccctgttacgcctgttgaacctatcctgatgcgtccctttaccaatgatgcccgctgccggcagtgggtggactcagtgctcaacaagatgagtctgaaagaacgtatcggacagctattcatttataccattgccccccaacaggataaagcaaaccgcgacctgttgcgcaaagtagtggacgactacaaagtgggtggcctgcttttttccggtggtttaatggaaaatcaggtggcactgactaatgaagcgcagaaaatggcggatattccgttgatgattaccttcgacggtgagtggggactttccatgcgcttgcggggtacaccggtgtttccgcgaaatatggttctgggctgtatacaaaacgacagcctgctctatgagtacgggcgcgagatggcccggcagtgccgtgaacttggcgtgcaagtcaactttgctcccgtggcggatgtgaatatcaatccgaagaatcccgttatcaatacccgctcttttggagaaagtccggtaaatgtggcggataaagtgatagcttatgcacgtggactggaagatggtggtgtactttccgtaagcaagcattttcccggtcatggagatacggatgtggattcgcatcattcattgccgaagctgtcgttttcgcgtgcacgtctggacagtgtggagctttatccgttcagaaaggctatccaggccggactgtccggtatgatggtgggacatttggaagtgccggtgcttgagccgaaacgaggagtaccttcctcgctttcgcgcaaagtagtgcatgatttgttgacacaggagatgcagttcaaagggttggtgtttacggatgcacttgccatgaagggagtatctgccaataacacgagtatttgcttgcaggcattgcaggcggggcacgacctgttgctcgttccccggcggataaaggaagaggtggaagctatactggatgccgtgaagaatggtgaattgacagaagcggaaatcgaagcgaagtgtcggaaagtgcttacctataaatatgctctcggattgtcaaagaaaccttttgtccgtctttccggtttgggaaatcgtatcaatacggcacatacgcgtgatctgatacggcgtctgaaccaggaggcgatcactgtgctgagaaataaaaacaatgtgcttccattggatgcggatacccgtgaagtggcagtgctcaatgtgggggatgcgaaagaggtacagccgttcctgaaagaactctccggatatataaattccgtcgggacgaaaggaagtcccgccgtctttcagctgaagaaagacttgcagcctgctgcacgcaaactgttgcgtgattcattgtcgcaatataaacgtattcttgtctgcgtcacggaacatcgtctggcaccttaccaaccattctttgccgagtttactcacgatgtgccggtggtttatctgctttttattcccggtaagcagatgttgcagatacgccgggcagtgtctgctgcggacgccgtagtattggcacattcttcgatagatgatgtgcagtgccggacagccaaaatactttatggagatgcaacggccgacggacgtctctcggcaagtatcagcaatttgtttgccacaggtacggggcaggttattactccgaagacaccgctccactttgtgcccgatgagtatggagtgaattctcgtctgctgacccgtatcgatgagattgcgaaagaagggattaaggaaggtgcctatcccggttgccagattgtgatattgaaagatggaaaggaaatgtataataaggcattcggaacgcatacctggccgggcgcttctgccaatagactttctgcatccgttactccgggtgctaccttgccggtatccccgacggatgtttacgatcttgcttcgctgacaaagactacggcaacgttgcttgccgtcatgaagctgtatgataaaggacgtctgaatcttactgaccgtgtgtcggactatctgccttggcttcaggatacggataaaaaggatattactgtccggcaattactgttgcatgagtccggattgccttccacgttgttgttctatctggaagctatcgataaggaaagttatgaaggaactcttttcaaggcaaaacccgatgccgcacattctgcacagatcggtgtacgtacttgggcaaacccgaagttcaagttccagaaggggctgacatccaaagtacgcacggcagagcatacattgcaggtttctgatagcttgtggctgaatcgctccttcaaggaggcataccggcagaagattatagaaactccgttgcgcgaccggcgctatcggtatagttgtgtcggcttcatcctgttgcagcagttggtggaagcgcgtacgggaatgtcgatggatgcttttctggagcaggagttctatgctccgatgggactgaaacgtaccggatacttgccgctgcgaggtgcagctactgcgggaacggcttatgccggcattgtttccggtagccatgctcctctgtcgaaagccgaaattataccttcttcctttgatcctttcttgcggaagactgttcttcagggctttgtacatgatgagtcggcagctttccagggtggtgtatcgggtaatgccggattattctctaatgcaacggaagtagcgcgaatttatcagatgttgctgaatggtggtgaactggatggcaagcgttatctgagtccggagacttgccgtgtatttactactacggtttcacgcatcagccgccgtggtctgggatttgataagcccgaccgtcagaatccggcaaagagcccatgcgctgccgctaccccttctaccgtctatggtcataccggctttacgggtacttgtgcctgggtagacccgacgaacggccttgtttatgtcttcttgtgtaatcgcatttatcccaatgtatggaatacgaaactgatgaagatggatattcgtacacgaatacaggaagtgatgtatcaggcggtgaaataattacgagttacaagctacgagctacgagtgccatgcggcataattgttcgtaaacatagcgcagcaacttgtagcttgtatcttgtagttcgtaactacaaaagggaatagccccccgctcacgcggccggttattccctttttcacgtcttgaaacaatcaattaataccagtcaaacttattgtgttgcaatgcaaattatgttagaatgcaatacccaggcgtagaccgaagttgctcaagccatctacactgtatgtgaacaagtcacccttgttcgtgccgtagctatagtaagcggcaacgtgcagacccggaccataggcccatgggtagatgttgataccaatttccggtgatacgtagaagccccaggtgctcttgttagcttcgtacacattgaaagtagatttgatttcggcatattgaggacctactttcaatccaacgtaaggttggaaagcgctaccgcggtcgaaagtataacgtccggcaaggccgaaaggcaactggaacaaagtgtgctgttggtcagtattgatgctaccgccttcacctacgggaagtgtctggcgaccgaagtattcgtggttgctgtggtaggccaggaaggcaccaagagcaatgttcggagtcacatagtaaccaccttcaaaactcataccccatccgctggctttatcagcgaagtggttgctcagggggaagttgaattgccaatcgatgttggcataaccgttatcggttaattgtgcctttgccggcatggcgaagacgagagccagggcagtgattgccagtactcttatagaaagatattttattgttttcatacttgttattgtttttagttatgagatacttcaggctgtacctctctacttaactatttactactaacaattacttattagtaaggtaggaagattgagtgtaggcttggttcacaccttcaatggccaatttggtgtttacagctgtagaaccgctaagcaatccgctcatgtagcttgtccagagtatgggcaatttttctttttcgccttgagtggcttccaggttgagaagctcggtgatgaatgaaccggtgctatatgtataagtcacagcatacgggtagtaccatccgccccagttaccccagtaaggtgcatcccagtagcccgggtagttccaccaccattcgggacgtccgtagtcattaaagtagtaagtgctcttgatgtagctgacctgcaaaccgaggttggcttcttcacgatcgtctacacggacaaaaccgcgattgttcatattggtagcgtaggcttgcagaatttcctgagcgctctcgtctttccagtattcagcttctttcttatcaccgatgataaggatgctgtccggcatgtagtacgtttggaaagctttgaaatcagctttcgtgtcatagttggtataaaccagatacttgttgtccagcttatccgtgtcagggtctttttcgcaggctgcgaaagtcaagaccaccaataataggggaattaatttcttcatacttttataatgtttaggttaaatataaaaatcctgccctggtacctcaggcttttggtacatgaacaagataaaaaataaaaggttcagaaggaggtatgttaaattttaatcttttgcagaaaaacggggcgctctgaattgggggaataggtgcatagacggtattttacaggctataagtccacagctgtttcctttcatgaaaattcagtttaccccaaatggtaactgtgttgactctacacggtaactctatttacacaccgaggtaaagctcgttacatatcgaggtaaatgtcgttacaataagggggaagtgtcgttacatacagtggtaaatgcttttacatatttcagtaaactattggtaaatactatttgctgattatcaatagagtaacagaatatccttcggtaaccttttattcttttttatcgggttatgaacaaaatgataaataatcttttagacgcggataacgcggatttaaaaggctgcgctataaaaaaagatccgcgtcatccgtgttatccgtgtctaaaaaataatatactgaatggtgctaatcacttatcactaaatcctaatcacctttattcctttctaatactttttagtccagtatccgttgaatcgtttccagttcttccgctgtgaactttgtattttctatggctttcagattatctgccagttgggctacggaacttgcacctataatgaccgaagtgaccatttcatctttcagcacccatgccaacgccatttcggcaagagtctgtccgcgttgggcagccacttcattcagtgcctttattctattgagcacttcttttgtcagcgcttctttcttcaggaatccacctttggcaatccgcgaatcttcggggataccattcagataacggttggtcagcaggccttgtgccagcggtgaaaaggcaatgaaaccggtaccgttttcgcgtgcctgttgcagaataccttcttcttccggttcccggttgaatatattgtatcttccctgatagagcaggcagtgcacatccctctctgccagatagcggtatgcgaattcggctgcttctttcgggtatttggaaatacccacatacagggccttgccttggcgcacgatgtccacaagcgcctgcaatgtttcttcgagtggagtttccggatcgtaacggtgcgaatagaagatgtctacataatccagattcatccgtttcaggctctgattaagactgttcatcagatatttcctggaaccccattcaccgtaaggaccgggccacatatcatgtccggctttggttgagataaacagttcgtcccggtagggcatgaatgacttcttcataatcatgccgaaagtctcttccgccgaaccgtagaacgggccatagttattggcgagatcgaaatgcgtgataccctggtcaaaggcgtaatgtgccattgcctgcgaattggagaaggtgtttacatctccgaagttgtgccacaaacctaaagaaacttcgggcagtaatatgccgcttcgcccgcaacgacgatatttcatgccgttgtcataccgcttggaatcgggagagtaaatggggtttatcatatcattcagtttaagtgagaaatgtacttttatcgggaaacaaaaataggcaatttctccggaaaagaccatttttctttgtctaaaagtgagcggattacaacagatgccccgactggaaacaaattatactataattggataagaaaatgttaccggaagtttccggagagcgctatctttgcggggtaacgggaaagaaaggaaggaaaccagttgacgagttgacaaggggacaaggttccatgcggcataggagcattgcgcagccccttgtccccttgtcaacttgtccccttgtcaactttccctcaaaaccctaataataatgaagaaaataatcgcagctatggcaatcggagcttgtttgtgttcctgcggcggaagccagaaggaagtgtataaagattctaccgcacccgtaaaggacagggtagaagatctcttgaaaagaatgactctggaggagaaagtaggtcagatgaaccagttcgtcggtgtggaacatatcaaggcaaacagtgccgtgatgaccgaagaagaattgaagaataatacggcaaatgctttctatcccggctttacggagaaagatatagagaagtggacggaagaaggcctgatcggttcttttctgcatgtgttgaccattgaagaagcaaactatctgcaatctctcgctatgaagagccgcttgcagatacctattatattcggtatcgatgctatccatggcaatgccaatgcaccggataacacggtatatcccaccaacatcaatcttgcctgttcctttgatacgctgatggcctataagatagcccggcagacagcgaaggaaatgcgtgccatgaacatgcactggacgtttaatccgaatgtggaagttgcccgcgatgcccgttggggacgtgttggcgaaacgtatggtgaagatccttatctggtcactttgctgggcgtacagtcagtgaaaggttatcaaggcgatttgaatggcaacgaagatgtattggcttgtatcaagcatttcgtcggtggcagtgaacccatcaacggaacgaacggttctcccactgatttgtcagagcgtacacttcgtgaagttttcttccctccctttgaggcaggagtgaaggcgggagccatgtctctgatgactgcccacaatgagctgaacggtattccttgtcatagcaatgagtggttgatgcaagacattctgcgtggcgaatggaacttccccggattcgtagtcagcgactggatggacattgaacatatccatgacctgcatgctactgccgaaaatctgaaggaagctttttatcagtctattatgggaggtatggacatgcacatgcatggtatccactggaacgaaatggtagtggaattagtgagggaggggcgtatcccagaatctcgtattgacgagtctgtacgccgcatactggatatcaaattccgtctcggccttttcgaacaaccttatgccgatgaggccgaaaccatgaaagtgcgcctttgcgatgagcatcgtgcaacggctcttgagtctgcccgcaatggcattgtattgttgaagaatgacggtgtgctccctctggacgcttccagatataagaagatcatggtgaccggtatcaatgccgacgaccagaatatcctgggtgactggagtgctcctgagaaagatgaaaacgtaactaccatcctggaaggtctgaaaatgattgctcccgatactcagtttgattttgtagaccagggttgggacccacgcaacatggatccgaagaaagtggctgaagctgccgcgcgtgccaagagtgctgatctcaatattgtagtggcaggcgaatatatgatgcgcttccgttggaacgaccgtacggacggtgaagataccgaccgttcggatatcgacctagtaggtttgcagaacgagttaattgagaaagtggctgcatccggtaaaccgactattcttattttggtgaacggacgtcctctcggtgtgcagtgggcggccgaaaatcttcccgctatcgtagaagcatgggcaccggggatgtacggtggtcaggcagtagccgaaattctgtatggtcaggtgaatccgtccgccaaattggctgttacgattcctcatagcgtaggtcagttgcagatgatatacaaccataagccgtcacaatacttccatccttatgcggcaggcaagccaagcactccgctctatccgttcggccacggcctttcttatactacttataaatatgatgacctgaaattggcacagaaagagatcactagggacggtacggtggatgtgagtgtaaaagttacgaatacgggcgaccgtgatggagtggaaatcgtgcaactgtatatccgcgataaattcagtagcgtcacccgtccggtgaaggaactgaaagactttgcccgcgtaccgttgaaagccggcgaaagtcaggtcgtgaactttaagattactcccgataaaatggctttctatgataaaaagatgaagaagattgtagaaccgggtgagttcatcgtgatggtaggtgcatcttctgatgataaagatctgctgaaagattctttctttgtgaaataaaataggagaaataaaatacagttattgcatttttcttttaaggttatatctttccgatggttaggtataacctttctttcttttataacaaatcttaccccataataaaacaaattctaccattcgggattaaaaagaatggttatttttgtgacatgatactattttaaccaatcaatatggaaaactcaaactacattatgagggagattactcccttgtccgaccgcgattgtttttatatcgccgaccgtcgcaagacggagtttacttatcctatccactgtcatgccgaattcgaactaaactttacggaacatgcagccggtgtccgccgggtagtgggagactccgccgaggtgatcagtgactatgatctggtactgattaccggcaaagagctggagcatgtgtgggagcaacacgaatgtacttcgaaggaaatacgggaaatcacgattcagttctcatccgacttgtttttcaagaacttcatgaataaaaaccagtttgacagcatccggcgtatgttggaaaaggcgcaatgcggcattagtttccccatgcaagccatcatgaaggtgtataactggctggataagctggcttccgaagaacagggattctatgcggtgatgcattttctgcgcatcctttatgagttgtctttgtatgatgatgcaaaggtgctgtccagttcttcctttgctaagatcgagacgttctctgacagtcgccgggtgcagaaggtacagaaatatattgccgatcattatcaggaagacatccgtttgaatactctggcggatatggtgggtatgacaccggtttcgttcagccgtttcttccgtttgcgtacagggaagacgctttccgactatattatagatattcgtctggggtttgctacacgcttgctggtggactcggcgcataccattgccgaaatctgctatgattgcggctttaataatctgtccaatttcaaccggatgtttaaacgtaaaaaagattgttcaccaaaggaattcagggaaaactatagaaagaagaagattgtgatatgataatattgtatcattattcttcttcgaaaccacgtacatttgcaacaacgaacaaatcttagttttctaccatgagaaaaatatcacttctttttggatgtctgttgtgtatgcttgctgcaacagcgcagatacgcggtaatgaaatccgtgtaatggtttctcctgatcataccgattggaattatcgtttgaatgacaaatgtacatttaccgtgagggtgctgaaggctcagaatcttttgcagaacgtgatggtggattatgagctggggccggagatgtatcctaccgaagtcaagaaaggcgtattactgaagaatggtgaattaaagttgcaagggacgatgaagacacccggattcctgcgttgcaaagtgacggcacatgtaggtgaccgtaaatacgatggattggcgaccgctgcttatgctcccgaacaattgcagcctattacggagtttcccgcggatttccgtgaattttgggtgaaagagctggaaggcgcccgccggacatcgcttcaacccttgatgactctgcttcccgaacgatgcactgcaacagtcaatgtctatcatgtaagctttcaaacagatcgttggggttcccgtttctacggtgtcctttgtgtgccgaaaaaagaaggtaagtatccggctctgttgcgtgtgcccggtgcaggtattcgtccgtatgccggcgatgtttatacagcggaacaaggtgcaatcactttggaagttggcatccacggtattcccgttactatggagcaatctttttatgataacctgatgaatggtgcattgaatggttattggactttctgccggaatgatttgaggaatttctattatcaccgggtgattatcggtgctttgcgtgcagtagatttcatctgtgctttgccgcaatataatgggcaggcacttggtgtgacaggctccagccagggtggggcactttctgtgatgacggcggcccttgatccgcgcgtcactttctttgctgccgttcatccggcactgtgcgatcatgaagcctttatgaagaaacgtgcttgtggctggccgcattatttctattattatggtgctcccgatgctaaagaactggaagtggtgcgttattatgatacggcgaactttgcccgttgtcttacagtacccggctggttcagttggggatataatgatgatgtttgtccgccgacttccatgtatgccgcttataatgcggtgacttctcccaaagaactccatccatatcttgaaactggtcattattggtatcaggaacaatgggacgaatggctggcatggctgtggaaacagatgggaatagggaaatgataaaattgttactaaaacctgataatatgagacacttattcttattgactcttcttttatcctttttgggtgcatgtactcctaaatctgttgaaaactcattcgttcatgtgaatgcgaacggacaattcatccgtaatggaaaaccctattattatgtaggtaccaatttctggtatggtgccattcttggttctgaaggtgaaggaggcaatcgtgaacgcctgcataaagaattggattttctgaaaagtatcggtattaataatttgcgtgtattggtaggtgcggacggtgaaaatggtgtgaaaacccgtgtacaaccttctctgcaagtagctcccggtgtgtataatgatactattttagccggattggattacttcatgaatgagttgcgcaaacgggatatgactgccgtactttatttgaataactcttgggagtggagtggtggttattctgtatatctgcaatggtcgggacacggtaaggctgtagtgcctgcaatagacggttggcctgcctatatggagtatgtgaaacaatttcagcaatcggatagcgcgaaggtgttgtttgccaattatgtcaaagacatcgtcacaagaacaaataggtataatcagataaaatatgtggatgatccaacgcttatgtcctggcagataggcaatgagcctcgcgctttttccgatgaaaacaaggagcctttcgctcaatggatggcagatgttgccgctcttattaagtcacttgattccaatcatatggtttcttcgggaagtgaaggtgctgcgggatgtgagggggatattgcattatatgaaagagtgcatgcagatccgaatattgactatctgaatatccatatttggccttataattggggatgggtaaaagctgatagtttgaaagaacttcttccgcgagctaaggagaatacgaagaaatatattaatgatcacatggtggttgcgcagaaatataagaagcctgtggtacttgaagaatttggcttccctcgtgacggttttcgtttttctaaaagtacttcgacagaagttcgtgatgaatattatcaatatgtatttgatttgattcgtcaggaccgggagaacggcggactttttgccggatgtaacttttgggcatggggtggttttgctgaacagaattccgaccatatctattgggaaaaaggagataattacaccggagatccggctcaggaagagcagggattgaattctgtttttgcaacggatactactgttgagattataaaaactgaaaatgcaaaattgaaataatatgatgaatatctggaaaagtttgttggccgtttgtctgctgatcgcaatgtttggatgtggggcgagtgcgtctaaaaaagcaaatcaggaaggtgctgcaaagcagttgccccgtctgtgtgtgactggtacgcaattgatgaatgaacagggcgatacggttgttctgaaaggtgtcagttatgggtggcatcagttttggcctcgtttctataatgcttctaccgtagattatctttctggagattggggtgcggaggtgcttcgagcttctatgggagtggacttggatagtgcctgctatgtatacaagccggagtttggcattaactgtgttacgacagtagtggatgcggctattgaaaataatgtttatgcaatcattgactggcatagccataatctgcgtcaggaagaagccaaggaattctttgcacaaatggcaacccgttataagggtgtccctaatgtgatttatgaagtgtttaatgaaccggtggaagatagctgggaacaagtgaaggcttattctgtcgaaattatcaaaaccatccgtgctatagaaccagaggctgttattctggtaggttgtccgcattgggatcaggatattcacttggcggcagatgatcctattaccggttataataatataatgtatactgttcacttttatgctaatactcacggacaatggttgcgtgaccgtacagactatgctttgggcaaagggcttccggtatttatatccgaatgtgccggtatggaggccagtggcgatggtgcggtaaataaagaagagtggcaaaactggctggactggatgcagcaacgttccataagttgggtagcgtggtctgtttcggataagaatgagacttgctcaatgcttcttccctcggcttcttctgacggcaattgggctgatcaggatatgaaggaatgggggcagatagtacgcgatgaactacagaaaaaatagaatcatataatcaattcagacattaaagcaagggtatggaactgatactgttattttgtaaatatagtattagttccagataaaattgtacttgtttgcgccactgatatcatctacctttgtcgtgaaagatttgtgacatattaaatctaataattatagtatgaagaactttatgttgtttctgatgacgctcttcctgagctgtcatgtgatggcccaacagaccacagttaccagtacaattactgacggtacggatggttcccctctgattggcgccaatgtcctggtaaaaggaaccggtaccggttctatagcggacgtaaatgggaaatttagtgtgagtgttccgaccggtaaagatgttctggtaatttcctgtatcggatataagcagcaggaaattaccttgaaggcgggacaaaaagttgtgaatgtggtaatgaaggaagactctgaacttctggatgaagtggtcgttgtaggctatggtacaatgaaaaagagtgacctttcaggcgcctcggtatctatgggcgaagataaaattaaaggctcgattattaccaacctcgatcaatctttgcagggacgtgccgctggtgttacggcggtgcagacttcgggtgccccggggtcagcttcctctatccgtgtacgtgggcaggctaccattaattccaatgccgaaccactttatgtgatagacggtgtgatcgtgcaaggtggaagtaccagtggctcttctttaggctttggtgatgctctggacaatggtactacgtccactatttccccattgtcaaccattaatcccgctgatatcttaagtatggagattctgaaagacgcttctgctacagctatctacggtacacaaggggcgaacggtgtggttctgataactactaagagaggtagagccggtgaagctaagttttcttacgatggtatgatggctgtaagtcgtcagaccaaacgtttggatatgctcaatctccggggctttggaggttattataatgattttgtggcttcaggcttcggtggtgtgaaagaagatccttattatagtgatgtttctctgttgggagtaggtactaactggcaggatgccatttttcaaacagcttttcaacaacaacatcaagtgtcggcacaaggtggtacggagaaaatccagtactatgtatcggccggttatatggatcaggaaggtactatcatcggttctgatttcaatcgtttgtcgttgcgcgtaaatttagatgcgcagttgaagaaatggctgaagttgggcttgagtgctacatttgctgattctaatgatgacataaagctggctgatggtgccgaaggtattgtcggtttcgctttgacttctttgcctgaggctcctatttatgatattgatggcaactatgcctcttttgcccgtgagaactacagcattcataatcctattgccaaggctatggagcacaataatatgttgaatcgcaagaaactttcaggcaatatttacgctgaattgacacctatcaagaatattacatggcatgcggaactaggttatgatattggttacagtaaggcagaagtgtataataacgctatagacttgcctaactggaaagaagctaatgaaagtagtattcagaaaaataacaatactttctggcagttgaagaactacgtgacttataataacacgtttgccgagaagcattctgtaagtgcaatggtaggtcaggaatgctgggaaagtaaatatgactatactaaagtcgctaattccaatctgccttccgatgctgtacataacccgatgctgggtaccaatactccgaccatcggtgctggttttggcagcagttccatggcttcgttctttacccgctggacctatagctatgacaaccgttacaatgctacctatacttatcgttacgacggttcctcaaacttcggcccaaacaatcgttgggcaggatttcactctttcgctctgtcttggcgctttactaatgagaagttcatgaagaatattaaatggattagcaatggtaaattccgtgctggttgggggcagactggtaattccagtattaattcttatgtgtggggtgtgaatatgcaacaggtgtatacctcgcttggagccggttaccgtccgcagaatattcctaatctggatgtgaaatgggagaaacaagaacagataaatctgggacttgacctcggtttcctcaatgatagaattaatgtaactctcgattggtatcaaaaggaatccaaggatatgctgatggatttgcagatgcctacttacatgggtacctcgggcaatgataactctaaactgcgggcaccgatgggtaactacggacacatccgtaataccggattagagttgacgctgaatactcacccgttggttggtaatttccagtgggactcagaattccagatctcttggaataagaataagttgatagccttgaacggtacagccagttcggccattatgggttatgcgcaatggggaagtacattagtaagcctttctgatacaggcgaaagtctctactctttttatggatatgtgacagatggtatttatcaggaccttgccgatttgcaaacttcacccaaacctgtgaaatatccggcgaatggagtgtttgatggtgctaatactgtatatgtgggtgatattaaatacaaagacctgaatggtgatggtgtgataaatgagaatgaccgtaccaatatcggttcacccatgcctaaattcacatttggatggaacaatacgttccgctataaaggcttcgacttgagtatctttatcaacggaagttatggtaataaagtgatgaatcttactaaacgcaatctgactactatgagttctccttgggccaatcaacatgctgatgttttgaaccgtgcccaattggaaccgattgatccttctattgtatataccgatggtacgaagtggtacaatcatgtggagaatgtacgtgttgccaatccgagtgcttctttaccgcgtgctattatcggtgaccctaacgataatgaccgtatcagtgaccgctacgtagaagacggttcttatattcgtctgaagaatctttcgttgggttatacttttcctaaaaagtggatgagcaagtgcggtgtggagaatctgcgtgtttactgtaatattcagaatctgttaaccattacaggctatgatggttacgatcccgagattggtgtcagcacaatgtcaccgaatgtatatggcgtggattttggacgttacccttcacccactacttactcctttggtttgaatctctctttttaaccgtttaaatagaatacacatgaaagtatcaagacttaaatatatagcaatgggagcgatactgggattatcttttgtatcgtgcgaggattttctggacagacccaatgaagatagttacaacgatggcaactatttccaaaatgatgcccagaccaaagtaagtgtcaatacactttacaattcaccgtggtacgactttttgagtcgtgggtattacaagattcccgaagctttgtcgggtaacttgctcttgggtggaagtccctatgccaattttacggtaaatggtagtgacgaagatatgaagagtacttctaactcattgtgggctgtcaatgcacaggccaataccatttataaccgattaaagacagccaatgcctcagaaagtgtgaagaatactgctatgggtgaatgcctggcctggaaggcgatggcttatttctatctggtacgtatttttggggaagttccaattgtacatgataatagttcggaaatagcagcaggcaactataatgaaaagtataaggtgaaagctgccgacatttatgaatatatcattatgactttggaaaaggctattgaattactaccagaggagaatcaggccggacgtatagacaaatgggctgctaagggactgctggctaaagtctatctgacaaaatccggaatcaatgctaatggtaacggacaacgagatgctgacgatttggctaaggctgccagttatgcaaaagacgtcatcaataattcaggcaaacaactgatggccaattatgaggatattttcaaaggggagaatgatctttgtgaagagagtttattcggctggcgttggactgccgaacaaaataattatacttgtggaaactgtctgacctcggaacttgccatgaagggctttgaaacataccaatgttggggtgactggactgcaccttccgttgacttacaagatgcgtttggtgtttctccgcttgataatcctactcagcgaaatcagagtgatgctcgtcgcaaggccacaatgatgatggctggtgataagtacagttactggtggcaggacaagggaggatttaattatttggatttcctgtatgataaagaatatgcaccaggctctaatgatggactgcaatcgggtaccggtgccaatatcgccaaacatctttatggaaatacaaacgatcatattaaaacttttggtatcagcccggggcagcagtgcagttcactaaatactcatgtactccgtctggccgatatatatctggtttatgccgaagctgtaattggtaataacaattctactacagacgcaagtgctattgatgctttttacaaggttcgtcaacgtgctgtttctgcttatgaaagacccgccagtattacacttgatcaggtattgaaagaacgccgtttggagctggctttcgaaggtgactattggtttgatcttgttcgtatgtcctattacgatgttaataaggctatgaatatcattaaagcgcagcgtcgtaatggctattatggattgcccgacctctacaaggagtataagatgaataatgtatggaatgtggatgaatcttccatgtactacgaaaccaatactccgaaaccgaatgtaaccgcatctatttttaaacttcctcttcctgacgaagatgtggtgtataaccctcatttattggaagatgctcagcacttggatgtaagagcagagttcgtttattaatcagttaaacagtaatgaatatgaaaatgaatatatatttcaaagggttggtagtaagtctgctgctgattgcgggaatgtttacttcatgtgaggaccaacctgataagtttgagcttaccggtggtctgccccaagtgagttatatacgtatgccttatttggcacaatcggactctctcatcgtggaggcaagcctgaaatctattatttgccttgtgggtgataaccttacaagtatcaaggaactctattttaatgatcaaaaggcacagttgaataccagctatatcacatttcatactatgattgttcagattcctgataatatacctgaagaagtgagtgacaaaatttatatggtgactgccgcgcaagatacagtagaatatggtttccatgtgatagttcccaagccaatgatagcttctatgtcgtgtgaatatgccaccgccggaagtgaagtgactctttatggaaattacttcattgatgatcctaatgtaccgcttactgtaactcttcctgatggaaagcaacttactacgtttacaaagctcactaatagcactatcactttcagaatgcccgaatgtgatacagagggttctattcgtgtagcgtctatttatggcgagagtacttctacattccactatcttgattcacgtggtcttatgttcgactttgacggaaagactggtttgagtaatcacggttggcacgaaagagaaatcaagacggatgaaacttcacttacaggcaactttgttcagttgggtgacggtacatcgaaaatgagtgtggacggtgcttggaacgatgctgtatttgcattcgaatattggtgtggttcgtgggataaattgcagaatgtgacatcgggcgacggcattgcattgcataatctggtagatttcacagattttgctaatatggccttgaagttcgagatgtatattcctacgtctaatccgtggagtgcgggtgctatgcaaatttgttttgcaggctatgacaaggtgacactgagtggtaatccgatagaaggctttgatggtgttgttgcaggagccaatgccaaggtatttaatggagaagatggtttggggacatacggtcgtgcgttgtatcgtccttggatggataccggttcttacgataccggtgataaatgggtaactgtaaccgtgcctatttccaactttactctcgaccgtttaggagcagcggctgaaagtgttcccagttcaccgggagattttgccagtctgacattctttgttgtaggcggaggagtgaatggtacagagtgtacgccgattatcaagcttgataatatccgtgcggttcccaataaataacctttaaagatactatagatatgaacaagacatataaactttcggcactttggatgatgtgcctcatactcttgggttgcttgtcattttcggcctgcgatgatggagatgaagaagatactaaccaatataaaggtggtatcagtttgaatgtgtttggtcccagtcctgtagcccgtggcggtgaactccgcttcctgggtagcggaatggacaagatacaatctatatctattcccggatgcggggagattactgatatagaagtaatcagtgcgaatgagatacgtgtaaccgttcctcaaacggctgaagtgggatatgtcactctgaaaacacctacgggagagattactacaaagactaagattacttataccgagtctataggcgtagagacgattacacctaatccggtgaaaccaggcgaagtacttgtcatcaagggtgaatatctgaatcttatcaaagaggtaatcttctttgaagagttgccagtgggtgaggacgacttcatagctcactcacgcaaggaaattcaggtgaaagttccaatggaagcaagaaccggtgacgtgactttggctgatgcttcttccgaggattccgatgctttgcgtaatttaatccatgtgaagggacttgttgttattttgccttctgtagaagcaccgcttgatctgacagcaaagaaaccgggtgatgagattgtagtgaagggtaaagaccttgatttggtgaatattgtgaagatgccgaatggggaagaagtggaatttgattatgccaaatcaggggaaggtgaagaaactatcacatttatattaccagagaatgcaacgaatggcgctgttgtgatgattcccgcttcaggtgtggaagtagctattgccaacattggcatggcactgcctgaaaaagtggtagcaactccggatagcggactgcgcggtggcgacatgattacattgaccggtatcaacatggaactggtgactactgttacattcccaggtgtggaagaagctgtggaacctgcttcgaagagtgctaccgaggtggaagtggtgatgcctgtcgcagctatcagtggtgaattgttattgaatacggcaagtggtacttctgtaccggtggctattaccactctaaaacctgaattcatggcatttgtcaatgatgtcgtttctttgggcggtgatgtaactattcagggtaaaaatctagatttaatagctaaggtcgtttataccggtggagccgaagtggaagttactccaacctctactacggagttgaccatcgctatgcctacaatgggtactgaatcgggtgtattaaccttggtaatgagcaatggggagagcgttgaaacaacgattcttactatcaatgtacccgaattttgctacattcctgtattgccgggcgaagatgaagaactgaagggtggagagatatttaccattgctgtggaaaatggcgacaaactgaccggtgtggaagtggacggaaaagttgtccagtttattatcaatggcaatacacttgtcatagctgttccgcagacagccaatgccaatacaaaggtgaagttgatatcggccaatggatcgatagaatacgccatcgcatttgttcctgccaccaacatcaagaatgaagtttggaaaggtttggtcgacataacttggaatgagggaggccgtgtcatcatcccggcttctgccttcaaggatgtgcctgccggtgcccgcatggtgttgcattatgcgcaaaagatagacgattggggacaggctcaaatcaattatggtgatttctccggcatcaactttacagagggtgaatttaaggttaatggaatgttagtccctaccgatatttatggctggacatttgccaatcgttctacgcctttggtgttgacacaagaaatattgaataacattcaggccaaacagaaagagtgcgaaggcatcaacgacgcgggtattattatccagggagacaaattgacattcagtagcgtgacgctggaatgggaaatctcgcttgaacaggatttgaaaaactgtgtagtgagacaggatgatcaatctgttttgatgcctttcccaattgctgtgacttgggatgacgcaggtcgttttcgtattttgattgataaggaaccttccattaaggacatgaaactggttgcaggaaaatctgctatttatttttatgtaagcggaacaggtcagttccaaatcaatgatgcgaactggacagcactcacaacgattgccgaatggagcgatgcatctgcccgtgttatggaattactgcttactcaagagatggttgattgcctgaaaggcgtgagaggggacggttggagttccacagggttgctgattcagggagatggaatgaccattagtaagataaccatattaccctaatgtttaaagattgaatattatgaaaatgaataagatatgggctgccctgtttgtggcaacagcctttggatttgtatcctgcactgatactgatgcacaatataccattcccgaagtggaggcacctgtactggtgtccaccactccggaggcgaatgctgccaaggtgaagagaggcgaaatcaccattgaggtgaagtatgacaagaacgtgttctttgctacggaagacttgaagcaaatttcgtttacgggtggcacgctgattagtgctgatgtatatgggtccagtaatgtactgacactgactgtagaagtacccacacgcgaaactgtgtgttctctctctattcccgaaggtgtagtgctggggccgaataagacgcctgctccggctgtatctcttcagtttactaccgttgctttggataaatcgttggtaaatgcttctgctactcctgctgcacagaaagtttatgcatacttgttagaaaactttgagagcaagactctttcggctatgatggccaatgtgaattggaatacggaaaagtcggaacaggtatatcagtggacaggtaagtatcctgctgtcaattgttttgactatgtgcatctgtatgcttctggtgcaaactggattaactatagtgatattactcctgtgaaagattggtggaatgccggtggtttagtgtctgctatgtggcattggaatgtgccgacaaaggcacctgatgttttctctgaggggctatggacgggcgaacaggctatgcccggtgattggagtggaaatgttcagttgacggatgatgcagcaaaagctgcttttgctgaggcacaagtggggaataaagtgagagtaactgtaaaagatatagctgcgggtgcacaaggctcttttaaaaatagtagctggcttgaaatcgctccaggtatggattattttgatattacaggtgactttgaattggagattaccgaagctgttctgacatctctgaaagatggtggtttgattatcggtggtcacgactatacggttactggcgtttatttggaaggtggttcggcaagtgatactaaatatgcattctatagggaagatacggattttgatgcagacaatgctttgactgagggaacttgggagaataaagtctttactgaagatttggctaaagttgcggctaatttaaaattgttgcaagatgaaggcattcctgtaatttggcgtccattccatgaggctgccggtggctggttctggtggggtaagaatgccacaagcttcaagaatatgtggattgccatgttcaactactttaaggcagaagggttgaataacctgatctgggtatggactactgaaaccggtgatgacgattggtatccgggtgatgcttatgtggatattgtgggacgtgatatttatacgaaagatgcaagcacttgtgcttcagattatagttctatagtagtagcttatggcaataagatggttgcattaagcgagtgtggcacggtaggcaagatttccgagcaatgggcagccggtgcacgctggtcttggtttatgccttggtatgacgcggaagacgcggaaacgccacatgctgatcaggcttggtggaaagatgctatggaacaaaatttcgtgatatcccgtgaggacttacctgacatgaagtagttggttgatagaggaccataatcagggatcggaagcggctttatcacaagcaggtgaagccgcttttttccctgattgaataaggttggaaagagataaaatagtatcaatatgtctgtaaattatctgctatcttcgcagaactaaaaggatagaagcatgataaacgtaattatgagaaacattagattattaacaatgactttgcttataggaagtcttgtctcgtgtggaccggttcagaaatcacaaaaggaggaaagaagttcagtacgtacctctgaaactgagaacctgcttgccaatcttaaaaaagtatcatcccggggctttatgttcgggcatcatgatgataccaactacggtataggttgggaaggcgacgaaggacgttctgatgtgaagagcgtttgtggagattatcctgcagttataagtttcgacttgggacatatagaactgggtgatactatgagtctggataaagttccgtttactaaaataagaaaggagatattgaatcagtataagaggggcggaatgtcatctttaagctggcatctgcgcaatccgctgacggggggagactcctgggatgtatcggatacgacggtggtgaaatctatcttacccggtggagccaatcatgagaagtttaccggttgggtaagtaaagtatcagcttttatcaattctctacaaacagaagagggggtaaaggttccggtactattccgtccgtggcacgaacatacaggcagctggttctggtggggcgaaaaactttgtactcccgaagaatacaaggcgctttggcatatgacggtggatatccttcgtaacgatggtgtggataatgcactttatgcttactcgcctggttcagaacctcaggataccgcacaatatctgaaacgttatcccggtgatgaacttattgatctgattggcttcgacacttatcaattcgagcgtgatacgtacctcgccaatcttgaaaaatcacttgccattgtggacagcatcggtaaagcgcacaataaagtaattgccattaccgaaaccggatatgaaggcatccctgatccgaagtggtggacggagaccctgttgccgggcattggaaattatccgatagcatacgtcctggtgtggcgtaatgcccgtgagcgtatcactcacttttatgctccctatcccggacagacctcagcagaggatttcatgacattctataataaccctaagacactttttgcggcagacataaactctttgtataaataagaaaaaacaatcaatatggaaacttttaatgagaaggtaacaagactctttcagaagcatgaggcactgataacaagaacgaacgagccgatagaggaaggaaacggcatatttacgcgctataaatatcctgtagtgacggcagcgcacacaccggtattctggcgctatgacctgaatgaacagaccaacccttatctgatggagcgtatcggcatgaatgccgcactcaactccggtgccatcaagtggaatggcaaatacctgatggtgctgcgcatggagggggctgaccgtaaatcattctttgccgtggcagagagccccaacggtgtggataacttccgtttttgggattatccggtcactatgcccgaggatgtgattccggctactaatatatatgatatgcgtcttacagcacacgaagatggttggatatacggtatattctgtgccgaacgccatgatgataatgcacccgtgggagatctatcttcggctacggctacggcaggtatcgctcgtaccaaggatttgaagacatgggaacgtttgccggatctgaaaactaagagccagcaacgcaacgtagtccttcatcctgaatttgtagatggtaaatacgcgctctatacccgtccgcaagatgggtttattgatgccggaagtggtggaggcatcggctgggcattggtagatgatatgactcatgccgaggtaaaagaagagaagatcatagactaccgttattatcatactattaaagaggtgaagaacggtgaagggcctcatcccataaagactccaaaaggttggcttcacctggcgcatggggtacgggcctgtgctgccggactgcgttatgtgctctatatgtatatgacggctctggatgatcctacgaaactgattgctactcccggtggctatttcatggctcccgaaggagaggagcggattggtgatgtgagcaatgtactctttaccaatggctggattgccgatgaagatggtaaggtattcatctactatgcgtcttcggatacgcggatgcatgtagctacctctactgtagataaattggtagattattgcatgaatactccggtcgatggtttgtcttcttccgcttccgtagagactttgaagaagcttatcgacaagaacctgaaattaaacattaaatattaggtatgaagcgctatttttgtacttttatgctcttttttaatacctgatacttaatacctcatatttcatacctatggcaacacttaaagagaaaattggttatggctttggtgatatgtcttcctctatgttctggaagatattctcctattatctgcctatattctattctaatatatacgggctgagcctggcggacacaggtgtcctactgttagtaacgcgcatttgggatgcggtatccgatccgatgatgggaatcattgccgaccgaacacatacgcgatggggaaaataccgtccttatctgctgtggatttctcttccgtttgctgtttgcggtatattgatgtttaccacgcccgattttggacctacagggaaactcgtctgggcctacgttacttacattctgatgatgacggtttatacagctatcaatgttccttatggggctatgctgggagtgatgacggacgattcggatacgaaaaccgtgttctcttcttaccggatgttctttgcctatggtggtagttttatagccttgtttgcttgggaaccgctttgtacatggttcagggagatgactggttcagtgaccgtcagttggcaatattccatgattgtgattgctgcattgtgctttgttgtgttcttgctttgcttcagtatgacgagggaatatgtaaagagtgtctctacagtttctatcgggaaggacttcaagtcgttgttgtccaatgttccctggtggttgctgataggtgcggcattgtgctctaacttgtttaatacggtgcgtggtgctacggctgcttatttctttaaagattatataggtgacagtatctttttaaacttgggtgacttcacgattttgttctatgccggattattcctcggagtgggtgaagtttctaatatgataggggtagtactggccgttcccctttcgcgtgggttgggtaagaagtctacctatattttcacgatggcggcattggcggtattgagtatcctgttcttttacctgccttgcacaccgtttggtttctggttgatgttgataatgcaaatcattatatctatttgtacgggtatcgtttcaccattgatatggagtatgtatgccgatgtttcggactatgccgaactgaaggacggaacggcttcgacaggacttatattttcatcttcatctatggcacagaagtttggcggtgcggctgtgatgtggatattggcgtcattcggctacaatacggcggaaggtgccgtgcagacagcggaagcattgacgggactgaacctgctaatgagctggatacctgccgctgtggctgtggtggcaatgatagtcgtgtacttctatccgttgacaaagaagcgtgtggaggaaattaacaaaggactgaagaaagtgcgagcatcagactgaggattatacgatacgtatttaccgatccgccaaatacgtatgcagcgatctgccaaatacgtatgtggtggtccaccaaatacctatgtgtcggtctgcaaaatacttggagtataagctaactaaaaaactcattggcgaaattcattcataccggtataggaatgaataagactcaccacagattacacagattcacacagatttattaatctaataatcagtaaaatagaatctgtgtcaatctgtgtaatctgtggtgaattaattcataaccctacagaaatgaatcccgccagaagttaaactaaaaacagaatcttatgaacatcacgaatctgcgaaaagagatggaagaagagttagtaggcaacattcttcctttttggctgaacaagatgacagacaaggcgaacggtggcttttatggccgtatctcgggaaccggaatcttgatgccggaaacagaaaaaggtgctgtattgaatgcccgtattctctggactttctcggcagcctaccgtttgctgaagaaagaagaatacctgtctgcggcaatgcgtgccaaacgctatgtgatagatcatttctatgacagggagttcggcggcatttactggtcgctcgattataaaggtcacccattggatacaaaaaaacaaatctatgctatcggctttgccatctatggtctgagcgaatatcatcgtgccacgggtgataccgaggctttggaatatgccgttcgtctgtttgaggatatcgagaagtatagctttgattctgtgaagaatggctattgcgaggctcttacccgagaatggggagagattgccgatatgcgtcttagcgataaagacgagaacgaacgtaagacaatgaacacccatttgcatatcttggagccctatactaatttgtaccgtgtatggaaagatgatcgcctcaagaggcaacttcgcaatttgatagaattattcacggataagattcttaatcctaagacaggacatctggaattgtttttcgatgacaattggcggagtaagtatcgcattgtttcttacggacatgatatagaagcttcctggctgatacatgaagccgctttgattctggatgataaaactttactggaaaaggtagaacctttagttgagtttattgccgccgcagctgatgaaggactgacacctgacggtgccatgatttatgaaacttttctggataggcagaagaccgataccgaccgtcattggtgggtacaggcagaaaatgtggtgggacatgtcaatctttaccaatattttgaagatgaagtagcattgcagaaagcattccgttgctgggacttcatcaagaagcatttggtggattacgggaatggtgagtggcattggagtgtgcgtgctgacggcacggtgaatattgaagatgacaaggcgggattttggaaatgcccgtatcataacggacgtatgtgtatggagataatggaacgtttttcataaaatggtttagaggttagaatgagaagatcgattggattttgtgttgtgttgtggatagggattgcgttacaagcgcagtccctttatcctgatttcagtaagatgaatttcggctgtgatggaaatagcatcacggcgggtgaacaatggtcgaagacggtggtcgatctgcttggatttgccacccatcataatgtagcggtaggttctgcaacctgggcctgtcattccgatacacaggattatggaagtgcaggttttgcagggatatccggtggttggcgtcccacagaagacagctatgaattgcagatgcggcataataatgtttctaaggttcacatccagaaattcattgctgaagtggaaaacgggcaatatcccgttcctgatgtctttgtcttctctatgggcacaaatgacaagaaccttggttctgccgaagagtccttgaaaggtaagactcttgctgaagtggacgttaccactatggcaggtggtgcccgttgggctatacagaccattctggaacattatcccaaatgtcgtgtttttgtttgtacccctattcagaccggtgatgtaacccgcaatgaacgtaatctggagaagattgccattctgcgtgaaatctgccgtgctctttccgtacaactgatagattgttactccaatagtggtataaccgagaaattcgaacagccttcgggcaggggacgctatctgcgcgatggcttacatcccgataaagaagggcaggagttgatggggcgttatatt

SEQ ID NO: 6320 - DNA, 73566 bp, Unknown
  gut microbiota DNA sequence
gaatataattttaggcgcggattacgcggattacacggattcttttcctgtaatatagtgtgatagcgtagccattaatccgtgtaatccgcgtaatccgcgcctaaatcattatcagcatttagttcattactataccattatgaattaattccgccaacaggtgatatagagaatcttttcaagacgccttcttaagcaacttttcgtcaagcaaccggagtgcttccgccttgtccgttactttgaccaccagcgacacatcattctcatcacttccgtaagaaatcatcttcagcggaatattcctcaatgcatccataatccgtgcttcggtttcgatgcacgatgatttcatgtttcctaccacagaaatgatactcatcttatcttccacccatatccgggcatacttgttcagttcccgcaggatgagagaaagaaagttcctgtcatctgtggctacggatatgttatcgttggatgaagtcagcagacagggcatcgtcttatatttggcgaagatatcgaaaatcttgctgatgaacatataaggccggagtgtatggttcgattcgaaccggatgtatgtgatagaatctttggtagcgactgcctttaccatgttttcgttcaatctgttggcggatatataagtcccttctgatgtcggattcatcgggttgagcagacggatgggaatattctctttccatgctgtagccagacaaagcgggtgcaggatttggggattaaagtagatgagccgttcagcttcactgaaactcaggtttcttatggtgtcggcatctttcactaccagtgtatcattgctgtgtatatcgacatctgtccatatccgtatttcctctgcctgtatagctgtccctattagggcagcggtgtagtcacttccaccttgtttcaggtaatcggtctcaccaaaggcattcctgcaaatgcttccctgtgtgagaaacagatgtgtattggggtatgctttacatatctcttttaccttttggctgatatattcctcatccgcttccccgttcataccggtgcgtatgaagtcgaaagcacaaatcacgctgttgtccattccctgctcctgtaagtagaatcccagcaaggtggatgtcagtaactctccttgtgccagaatttccttttcatcggtagagtagaaaggttccatactgtatttccatattgcctggaaacagtcgagaatgccccggatggcttcgtgcttgatagtgtcgttcgtaagtagttcattggcaaagtcaatgaactggaattccagtcgggttattttgtcgtgtgcttcctctatgtttcggttgaagaagctggcagctacctcgcccaaatgtttggtaacatctttgggagcggatagtacgactattttagacgtattgtcttgaatcagttttgccacatgttgcatacctcttacggatgcggttgcatttccatcgaatttgtagattctcatattcttctttttttagttattaatcaaatctttttgtgaagcccccttgccatttcagaatgattttatcaaaatggaagggaaactccccgctgcctgtttgctcttttctgctcttatctccttgtacgaatggagttaagctctaaaatcagtttcggggttttcaagctttctactataaaagttcaaaagatgtgccgttcgtattagggaaaagctttatatttgcacaccctgtttttagcatttatcagtttaaaacttatccgaaaaatatgagcaagattttaatcgttgatgacgaggtgcaaatccgtaccctgctggcacggatgatggagttggagggatatgaagtatgtcaggctggtgattgcagggctgccctgaaacagttggaactgcaaagtcccgatgtcgctttgtgtgatgtttttctgcccgatggaaatggggtagacctggtgttggctatcaagaaagctgcacccaatgtggaagttattctcttgacagctcatggcaatattcccgatggcgtacaagccatcaagaacggagctttcgactatatcaccaaaggagatgacaataacaagattattccccttatcagtcgtgcggtagagaaagccgcaatgaatgcccgtcttgaaaagcttgagaagaaggtagggcaggcgtactcttttgattctatcctgggagagtccaaatctttgaaagatgctgttttactggcgcaaaaagtgtcggtgactgatgtacctgtattgctgaccggagagacgggaacaggtaaggaagtgtttgcgcaggccatccattatagcagcaagcgtgcacggcagaattttgtggctgtaaactgttcttcgtttagcaaggagttgttggaaagtgagatgtttggtcacaaagcaggttcctttacaggggcgttgaaagataagaaaggactttttgaggaggcgaacaatggaacgattttcctggatgaaataggtgagatggcctttgaattgcaagccaaactattgcggatactcgaaacgggagaatatataaagataggagacaccaagccgacacgcgtcaatgtgcgtatcatagccgcaacgaatcgtaatttgccggaagaaatagccaaaggacgtttccgggaagacctgttttatcgtctttctgtattccaggtgcatctgccgccattgcgtgagcgtgcaggagatatccgtctgttggcaaaggctttcgtgaagaacttttccgcacaactttctcgcccagtaactgaaataacccctgacttcctcgctactttggagttacaaccgtggaaaggaaatatccgcgaactccgtaatgtgatagaacgcagtcttattgtttgcgaaggcgaacagttgactattgctgatctgccacttgacatccagaatgcccactacgaacagtcggatgaagagacgcctggcagcttcgaactttcggctatggagcgtcgtcacattgcgcgcgtattggagtacacgaaggggaataagacggaggccgcccgtttactgaaaattggtttgactacgctgtacaggaagattgaggagtataggatatagcttgtattcacaatcagatctgacatgataataagataccaaaatgggaagttttgctgctatatgttgaatttttatcgttattaataacaagcgttcctgctggaaagctgcttctggaagaatataacattagtttataaggattatatcatctattggcagcccacagatgatctattcagcccatatatatcatctgttttaattaaacagatcatcaatttcactcaaacggatgatgtgattcgcaaaagggctacaccttttgcttcataaggctacaccatcatcactaaaaggttacaccatcttccaaaaagggtgtagccttgtcaaaaagcggtcgatatttctttatttcaaagaagataagcaacggaatctaataatcgattttgtgggaatatattatatatgcagttaataagaactaaatatgacgaaatcggtttctaaaatatactttctttctcggttttaagtcatattggatttttctaacaggaaatacttgcgtttttttgcagcacaacaagtattggtgcgaaagaaagaaatctcagatatcacgatttacattttgacattttgattaagttgcacaaagtccgatagaaaagttcgacgcatgcaacgggggtattgggtaatccggaatcagacagaaatcgcccaatagtattgtttcttttccttattctttccctcaattcttttcaaaatagataataccttttcattttgaaagggtgctctttaagggagtatcctgattcgcttgttgcataaggctgtttattagatgtttatgagtttatccatccttctggcacgctattggcatataaccttccgataaaataaatagtattaattcaataaaggtaaaaaacatgggactaacgatttcatttattttctgcctgctgagtggcttgttcgctttctggctgttttggaaatgtgtggactggtttgaaaagatttaagaaggagagagaattatgtatacagcattatttgtattgggtattgcggttttcgggtatttgatttatgtacttgtgagaccggagaagttttaaagtagaaagaaaatgaacacagaaattttaggcgtagcgttgcaagttatcctgatggtggtattggcttatccattaggaaagtatattgcaaaagtctataaaggacaaaaaacatggtcggacttcatgaagccggtcgagagattgatattcaaagtttccggtatcaatccacaggaggagatgaactggaaacagttcttgaaagcattgttgatattgaatgctttctggtttgtgtggggcatggtgctgctggttactcaacactggctgcctctgaaccctgacggtaatgggccgcagagtccggaccaggcattcaatacctgcatcagttttatggtgaactgtaacttacagcattattccggtgaaagcggattgacttactttacgcaattgttcgtcatcatgctgttccagtttattacggcggcaacgggtatggcggctatggcaggtatcatgaagtccatcagtgcaaagacaacgaagacaataggtaacttctggaacttccttgtattgagcagtacacgtatcctgttgcctctttccttgattgtgggctttatcctgattcttcagggcactccaatgggattcgatggcaagatggaggtgaccacgctggaaggacaggaacaactggtttcgcagggacctgcggcagccattgtgcctattaaacaattgggtaccaatggtggcggttatttcggtgtaaactcttcgcatccgttggagaatcctacgtatctgtccaatatggtggaatgttggtctatcctgatcataccgatggcaatggttttcgcactcggtttctattccaatcgtaagaaactagcttatagtatattcggtgtaatgctttttgcctatctggcgggtgtcggcatcaatgtctatcaggagatgaacggtaacccgcgtattgacgaactgggtattgcgcaggatggcggagcgatggagggaaaagaggtacggcttggttctgctgcaacagccttatggagcattacgaccaccgtcacttccaatggttcggtgaatggtatgcacgactctacgatgccgctcagtggtatgatggagatgctgaatatgcagattaatacctggttcggtggtgtcggggtaggttggatgaactactatacatttataattatagccgtgtttatcagcggactgatggtaggacgtacaccggaattcctcggaaagaaggtggaggcacgcgaaatgaagattgcgaccgttgtggcattacttcatccgtttgtgatcctggtaggaacggctctgtctacgtatctgtttgcccatcatcccgatttcgtggtgagtgagggcggatggctgaataatccgggtttccacgggctgagtgagcaattatatgagtttacttcgtgtgcagctaataatgggtccggtttcgagggactgggagataatacttatttctggaattattcgtgtggttgggtacttattctgagccgttttatcccgattgtagggcaggtggccattgccggtttgctggcgcagaagaaatttatcccggaaagtgccggtacactgaagacggatacggtgacatttgcagtgatgacttttgcggttatcttcattgtggctgccctgtcattcttcccggtgcatgcgttgagtacgattgccgaacattttagtttgtaattcataattagtaattagtaatttcataaaatgaaagataagaaatcagcttctttgtttcaaaaggagcaagtaatggaaagcttgaagcaatcattcgtgaagttggatccacgggtgatgattaagaatccgattatgtttacggtggagcttgtgacgctggtgatgctggtagtctgcatcctctcgctgggaactacggaatatggaacattcgggtacaactttctggtgttcgtcgttctctttgttactctgttgttcgctaactttgctgaggctattgccgaggctcgtggtaaggctcaggccgacagcctacgcaaaacgcgtgaggagactcccgctaaaattctgattgatggcaaagtctgcaatatcagtagtgcacgcctgaagaaaggtgattactttatttgcgaagccggtgatacgattccggctgatggtgagattgtagaaggactggcttccattgatgaaagtgccattacaggtgaatctgccccagtaatccgtgaggcgggtggggataagagttccgtaaccggtggtacgaaggtgctttctgataagataaaggtattggtaacccaacaacagggtgagagcttcctggataagatgattgcattagtggaaggtgctacccggaagaaaacaccgaatgaaatagcgctgactatcctgctggcaggtttcacactggtattcgtgattgtttgtgtcacgctgattccaatggcggattatacaaatatagagcatccgggaacgtatatctcgattgcagctattctttccctgtttgtttgcctgataccgaccacgatcggtggcctactttctgctatcggcattgcaggtatggaccgtgcgcttcgtgccaatgtgataacgaaatcgggtaaggcagtggaaacggccggtgatattgatacgttgctgctggataagacgggaactattacaatcggtaaccgtaaagctacgaagttctatgcagctcccggtgtggacgaacgcgattttattgaggcttgcctgctgtcctccatctccgatgaaacaccggaaggtaaatcaattatagaattgggacgggaaacaggtcgccgtatgcgtgatctgaatactacgggtgcccggatgattaagttcactgctgaaacaaagtgttcaggtgtggatttgcaaaatggtactcagatacgtaaaggtgctttcgatgctatccgtaagattgcagagagtgccggaaacagtttcccgaaagaggtggaagatgtgattgctgcaatttcaagtaacggcggtacaccgttggtagtgtgtgtcaaccggcaggtggccggcgttattgagttgcaggacatcatcaaaccaggtattcaggaacgtttcgaacgccttcgtaagatgggagtgaagacggtgatggtgactggagataatccgctgacagcaaagtatatcgcagaaaaggctggtgtggatgattttatagctgaggctaagccggaagataagatggaatatatcaagaaagagcagcagtccggtaaactggtggcaatgatgggagacggtacaaatgatgctccagcattggcacaggcaaatgtgggcgttgctatgaatagcggtacgcaggctgcaaaggaagccggtaatatggtggacttggataatgatcctacgaagctgattgaaattgtggaaatcggtaaacagttgttgatgacgcgcggtacgttgaccacattctctatagcaaatgacgtggctaaatactttgcgattattcccgctttgtttatggtagccatccctcagttggcaccgctgaatatcatggggctgcatagtcctgagtcagccatcctttcagctataatttttaacgctatcattattcctatattgattccgttggcactgaaaggagtacagtataaaccgattggtgccagtgcattgcttcgccgcaacttgctgatttatggcttaggcggtgtcattgcaccctttatcggaattaaattaatagatatgattgtcagtttattctttcaataaataaaaacagtaatgaaaacattattcaaatcccttaaaataacacttgcattttgcgtgttcttctctgtattctatatccttatcctgtggatatttgcccaggtggcaggtcccaataagggtaatgcggaagtagcgactctggatggtaaagttgtcggtgccgctaatgtaggacagatgttcacaaaagacatctacttctggggacgcccttcccatgccggtgacggttacgatgctaccagttcttccggtagcaacaaaggccctaccaacgaagaatatctttcggaagtagaagcccgtatcgatactttcctcgtacaccatccttatctgaaccgtaaagacgttcctgcagaaatggtaaccgccagtgcttccggtcttgatccggatatcactcccgccagtgcttatgtacaggtgaaacgcgtggcccaggcacgtggcatggacgaggcacaagtaaagactctcgtagataatgcagtacagaaaccgcttctcggccttttcggtacggagaaggtgaatgttctgaaactgaatatcgcactggaagaagcaaataagcaataactttaggttggtagagaggcggacagattccattcatattttgccatggtgatgtctaaaacagggtgaatggaacgctgcctctcttttttaaagataaccttacttttaaaaagattgaatgaattatgaaaagattaagaaacaatatttttgcgacagcagcagttgctgttgcctgtattttaggaactacaagtgcaaaggctcaggaatttactgtgcagggtgatttagtcagctcttacgtctggcgtggtgtttatcagaccggagcaagtttccagccgactttaggattcagcataggtgatttttctgtgacagcctggggctcgacagacttcgatggtaataaatcttcagaaggactggcaagcaaggagatagatctgacggctgcttatactttaggtgaatcagggcccacactgtccgtagcaagtctatggtgggcaggtcagggagccgggaagtacttcaacttcaagagccatgaaactgctcacttctttgaagcaggtttggcttatacattgccttgtgagaaacttcctttgtctatggcatggtatctgatgtttgccggtgccgataagaatgaggaaggtaagcaaaattattcttcctattgcgaactgaactatccgttcagcgtgaagtcggtaggtttgaatgcaaccgtaggattcgttccttataaaacttatacggtaggatatggaaattccggttttgcttttaccaatgtagcgttgaaagctatcacggctatcaggataacagattcgttttcattgcctatctttgcacaagctatctggaatccatgtttggaggatgcgcatttggtatttggtataacgttgaaaccatgataactaaagattaggcgcggattacgcggattacacggattaataactgcacacagtaagaaattcgtgtaatctgcgtaatccgcgcctaaaaatgaaagtatggacagagaacaaagcgtacagcacttcctcgacctcataaagaaatcccgtcgtggcaagttcaagatctacatcggcatgattgccggtgtaggtaagtcgtatcggatgctccaggaagcccatgagttgctggacaacggtgtagacgtgcaaatcggctacatcgaaacccacggacgtgccgggacggaagtgttattagaagggctccccgttgtcccccgccgccggatattttataaaggcaaggaactggaagagatggatttggagggtattatccgtatccatcccgatattgtcattgtagacgaactggcgcataccaatgtagaaggcagccgaaacgagaaacgttggcaagacgtgatggatctgctggacgaaggtatcaatgtgatttccgccgtcaacatccagcatattgaaagcgtcaacgaagaagttcagggcatttccggtattgaagtcaaagagcgtatccccgacagtgtattgcaggaagcggatgaagtggtgaacatcgacctcactgccgaagaactcattacccgcctgaaagccggtaaaatctataaaccggagaaaatacccatggcattgaataacttcttcaaaaccgagaatatccttcaattgcgtgaactggctttgaaagaagtggcgttgcgtgtggagaagaaagtggagaatgaagtggtcgtttccagtgtaggcgtccggcatgagaagtttctggcatgcatcagcagtaaggagaagacgcctcgacgcatcattcgtaaggcggcacgtctggcaacccgttacaatacttcttttatagccctatatgtacaaacaccccgcgagagtgctgaccgtatcgacctggcaagtcagcgctatctgttgaatcactttaagttggtcactgagttggatggtgaagtggttcaggtacaatccaaagatgtattggatgccatcatccgtacttgtaaagagagacagatcacttctgtttgtatgggcagtccttctttccgtttacctcaatctttgtttatggtgttgaaatacagaaaatttgtgaatgatttagctcaggcaaacgtagatttgattatacttgcataaaatttaattcatcagtgcattatgaatattcgtactaaattaatactcagtgtaggcattctggctggtatgatcattctgctggttgctctctccgtagtgaatcttcagatactgacagctaccgaaccagacagccctgccgccatgcccggactggaacgtgctttgctgtggatttccgttacaggtgctatttgcattcttgccagtatcgtgttgctggtctggcttccccgttccatcaacaagcctattcaggaattgacgcgtggtatccttgaaattgccaatcataactatgagaaacgtttggatatgagcggacacgaggaattccgtcaggtggccgatagcttcaacagtatggctgagcgcctgactgaatatcgtgccagtacgctgaacgatattctttctgcaaagaagtttcttgaagccgttgtgaacagtattcatgaacctattatcggtctgaattgtgagcatgaaatactctttatcaataaagaagcactcaccgtattgaatctgaaacgtgaagatgtaatccgccactctgccgaggaactgtccttaaagaatgatctccttcgtcgtctggttcgggaactgattactccgggtgagaagaaagaacccttgaaaatctatgcggataataaggaaagctattttcaggcttcttacatcaccattataaatacggatgccgatacggatgaaccgcagaacttgggtgatgtgatcctgctgaaaaatatcaccgaatttaaagagttggattctgccaaaacaacctttatctccaccatctctcatgaactgaaaacgcctatctcagctattcttatgagtttgcagttgctggaggataagagggtaggagctttgaatgatgagcaggaacaattatcgaaaagcattaaagaaaatgccgaccgcctgctgggtatcactggtgaacttctgaatatgacacaagtagaagctggcaagctccagatgatgccgaagataaccaagcctatcgaacttatagaatatgccattaaagccaatcaggttcaggcggataagttcggtatccagatagaagtagagtatccggaggaaaaaatgccgaaactgtttgtggatagtgagaagatagcttgggtattgacgaaccttctgagcaatgcagtccgttattcaaaagaaaacgggcgtgtcgttattggtgccaagcgtgagaaggagtttgttgaactgtatgtgcaggatttcggcaaaggtattgatccccgttatcatcagagcattttcgaccgttatttccgtgtgcccggcacaaaggtgcaaggcagtggactgggactttccatttcaaaagattttgtggaggcacatgggggaacactgacggtggaaagcgaattggggaaaggaagtaagttcattatgcgactgaaagcataaacgaataagcccctacaactatcatgggagcatttcatgattgtttgcaggggctaatttattcttatttactttgtacctatgttatacagccagattccatacgtgaaagcgttagcatatttctgtggctttattccatccgggcggaaccattgccctatgtttgcgaacggagtgagaatcacatctacctcactacctttatataaggctttcgtttgataaaccggccctaacatattgttatcaggcttattgatcagtgtaggtttcatcgttgtattcatccgtatatcctgatccatattcacatcatcgttgcaaagttgcttattccataccatgtccagtgagtaaacaatcggaccgcgtacaaaggcataaggaattctatcagtcggttcttccttatacatgatttccccacctgctagtttataggaaacatatttgctatgatgactacgtgatacccatttctcttccatagggaaagtgatacttactttatccccttttgtccacttgcgtgataatttcaggtaagcaccgggctttacatctgcgatgttttcaccgttcacctttatttccggatgttcacaccaggaggggatacgtaggtttaatgttttgttttttgctttctctgaaacaatggtcagctgcatattttcggattccggatagtttccggtgatttcaaatgcgaaatcctttccggtatattgtgagggcatgtattgattgatataaaactcttttcctttttctgcgtaaatgaaggtgggtaacatcgagataatccggtgtccgcttgctgtgcagcaatccggcccgtggaaataaccgtcaggcttacttccattcggagccgtatgatatcgacaaactccgctttcacaatcctgggcggcaaatacatggttaatcatcaggcgttccatggcatccgcatatttggattctccggttaattccaacaactgttgtgtgagttgcatccatgacattgtggcacaggtttccacgatattacctgaaagtggtttcacatagtcgtgttcataatgttcggcaacactcacaccaccggtgatgtacatctggcgttcatgaatgtcgtcccatgctccggacactttgcgcagcaacgttttatcaccggtgatacgatacagtcgcaagaagcccataaagttcatgtggaaagtatgcgaatgtacataaggctgaagtttatccacccctaaagtaccgtccgcaacggaatccaaacgggagaatgcatcccatccactccatttgtcgatgttgctgactacccattggctccattccagatacttcttctttcctgtcagttcatatagtcttgttatggggtcacaaagtaaagtaccttcccaagaatagtgtacactatgccctgcaaagtctgagtgtccgtccagatgtttttggttgttttcaggtgctctcagatcagagggccagaattccagtttacccggtccgaaatattgcaagaaatagtctgccaatttctctgcggcagttagtgcttttttatctcctgtttcttcatatactgtgataaaggcatggaaaacaaaatataattcgtaagcgtccattcctctgactggtctttcgggagaccggaaactcttggctgtggctcctacataaccgtttgcttcctgtgagtcaatgatgcgattcagtacgctttcagctttaattagtaattccttgtcatcaccctgaactgccgacagataagctgattctatccactttccatgctgttctgcctgtgtccagtcccaagccgaatgttgtctgtttacaacaaagtccacatatttatctattggaaagtgtttcaggtaggcattccggttaacttccatacgatgtccgaagaatccggttatatttcttacagaagaaacaggtaccggcttttccagtaatcctactttatcgtgattctgagcattaagcttcgtcatcaaactggcaaatactaaaattgcaataatctttgttttcatactttgatatgttaataatgaattgtttttaatggtttatatgcattatttccaccatattgtaatttcttcggtgatttcacttactggtaatctcacttcccatccgacagtacatttctgcatcgtacaaactttcttacccacttgtactttgtaaggaacaattttgtctgctctgatttgtaataatgttgaatgcccagatttagatggcttagtacccatagcagtattaattttattttccagcataaaatgcgattgtttcccctttctttcaatctttattggtgcttctggtagaaatccgtctcttgacaaagtgagatgatagcgaaattcagaagttataaaactgaattgctgtcttaccccgtcacgcggaataacagacagggaagtttcctctttgctcaataccccaccataggcatggagaccaaagattgaatcctgtattacaattgtgcgggcagtatgaaaggccgcgccatatcctaggtctatctctccatcataacgccaagggccacgcttttcatttctatgcaaccatgtatatccattctttgcacctacaaaacaccatccggtggctccgtctttttcttttcccggataccaatagccatagttggatgtctcgtttcctgtattcattaacgaccatgagctaaggaaagagttatatcctaattcgatccaatcagggttcttcgagtaaagcagaccatagtccagtacagaccaacctcccatcatggccatataagacatgtcgcccgtatgttgcttgaatgcgcaatctgtgccggacaggtaatatttgggagctatccacccgcgtacggacaagcctgcataatgctgttgcttcataaatctttcagcatcttctactgtcaccttcgggtgtgaatgccacgttcttttatttttgtcataccataagtctttatccggtttcatcggatgttctatcgcatatttagccagggcatacgatgattcaaaagctgtgcggtcaaaactatgttccgaacgataaggatatttatcgtcataaataaaatacttggcttttttctcccattcgcctctcaagtatgcagcttcatcgttcctgcctctttgttccaatccttttataagttcaagaactacccattcgttatacataccccatttatagatatccagccaagaccaaatttcatacggatacttaaagtaagccatagcagtctgtacagctcggtcgaaatactcatcggcagtcaggtaatgtgtccattcgggaatcatttccgctatttgtgacatgtgataataaagcttgaaaatatgtggataatcatatgctctccagacttttatccgatcttttgcatcatatttgtatagcttttgtaaggctgaatcacgggctacatgccagttgggtaccccgtagatagcgaatggataaggagtttcttgatctgttcgttggagttttccccatacaaaattcttcaggtagtattctaaggaagctatttccgtagaatcaggatacactacatttttagcggcaacaaaaggtgccttactcaatatcggatcatcacatccccagacgtattcccaccaaccattaaatccgtcggtatcttccggccctcgtagtttcccatatttcatatcatatacagaatacaagccatcccaccatttgcccggagctttatgttgctgtttgttgacaatgaaagagctcctttttttgataagaacatccagaggttccgtagaaaagaattccaggaaagacttttcaccatggttataattgacccaaataatattctctccaaatttgtgaaaacgtatgtcatacaagtacctgccatcgggacttcttccaagctgtttaatttctgtttgttgcggatgttctgctacaagagattgaattgttcctttgagacgaatggcaactcttacagataaatcactgggaatagtatatccgggggcggtacgaacatccagtaatccatttgtataaatggcgttacgtatgtcctcatatcgggaaacggaagtgagtaaaaaactatagtttactttttctccaggtgtcaatactcttgttgtatgaggaatacgccagctgccttcagttttgggaccagtacatccggaatgaagatatgctgtatatacattattagtagtatcaaagtattccagtggagtgccctcaccggtcatcatgatataaaagggacccacacctgatggtttggaaagtatctgaaatgaagaattcagagctatattgtgcttatgtgtaaagttgctctcaaagattgtgcttggagcggcattgaatccttctctccacttaaaggggaaagctatatcacctaattctacagagcggttggtaatatttgaaatctcgattttcaaatgcagaccatcttcagcgagagtgtaatatcgcttcatacataaaggcatatagcacaacgaatcagtatatacatatgtattcttatttatacaagtacgtctggtcaatcccgtttcaagcatattccagtcttcttggttgacacgatatcgtatcaaaatatctccccacatctgattgtctgctatcaggttgacagaatctctgtcaacctgaaaaacagacacgccatcttctgaaaaatcagtccgaaaacaatcgtttttcactgttatattttgggcgttcaatcctgatattgagtagatacacagggctacaagtgtcccggtacatctctttatcattgcttttgtcatataatgaattaaatcttttaatttgcgtaggcaggattctgtgttaattttggattggcatctacggctctctgaggtattgggaacacaatacgatgatcgccctgcggtttatgtgacaaccagcttttcttacagaatatgccaaagcgtatcatgtctctccgggtatatccctcccatacgaactcccaacatctttcatcaaacaggcgtccgaattctattggatcttggttgccgggatctgtgatctgatatttttcaaccactccccatttgtaactggaattctctttcaattcatcgtctgttacgattgcttttgatgggtttgctttaaaagctctttttcttacttcagttactaattcaccggctccgggctgatttgtccttaacaagcattcggctttcatcaatagtacttccgaataacgtaaaagtggaatatctgtgctacaactccattctgaaccggcaggaacttcttgtttattatacctgtatccttccatttcgtttgtataatttccgtcaggaagttctttggagaatattaatagttctcctttcttgtcataaacaccgtataatggatttccttctgcatcaaattgctggcccatcaaccaggtgtcttcaagcctggaatcaccttcctgataggtgtcaatgaattgtgttgtacctttcggcccaccggctgcattgggtactgcgttcaaaaggaatttcttttgcagctcactatgccatgaattcatgaaaaggtagtttcctactactcccctattgtaatcataagggattgtaaacaacacctcctttgaagattccacaccttgagccctgaaggagtctttaaactctggtgacagatcgcattttccgctattaatgatatcgttgcattgtgacagacattcattccagcgggcggtacccgtatagacttctgcattcagatatacattggctaatatagcttttcctgcccatctattaatgcgtccatacatattacccccttgttcttcgttcagggaaggtatcacttcacttagttcccttacaacgaaatcgtaaacctctgctcttggcgttttctccggaagatcctgagacatggtcgttaccaatgggatatcaccaaaattatcaaagagaatccaataatagtaggctcttaaggctcttaattctgccagtccggattgtatttctgcatccgatggggcaggtattaatcctcgttcaattttatcaatagcactattacacaagattacacctgtataatagttattccacaagtctaaaatctgtcccagttcagagttccagttgtggaattgcagacgtttataaatgcctccatcatcccaaccggttgaattggcaggtgttgatatgcaacagccagttaattcctgggtttgccaatacgtgcttacatagccataattcaatgctgcataagctcctgcgatattaggaccgaaatcattgacagtatagttgtatgtttcttctgtaacagatgaaaatactttttcgtccagatcggtacaacttgcgatccctattgtcaataaaaataaagatatatattcagtgaaagctctttttttcataatagttcattttaataaattagaaactcaggtttactcctaaagagaatgtgcgagcagaaggatatctgtatctgtcatctataccaggagtctggccggtaatgcttacttctgggtcaactccgctgtaaccggttattgtggcaagatttgatatgctaccgtagattctaaagctttttatccatttattttttccaatctttggagtatatcctatggtaacattgtctattttccaataatcaccatcctgaacgaagtaacttacatattgcagggattgatcgtaagccaatgggcgtttaccatatacattatcaaaggctttctccataacgttatctcctcccaataatgaaaccggagctgcgtaatgcatttctgccatatttaatatctgaaaaccgaatgctccccgcatagtaacagacagatcaacttgcttatatctgattgtattattccagttcaggtaaaatttaggaagaccgttacctaagactttcttgtcggaatcctgttgctctgaaatgggcttgggattaccatctgcaccttctatgatccagtgtccgtcttcgtctatatcaatacttttgtaaccgtagaaatttccaatcggttctccttcctgcattctatgagtcggttgctgaataggagcaagtgtgtttcctgcattctgataggagtctgagaaatacttgtcactggacaaggataagagtttatttttgttcgttgaaaagttgatacctgaatcccaaatgagattcttgttctgtacgggaactacattcaaagatacctcaagacctgtatttcgcattgaaccggcatttgctgtaatccatgcgctataataaggtggtacagggacttgataggagcctataagatcctttgtttcccggttgtagaaatcaatgcttccggatattctgtcattgagaaagccgaagtcaaggccaatattcaattcttcttttttctcccatcgtaaatcaggatttggattccctcctggttgtaaaagattagtccattgtccgttatagtagccgtaacctcccatatttaatgaatttaaagagatataagccgaaccgggttccgttcctgttataccaaaaccggctcttagtttaagggtactaattgcttggatattattgaggaatggctctcccttcatattccaggctaaggatattgccggaaaattaccccatttgtggtccttaccaaatttagaagaaccttcatgtctcacgctggcagaaatgaaatatttacctttataattgtaatttactcttgcaaaaaatgcaatgagcttattctcaccttgataggacgattggtttgcttttccttctttcagcgcattgcctaaccccatattattatatgaataatcatcggatggaaagtcataattatccatagaagcggattgatagttccatttgttccaactatatccagctaatgcattcagattgtgtgaattgttgaattgcttattatattgagctgttaactccatcatggtattttcattgcgggctgttgaacgtgaagcatacccgttctttttactaattgtggttgatttatgtttcttagtctcataatatccggaaaagttgttgtatgtctcatttgaaatgaggaatttaatatccagcccctcaacaggaataagggttatggctgaataggctcttaagttcgttgatttattctctccttttgtttcgttcagaagggcaaccggattaaaaatcatatcacgtgctatttcagtccaattaccattttcatcttttataggacttgtcggattaaaaatcaatgcactctgatatacatcattactgtatccgatgtcgtacttcctttgatagccattcaaatttgcctctattttaagcttgttgtcaaacatacggtgaacaatgttgatacgaggataaatcatatctacttttgagcgttttacaattccctcattcgaggtataatcgaagctggctatgtagctggtgtttgctgatccacccttaaggttaatactgtatgtctgattgaatggagtctgtaatatttcgtccatccaatcaactctggctccgttatccattgcaccggggattccttgttggactttatccagatattgggcaacattcatcatagggagcttcttatttatcttctgaaacgaaatatagctattgacttcgattgatggcttcatttctgtttttccacttttggtggttatcagtattacaccgttggtacccctagttccgtaaatagctgcggccgaaccatcttttaatatatcgatttgtgcaatatcattcggagaaacgctgttaaggtctccctgaacaccatcaatgatgaccaaaggaaaggtgcctgaattgagcgtagcaacaccacgcaacgaaacttgtgaagtggacaatggattggcatcaggcgaaactacagctaagcctgcaaccttacccctgattagccctgctacatccggttttgttgcttgtacaaactcactggctttcacactcatcaccgagcttgtcagttcctccttgcgttgtgtgccatatcctattaccactacttcatccagccgcttggcgtcttcttttaataccacttttacagatgcttgtccgtttgtctgcacttcttctgtaatgtaacctatataagaaattaccaatgtacctttagctgcattttccagcgtgaagttaccgttaaggtctgtaatagctcctttggatgtacctttcatcattacggtagctccgatgacggggtctccgttttcatctactacctgtccctttacagggttggattgcatgactgcttgtacttcatttaccgttgcaaaagcatcctgtgggtagcccgcatagagagcggataccatcatcacggagaggagagttttctttgatgatcttttaaaatgatagttcttcatgaatttgaatttaaaattaaaggtttctttttctttcgatagaggtgagctcatccatctttcggcagcaaaggaaaacaaataagagtaaagctgttaatgcttataaatcaaatcatagggggtaattaatcaactctaaattgactaattaccccctatgatctgagcaaaattacctgaaataatcgggtgctttgctgcttaattaagatggatgagtactttcttctttcttctcttttatctgtttctgatattcaccgggcgacataccgaacgcttctttaaacgactgggtgaaattcttataatcactgtagcccaatgctgtgataacatctgccacagttgccgttttattttccaacatccggcaggcatgttgcatctttatatcctttataaaatccaacggagttttgccagtgattacttttatcttccgagaaagtgtggaacgggacatattcatagcctctgccagtgataccacattgaattccggttcattcagatgttcttctaccgctttggtcgcccgatccagaagtaacttatctatctcggcaaattcagaggtggaaatgctgtctttggtatccaggtattgatgcattttcaccaactcggcactgtccgcccatttctcgtcgttcttgcgtttcatccgtttcagataggcataaatactatatcctatgatgcccataactagcagggtataaaagagataagcccaccaggtttcgtaccaggcaggtaggcggtggattgttatctccgtcacctcattactccataacccgtttttatcggtagctttcacctggaatgtatattttcccttgtccaatctgttgtagaaggcggaattcttccggtcatttaggtagatccagtcgttgtctatacccaccatccggtatgcataacgtatctggtctaagttatgaaaatctaatgaagagaattcgatttccagattctgatcattgggtgacaggcggataggtgtatttatagggtcttgcttcaactggtcgtcccaaatgctctttcccatgatcttgatgtcactgatatgggtggttacctgttcgggtatgctttccagttgctgggttggtgagatggacacaatgcctgagattccgccgaaatagatttctcctttccggtcgtagtagacggctttggatagcagacgggtaaggaggaaattcttatccctggtgctgtaactccggtaagcaccattgcgcgggttgaactctttaatcatctgattggtagtgatccatacatgattgtagacgtctacagtgatattattgatgatatcccccttcatgccgcaactgaaactgtagtctttcagtttctccttttgtctcgggtcgaacagtaagacttccccttcggtggtacccatccagaggtttccgtcacttgtggcatctatgcatacaaagtctttatcgaagggataagattcgatacctttatcctgctcaatccggtagatgcctttgtttcggatgacagtccatatccggctgtcggctgtttgggtgatgccggcaaccggacccgatacttccggaatgctttcaagagttgcactcataatccggtatacgaacaatcctgtcgtagtacctatccatagattattctgagggtcttcgaatagtgaggtaatcagtcccggattatttgtgacgttgccaagttctatccgtacatcttctttcatttccatattctgctggcttaggccgaagacggtggggccatacgaagtagcccatatccagttgtggttatatgatctggctatgttggtgacatctccaaatggtaaattccgggttccttgacattgtgaatagtgtttgagcttttctttccggctgtcataaatgcataggccgtatcggtcttgtgagaaccagaagataccgtcttcatctttgcacagtgaatttatggcgggattcgcctttaactggtttcttaaatccggcaggggatacttctggacaatgtaatcgcggatatcgataataaagctttctacatcgaaagccgatacccatagcttcccgcctttatccttatatatttcataaagtattttgttgccgggggtaaggaaagaggaagtgtccacttgttctaagtgtccctcctttgtgatgcggaaagcaaacaagtctttccaggaagtgacccatatatagtggaatacatcatcctgcaccatgtggtagatagctcccgtagcatttcctgtaatatctacagggagaggctggggaatatattgtgtttccggagatttactgttcgggtcgaagcgtacgattccttttccccaggtgccgagccagtaatatccgtttgtttcgtcccagatgatccgttcaatgtccatataatccctgtggtggaagtaggcttcaaagttgtccgtatctttattgagtttatacattccgcctcgggtgagggagattattaaatccccgttcttgtcttcgtagacgatgtacacaaattcaggagagtggttgtattcggttttataccgctttatcagagtgccgtcagccttgaaccggaataatacgccatgcatgcttacccatatactcccgtcccgggttacgtttatagtgaatacattcttgtcggagcactcctgcaaatccatgggagtgatccggcaggtagctttatccagtatatagcctcctttcatggttccgaaccagatttttttgtcgtggtcttcggagatataagtaatataattatccgataagagtcccgggtgatacagatcggagcggaaaacgcggatattgtatccgtcgtttcggcagagaccgttgaaagtgccgtaccacatgtagccatcgctgtcctgaaatatacgatggatggcattcaccggaagtttatctaaggaaggtatttctctgaccacgatatcctgagcatgcagcaaggggctgaatattaaaagacacaagagctgcatcaggtagactttttgtctgataatcatatttgagatggcttttatcatagtatcttttatatatcgatacacaaagatatgaataaaaactcagaaatcttattacctgtaatgaatgaaaaattatttaattgatagttaatacaataaaaagtagagtcagacctaaatccggctctacttttgaggtatacattatataaatcctagcgatatgttattgcattccattccggtggagttcctccttgtaaatggcgtacaaagaaatcatagcgtttatgttccccgaaatcttctcccatcgtgtggtgtgcaccgggaatcactaccaattcaaaatctttgttggcttttatcagtgcgttcaccacctgcatggttgaggcaggatctacattatcgtccagttcgcctaccaccagcatcaggggacggctcagcaaatgggcattctctacattcgatccttccttatattgatctcctacgggatatcccagccagagttcgttccaccagattttatccatgcggttgtcgtggcagccacaggcggaataagcggctttatagaattcgggatgtagcagcacggcagtggtggattcttggccaccggcggaacagccgtagatgcctacgcgatccatatccatatacggatacttctctccggcagctttaatccaggcgatgtgatcgggaagtcctgcatctttcagattcttataacatacattctcaaattcacgtgaacggaaagaagttcccattccgtctaccatgacgacgataaaaccgagttcggcaagggaagtcatgtaccagttgtacgggatgaaagtcttgggtacatactggtcgccgggaccttggtaaatgtattcgataaccggatacttccggttcgggtcgaagttagtgggacgaacaatcagtccccacatatccgttttgccgtcacgccccttggcggtaaatatttccggtgctttccagccttctgcttccagacgactgatatcggctgtctccagcggcatcaccaccttgccatcttcggcactgcgcaatacggtaacaggagctttgtttaccatagagtaaacgtctaccagataattcatatctcccgagaaccaggcacggtgcattccttcttccggagtaaggcaaaccaagtctttcccgtcaaaaccaatgcggtaatagcggatgagataaggatcctcaccgggttgtacaccatttgcggagaaataaatctgccggttgtcctcgtctacgcggagcacttcgcgcacataccatttgccgcgggttatctgatggacgggttgtgcggtagagcggtcgtacatgtacaggtggttccagttatcccgttcgctcatccagatgatgtgcttgttatcccttaggtcgtggcggaaacggcgggtataattcacgtatttgtcgctggtttcttctatcagaggatgtacggtgcctgtctcggcagagagttcaagtacacgatatgcctgatgtccgcgctggttgtattcgaaggtaacggaacggctgtccgggttccattcgggaccgtatatttcatactgccggtcgaagaggtcggtgctggggatgatgcctcgtcctgtttcaacttcataaatgcaaggtatcttgaaaggaagttcgtctcccggtttggcatattcctgcttgtgcagtttcggttggagctgatctgccggagaagactctacatagtacacatagcgtttctctactgggcggattttgcaggatgccacttttttgctgtccggagaccagcggatataaactgagtaatagttgctgagtgtaccgtcaaggctcaactgcttctcttttcccgtggcaagttccttcacatatacattctgatttttgatataggcggtatactttccatcgggtgaagttacgggagcggcttctttttcgtcatcccgttccatccagtgtttttgtggtgcattgcggtcgggcagggcactttcatttaccaactgatttttgtgggtggcgtacatccagcgctgattgccaaaaataaaacgaagcgtatctaagctcggattcactcgtagccgttccagttggattgcttcgggctttacttctttgccggatgcgttgctcagtgcgcttgccagacgcttgtggtcgaacaactcctttctgtttttcttgtctgcgttcaccgatacgtagatacggccttcgggcgtattgcgtacataccagaactgatgtgtgccttctatccactgcggcgtgacgctggagtagaaaactttgttggcactgaatttctctctcaatgcgtaggcacggttataatcgtccactgtgccttgtgcgaaagccatgcccccgctaaggagcatggctatcgacaaacctaacttacaaacattcatatctaacgaacctttattgtacttcccattcataaacacctgctgcatttttgtccggcagggtgatttccagttttactgatttggtcttcacgggatcaaagtttacggtgtttcccgcaccttttacaacgccatatttgtcgacacctgtgacgggttgccactggccttgtgcatctttataatatatcttccagcttttcggtacacgacaaccgccccagggagcatcgtcgaaccaatatatggtggagcttgatacggtagcttctgccgggaactcatacgtgatccattccgtagttccctgtttgggccaccaatggtagtagggcagggaacggtcgttctcatctttcggaaccaggcggtcgttgatggctgaaatggagcttgcgcggtgggatgcgtctattttactttccgaagccagtgtggcaggcatggcggggcgggatgcgctcagctcttgtggcaaccatacttccatagctcccgaaccacggtgggcccatgcgtagtaaggtatcagtgtcaggttcacatcggtagtggtcaggcgaccctgatcgtcatagccaagtgtctgtgcgccggtcttcaattggttgatgccatacagtagatcgggcttttccaccacttcaaacttcgggttgcggttcatgaatacgctgaagatgtcgaagttgttatccgggaattctgcacagtatacaatcggtccgcgttctacggcaatgcgtccacggtcggcttccaccttattgttggctttcacggtacgcggttccatgtcgaagtgtacttccaccttatcaccctttttccaacggcggtcgatgcagaaataaccatctttcagttcattctgtacgacttctccgtttacttttactgtgtatttcagacgcttgccgtcactataggtatacaggtcgctggggactacctgaccccgaacccatccgggaatacggactttcaggttgaactgtccggcgttattcttgttgatgccgatggtaatgtcaccgttccacgggtatttggtggtttgctcgatagaaacggttttgccacccactttcaggtcggaagtattggacatgaagaggttgacgtaaacgtccttatccttcacagcgtagatatatcccggcagggacgggatgaaacggcagatgttggacgggcagcaggcacaaccgaaccagggctggcgttgatgctgtcccatactttccagcgggttggggtagaagaaaccgccaccgtctagggatacgcctgaaatcagaccattgtatagagtgcgttccagtacatcgtagtatttggattcaccgtgcaggaggaaaagacggtagttgacgtacacgttgccgatggcagcacaagtctcgcaataggctgacatgttgggcaattcgtagttcttgccgaaagcctctccggctgctgtagctccgataccgccggtgatgtaatatttcttgccaacgatattgtcccagatgcggtcgatggcatgaatgtaggcggtgtctcccgtcagggcggctacgtcggccatacctgcatacatatatgcggcgcgaacggcgtgtcccacagcttcatcctgttgaaccaccggcttatgtgcctggctgtattcatcggtacgactggtatatccacgctggtcgaggaagaacttggcctggtcgaggtatttctggtctccggtaaccagataaagtttggcaagtgccatttcggcaatctgatgtccggggacacggatttgctgtccttcgcctgtaccgatttcacggcatacgcagtcggcatatcggatggcgatattgaggaagttcttctttccggtggcctggtagtgggcgatggcgccttccaccatgtgccctaggttgtagaactcgtggcttaggtcttctaccttttcccagcgtttgcttcccgcccattcatggggatgtttcggattcatggttcggctggtataaaggtatccgtccggttcctgtgcggcggctacaatgacgagcacgctgtcaatgtatttggccagtttcttatcgggatacgtctgtaacaggtagctggcaccttcgatggttttgtatacgtccgtatcgtcgaaagccagtccgcctactttaatggtatcactagggtgggctgcgttgacgaagttctggtatcttccggtttcctcgcatttgctgaatgccaaggggatggttacctctcggctcgcgttgagacgttgtccccagaaggagtcggttactttcaccgaggtgaaaggtacgggatcgatgggatacccgtgcgattggtttttcacttgcgcctgactgcctacggtggcggcaaccagcagggtggtaactaatacttttctcatggttattattcgttttatggtattatttcttgattggaatatattcgtcccatagtttcagtgaatgcaggtagcccgtgaacggccagttgtgttctgcattccgccccaaagttacgtattgtgatggttttattagcaattgaatatctttttcgctaattaatttaccattgatatatacttgttctatgcggccgtcgaaacaaatatagatatgctgccatttgccggtcagctctttcatgtccttgtatccggcatcttcgtaccagccgtagtggttgatgacaccgcatcggggctccgtgccattgacgagcataatcttttccaattcgtcatgcgaagtcgtgaagtcggctacacattcgttttcggcaatagaatcattcagtatccaggcttccaatgtatagggggcattgtccagcaaggttgcaggcagggagaagctggactggaatacctgatgaccatcaaagctgaaacttttctttccttccacttccttaatgatggagggggctttgtgggcttcgaagtatccttctattccatgattggaaagataatgtacggtgtcgcctgcggcgaagtcatcagcggtgatgcttactactaggccacgctttcgctgatcagcagccggtaagcggacgatatccgtagtggtatcatattcctgttcggcaggtgcctgtttccagttatagtagcgcagattagtgatgattaagggttcggctctgctttgaagcgaaatcacaccggatgaaagggcaggttccgcttcgtagctttgccatctacctaacctatgaactaacccactaattgtatgctctttggagggagaaagtaacggatgacggtattctagcgtagtgcccggttcgagaaccagtgcgtcgcgtccgtcaatgcgctcggtgcgaactgatcctactttcaggataaaagcacctcctaacattccttcattattctgccattcgcggccattccagtcggcggctgttagtccgagccattgttggggagcggagtcttcgataccggaaaataccttgaggttccagatagcaccaccgaagccattcttctgtccgccggtataggtgaggcgcacgaagcgggctttggcttttccgaaatctaccattgggctgcctgccagatgattgttccgcttgtcggcaaagatagtccagcgtttaccatctgttgaagtttcaatcaggtattgatagaactgagtgccatattcaaattgtgtccagatcgtttgtatctgttgggggcgtcccaggtctatttcaagccattcctgtcccatgccgcgcggacgccataaagttccgttgttatcatctacggcatattcaggacggaagttgtcatcataagaggaagaggcacgcacgcttttaccagaggcgaggttgtttgatttaacaacggagggggccagtgcacctacgccgtcatgagtagggatgattttctgaatcgtcccgtctgcattgaatgtcatgcggtcgatggaaagctggcggtggaaaccacggttggagtgtggattatcgtggcggtgataaacgatatagtaatcattgccttcctggaggatactgtgatgtccgggaccgtgaatggtaccgtcagcattggtttcgaggatgcagccgccataggtgtaaggccccagaggcttgtctgaggtggcgtattgtacacggtatgtgtggtcgtggcaggaaccggaggaatacataaagtagtaggttccattgcgtttgattacaaaaggtgcttcgaagaaatcggtggcttcggtattggggatgaggcgggtttcagtaaaactctttaaatcgggagctaattttccggcaccgcaaccgaaacctttgtaaatgccccaagttccccagtacatatagactgaaccgtcatcgtccacaaatgtttgtccatccagagtgatggcatttgttacgaagcggtcggggataaggaccgcttcgctattgcccaggatattcttccacggaccacggggagtttcactgactccgcaatggatgatacagggctggcagtaaaagtagtagtacttcccatcagagtgctgcatcacatcgggtgcccatatccagtgactgtcgggccagttcatgggcatcaaggtccagtttacaaagtccttgctggtccatacttgtgcggggccaaagcctgcaccactgccatcggtagtggcatacatataataagtatcaccaaactttttgatagtagggtcggcgaaatatccgggaatcacgggattacccgttcccggagcattgaaagcggcctgtgcaaaggcagagacaactcctattaaaaaggaagtgattaaaaggatggttctattcatattgttactttattgttagaaaaattacttgcaccgcgcagcaaactttgctccagcgctacgctggtcatttatgtatttcattattaatcggtatctctatttcataaaaatattctttcaacagcttgtacatttccggatcgtaagctttcagctttacgcgacgattcatagaattgtgtatgccattggcaggatcagcgtaacggttacagttaaagaaagactgtacacattcagcaaaatactcttctttgttacttaatgcataagtaccggcccatagtcctttttctccagcacttttccacaatacttccagtcggtcgttgaaatccggttccacacctgcaattcctaccatatgtatcagatgggcaaattcatgaatcaaaatattttcgcctgtatatttatcttgtggtaaagccaacagattctcttctccgcaactggcggagaactcatcttccggtgccccaccgaaaccacgggcacgccagttccagtatgcaatgctgtccggcgaattgcagatatgtgcaaactccggtaaatcacaagtatcttcgtctttaccgataaccatcacgtgacaaccttttttcaccatatgcgcttttacatccggacgttttgatagcatcagactgatgatatcacatgcttttagcaacgcttcatcgcttaccttttcggaggaagtgacatacaatccctcagtttcaatgtatttcttataaaaagaaggaatattctttctctcgggtatggacgttacttcaccccgcaccggatataactcaagcttcatcgcgaatcccccgcccgaagctaaatgtatctttatccggctgtttttgtctataatcagtttctctgtacgataatcttccgcttgcttgttcgcattaataccatcagcaaagagtgtggctgtatagcgaacattggaaggcaggaacgaaaagtcaagttctacatcacgttcatcccagtttgtcatcccgccaatgtaccagttgatatctttctttcgtacactgacgatatattctcccattttacctgcggcgataaaggtagaatccgtctccacaggaattgaagtgatgaagtccacacattcctgttcattcagataattcgtcggagcatcgcacagcatggtgagcggagaatcgtgtacaatataagcggccaactgatgacaacgggttcccatactcatcggtgagtaatagacggcacgccagtcggctttcgttgcattgcgcatggcacccggagtataatctactggacctgccatcatacggatataagggaaggtcacatcgtaaagaggcatgttattcttgatatccgtccacttcacctcttccataccgaacaggctctcaaagttgatgatattcggataagtgcgattgatacctgtaggtttgtaaatgccatgaaggtcgagtgtcaacttatgttttgccgtagcatcagcgatacgatataccatttcaacggcagtctgatcgtcacgatccagaaagtctactttgaagcctttgatacccatttcggagtacttcttgcaggcggtttccagttgtttgtcgagtacattgaatactgtccaaagaatgatatcaactcctttctgttttccgtaggcaatcagttccggaaggtccagttccggaatgacagtcagcatatcaccgcttttcgggttataccaaccctcgtcgagcactataaactctatatcattcctgctggcgaaatctatgtaatatttataggtatccatattgatacctgccttaaaggggacacctttcagattccagtcattccaccaatcccaggctacttttccggtctttatccatgatgtgtcacctatgcgattgggagatgccagtgcatacaccagattattaacaggcatatccgtatccttttcagtaacagccagtacgcgccagggataagtacgtgcaccactactgcgtgctatgaaatcactggtttctgttacatactcctgcatacgccaaggatagaaatctgtttgggtagggtaggaagcaaaaacaccttttagcccatatccatctttctgagattctacaaacattcccggatatgcttcaagatcagattccagtagagttaatttggttttaccgcagtccactgtaacgggtaggaaagctactttcggctgtgccttcgatagtggggtaacatcgtatatattttgaaaagccattgccatcggctttttgtcattcgtcgtataaggaagataagctgtataatcttgattaaagttgaaatcggctatttcatctttgactgtaatatctgctgtacgtgtggtatagaaacggtaggctactccatcatcataagcgcggaaagtaactccaaaaccatctatcaacttcaagtcgagttcattgcatgcagcaacgaactccttgaagcggtagaaaggggattctacattatccctgatctttttcctttttataccagttacctgagagttgtttcctatttcggttccgtcagccagaaccaagcctatgttagaaagagagagaattgtatccttttcgtgcattatctgataagataatttgtctccggtactgatttctactttcagttttccgtcgggagatgtcagtgcgtatttctttccggatgctgcttcgagtgaattatttccgcaatacagaaatagggaaataatgactaatttgaaagagaggttgtttttcataattcggttaattcttatttgtctgtttgcaaagtaaaagaaaaaagagcgaacggaaagactgaataatataatgaaataaaagaatagtccaaaagatacctttctgtggccttctgaatggctgtttgtagtattcttgtattcgattggattattttttcattcatttgcatgtacttatctgattcttatttatctcgtatttagggcgtagcttctttgtacctttaaaatgatagttcttcatgaatttgaatttaaaattaaaggtttctttttctttcgatagaggtgagctcatccatctttcggcagcaaaggaaaacaaataagagtaaagctgttaatgcttataaatcaaatcatagggggtaattaatcaactctaaattgactaattaccccctatgatttgagcaaaattacctgaaataatcgggtactttgctgcttaattaagatggatggatactttcttcttttttatctgtttctgatattcgccgggccgaacgcttctttctccttagtataaaaagtagataggaagtaagtaggagtaggtacattccggatatctgtctggttgggtgtagtttttgaatgatcattatatgcgatgaatatgagaagcacttcctgcaaaatattgcagattcagttaataattagtgttacgttcccttttcgtttgtcatttatgggcttattgtgtatagtacctacaggtatgaaaaaataatccaatatatgaaatgattgtctaaatccccttctgaggctttgtggctcgactattttagcattcatatagattattgtttcatcctgttaaaaaagaaatccattactttgtaatacgctaattgcaagaagaattatgaaatccatatctttattacatattatgaatagaataactaaataccttttcggtagtgttgccctttttagtatgagtgcttgtaacaactcgtatgttcagcccgatgcaccgataaaagaagttccctttactcaagtccacttggatgataacttctggactccacgcattgaaaccaatcgtactgtttccataccttcagcatttaaggaatgtgagaagaatggacgctttgataacttcgccatagccggtggtctgatgaagggagaacatcgcggtgacttttcttttgatgatactgatccttataagattatagaaggagcctcttattcgctggctgtgaaatatgataaagcgctggatgcttatctggatagcgttattaccttgattgctactgctcaggaaccggatggctatcttaccacttgtgttactaataaatgctatcgcctttccggttggtggggaaagagtcgttgggaaaagattaatagtcatgaactttataatagcggtcatttgtatgaagctgccgttgctcattatcgtgcaacagggaagcgtaatctccttgatgtggctatcaagaatgccgacttggtatgtgaggtctttggtccgaatgaaggacagaagcatgttccttccgggcatcctatcgctgaaatggcccttgctaagttatataaggtgacaggtgatgaaaagtatttgaaaatggctaaatactttgtagaggaaaccggtcgcggaacagacggacatcgtctcagcgaatacagccaagaccacaaacccattttgcaacaagatgaaatagtaggtcatgccgtacgtgcaggatatctttattccggtgttgccgatgtagcttcattaactcaggatactgcttatttcaatgctttaagtcgtatctgggaaaatatggcaagtaagaagctcttcatcaccggtggtatcggctcacgtccgcaaggtgaaggatttggtcctaactatgaattgaataaccataccgcatactgtgagacttgtgctgccattgccaatgtatattggaatcaccgtatgttcctggctacgggtaatgccaagtatgccgatgtactggagcgtgctctttataatggagttatttcgggtgtttcactcagtggcgataaatttttctatgataatccgcttgagtctatggggcaacatgaacgccagcaatggtttggttgcgcttgctgtccgggtaatgtaacgcgtttcatggcttccgtacctttttacatgtatgctactcagggcaatgatatttatgtcaatctttatatccagagtaaagccgaattgaatacggaaactaacaatgtaaaattggaacagatcacaacctatccgtgggatggcaaagtcagcatttccgttaatcccgaaaaggaacaggagtttgctttgcgcgttcgtattccgggatgggcacaggatgctcctgtacctacggacctttattcgtttactgataaggcaaaggcttacactatctctattaatggcaagaaagtaaatgccacgcaactggatggttatgctacgattctccatgactggaagactggagatgttgtggaaattaatttcccgatggatgtccgccgtgtgaaagcgaatgataatgtagaagatgaccgtggtaagcttgctattgagcgtggcccaattatgttctgcctggaaggtaaagatcaggttgacagcattgtctttaataagtttattcctgacggaacttcaatggaggcaacttacgatgctgatttattaaacggtgtcatggtgttgactggtacagctaaggaaatagaaaaagatggtagtgtgaaagaggttcctttcaaagccattccttattccacttggaacaatcgtggtgcagaccagatggcgatatggattcctgaagctgcagagtatgcccgtcctactccagagccaacaatcgccagcaaggcacatacactgatgatacaagcacctatccagaaagatgctcctgaatctgcttcggttgaaacttgggcatggggtgtgaatgaccagtgggaaccaaagcgctcatcggatatttccaaaccttatcactactggtggttgagaaatggaacacaggaaactttggcttatcaatttgatcaaccttatacgatttcaaacgtagaagtgtactggttggatttcgatcattatgacggggatttccgggtgccggaaagttggaaactctactataaagatggtaaaagctggaaagaagtagaagctttgaatgaatatacggtaaagaaagactgctacaacagccttgatttcaaaccggtgaaaacgacaggactgaaaatagctgcccaattgcagaaaggtgcatcgggtggggttattgaatggaaagtaaactaatagttttatcttgatttagtgaattataacttgtaataaaatattaacctttaaattaaagatgtagtatgaatacacatgaaaatcgagccttgttcagcaaagctgtcctaaaggcaacaatctgccttttccttgcagcaggtgccagtgtaagccaggcatttgcattctcggaagtgacagagactatgaggacggaaattgtacagcaaacaggtactataactggtaaaattatagattccaatggtgaagctattattggtgccagtgtagtggtgaagggtacgtcaaacggtacaataacagatattgatggaaattttacattaactgttcctgtaaagtcaatcttgactgtttcttatgtgggatatgagaccgtgtatgttccggtagatggaaaaaaaacattcagtataactttaaaggaagatactgagatgcttgatgaggtagtggttgtgggatatggtacccagaaaaaggctactttgacaggatctatatctcaagtgggcggagatgaaattaaaaaactagctgctgccaatctaacgaatacacttgcaggtaaaacagccggtgttattgctaatacacgttctggtgaacctggcgaagataatgctgatatcctgattcgtggtaagggaaccttgggaagtactgctccgctaattgtagtagatggtattgccgaccgttcattcagtcgtttgaatcccgaagatattgaatccatctccgtattaaaggatgcttctgctgctatttatggtgcacgtgctgctaatggcgttatcttggttaccaccaaacgtggtgctgaagggaaagtgaaggttaattatagtggtaatgtatcattctctcaaccgacacgtatccctgaaatgttaaattcttatcagtatgctacttatgtcaatgagttcgatgcagcacaaggtaatacacctacttattcggaaacagctatggctaaaatcttggacggaagcgatcctatcagctttcctgatacggattggtgggactctgtaacgaagaattgggctactaatacccaacatagcctttcggtaagcggtggaaatgataaactctcattctattcttcggcacagtatgcctatcaagatgctatttataagaatactccacagaattataatcaatatcagttcactactaatattgatgcgaagattaataaatccattaaattcagtatggatattctggggcgccaggaagtacgtaatcgtggtatttactctacggaagatttattcggatacttccttactaccaatccgatgtcggcgccttactatccgaacggattgttgagaattggatatgacggtatcactaacaatgcgcttttgatggtatctgatactccgggaaccaataagactaattatcataccttgaatctgaaacctaaggttcgcattgatctggatgcacttactcccggattgtatgctgaaggttacgcagcattggattattcattcaatgacggtaagagtataaatacgccttatgatatttattcttatagttctgctactgatgaatacactaaccataaagatgcgacgggtgctatcagtgtaaattcatggtcaaataagagcaatactattacattgaatgcccgtataggatatacacgtacttttaatgaagcccatcgtatcgatgcttttgcttcttacgaacagagtaaatataattatagctctttaagtggctaccgtactaattatctgtcttctgcattaccagacttagactttggtagtaaagtggatgctgataaggacaatggtggaaattctacagaaacagcacgacagaactggttcggacgtatcaattatggttataaggataaatatctggcagaattcactatccgttatgatggttccatgaactttgcccaaggtcatcgttggggtgtttttccttctgtatcggctgcatgggtcatttctcaggaagacttctttgaacctttgctgaatgttgtcaatttcttcaagattaaaggatcatggggtatgatgggtaatgataatattaccgcttatcaatatttatcgatgtattcttttaatagtagtgcatcgtatgcgttcggtacggacccaagttatgtgcaaggtgtttatgaaacacgtactgccaatccgttagtaacctgggaaaaggctaagacatggaatgtaggtttctcagcacaattcttgagcggaaagttgggcttggattttgactacttccaatcacgtcgtaatgatattctaattactcgtaatgcttctgttcctacttattcaggattgtctttgccggcggagaatctgggtaaagttaagaatcatggttttgaggtagttgctacttatcgtgataaggcaggtgattttgaatggggagcaacaggtaatcttacttatgccaataatgaagtggtttatatggacgaagctacaaagactcccgaatggcagcgtgcaacgggacatcccattgatggtatcacagtatataaggctataggtatttatcagacacaagaagaaatcgatgctactccgcatcttccgggtactaaaccgggtgacttgatttatcaggatacaaatggtgataaaagcattacatgggatgatgcaatcagaatagataaatcgaccactccgaaatggatattcggtttgacattgaatggtgcatggaagggaatcgacctgaatgtatttttccaaggacaggctgatgcagaacagttggttatgccagctatgaatatgcctactgatttttatgaaggtcgttggatagaaaccaatactgccgaagagaatgcgagtgctaagtggccccgtgcttttatgaaagcagctgccgtagataatcgtaattccctttcatcaacttggtggcttcgtaatgcttcatttgtccgtttgaaatcagtggaattgggatatactttcccgaatcttatggtaaagaaattgggtcttgagaagttacgtatctatgctaatggaaataatcttttcacgattgacagtatgggcatcttcgaccctgaaatgacagctggtatcaagggctatcctatccaacgcaccttgacttttggagtaaacgttacattctaattattaacctttaatgagaaacaatatgaaaagaaatatattaaaaggagctttttgggttctgctgagcattagcacggtatcttgctcagacttcttggatatcaatccgcacgattctataagtgatgcggctgtatgggaaaatatggatttggcagaagcattccttaataattgctatacttatgtggaaggagaaaatgaaaacggtgtacctttctgtagttatacggatgaattgtttcatcgtaccggctatgcaacggaagtttatacattaggaaatgtttcttgcgataattacaatgtcggtttttcggaagccagaggtaatacatggaacttttattatagtggtattaaaaaggtgaatcagttgcttgagaatatagataaggtacctgctgtttccgatagtgaagagacccgaaaagcagaaattatcgggcaggcttattttctacgtgcttttttctatcatcagctttactcactttacgggcgcattcctttggtagaccatacgtttgatattgattccgattgggtggagacacgtgctgatatggatgatgtagcagattttatcgtaaaagattgtgagagtgcaattgaaaagttacctttaaaatatgaaagtagtgatgattttggacgcgctacccggggagctgctatggcagtgaaagctcgtactttgctctataaggcaagtcctttgtttggagaaccttctacggagaaatggcaagaggctgctaaggcaagcaaggatattattgatttaggagtatacagtttacctactgtcagcagtagtgaagaatatgcagctctgttttacaatacgcagaatcccgaaataattttcgagaaactgtataacaataaaggtacttatggaagtgctctacactatttgttccagtctcctaatggcccttacaatggctataatggttggggagtatggttgcctacttatgatattgtaaatgctttccagaatgaagatggtagcaaatatacggtgaagggcttagcttcttataatatttcattacctagcgttgatccggaaacaaatcagattatttataaagatgcaactattgaggctactgagatcaaaccttgggaaggtcgtgaaatgcgcttttatgctaatattttatatgatggagccatgtgggggtatggagatgataaccatgctatagctatttacgaaccaggggaagaaggggtgcttcctggagaacagtcacccagctatacggatggagaatattggaatgcaactcagactggttattatatgcgcaaattcctggatccaacttatgaccagtatagtgagaccattatggatacaacaccgtggatattctttcgtttggcagaattctatttgaactatgcggaatgccagattgaacttggtaataaggatgaggctctgaagtatattaactatattaggaaccgtgctctgttgcctgatgctctcggaacagatattcgcgctgaatatgaatatgaacgtatgattgagctgatgtttgagggacagcgtttctttgatcttcgccgttggaagaaaatggaaacaatttattctcaggagaactggcctactggtttaaaaatttataaactgaaagatggtacattgctttatcagcataatgagaatcctttgcaacaacgtaaatttgtttctccacaaatgtactggatgcctgttcctcgttatgaattaaataaatgtcctaatctggatggaaaaccttatgaaaattaatagagagcattattaatactataaagggtgagtaactggaagcgatgtatcaaagtttttagttaccaccctttacttaattaaagactgtatgaataaatatatttttcttctatctaccttcttattggttagctgttgttctgaagttcagagtgccactgaagttccaatgccttccggtaaagaaatttatatccctaaagatttgcggggtatggatcttcaaaatcctgatagtaaatggagttatcaccgcatggcatatactgataatttcgtcatcttctgggaaaaaggttttggaaatgatctgtctaatcctcctcaattggaagggcatgatatgaaagtggatttgtcgaacttaacggaaaaattggaaagtttctatcatttcttccgagataccttgaagttttccaaatcgggttcaaagtgtgataagtatcgtatgatggtcatgctaaactactctttggaaggcactgcctatggtggtgattatgatggagaaatcggtgcattatggattgctcccaatcgtgtgcaggataagaaactgaattgcattgcccatgaattgggacatagctttcaggctcagatcagttgtgatggagaaggagaggcttggggaggatgcggtttctttgaaatgacctcgcagtggatgttatggcaagtaaatcccgaatggatcactgatgaaaaatatcattgggatgctttcatgaagctgactcataaagcttatctccatctggaaaatatctatcattctccctatgtgctggaatattggggtatgaaacgaggattgccttttattgccgaactctatcgtcaaggtaagcgaggagaagatccggtgataacttacaagcggatgaccggattagatcagaagcagttctgtgatgaaatgtttgatgcttatcgtcattttatcaattgggattttcctcgtgtatggaaagaaactcgaccgtatgccaataaatatactaccagtttaaccactctatcggacggatggtatggaatcgcaccggacaactgccccgaaaactatggatttaatgctattccgttagctttacctgaacgcgggaagaaagtaaaagtagagttctgtggagaagcaggaaaggaaggatataacgcaattcatatggataaagccgattggcgttatggttttgtagctataacggaggatggcagatctatttatggggatgtgagtgataatagcggaaaaagtattatttttacagctccaaaagtaaataatttgactcatttatggctggttgtgatgggtgcccctactgaacattggatgaatcccaatccggaggaaaaagatgcccaatggccatatcgcatcaaagttacaggaagtaaacctttataaacaaaatgctatgcttgcaagggcaacttatgtaaatagtcgtaacaatacgagggctatcatttatgcctgtattgcggtgcttagttggtctactgttgccaccgcttttaaaattgctttgacgcatcttactcattttgagatgttgttgatagccagttgtacttcattactcatatttgcccttttgctgaccttccagaagaagtggaaactactgtctgcattgcctgcccggcaatggggatattttgcattattaggtttactgaatccggtggcttattacctggtgttgtttaaagcttatgatctgctgcctgcacaagtggcgcaacctatcaattatgcatggcctattgtgctattaattttgctggccctatttgcccatcagcccatacctccgaagaaatatatcggtatgtttatttctctgggtggagtagtacttatttctgtaggaaccgggcagtcgggtggcatggatatacctgttcatgggttgttgttggcagcattgagtgccttgttgtgggctatgtactggatgataaataataaatttaaggatcggacagatggtagcgttgcactgtttatgagctttttgtttggtacggcatatttgctggttggcgcaatgatagtgggtgttcacttgaatactttgcccggtatcttgtcaggagtgtatgtcggcggatttgagatgggtatccctttcatctttttcagtcttgccatgcggaaaactacgaatccggcactggtcaatcagctttgctacctgtctcccttcttgtctttgttctttattgcaatcatattgagtgaacaaattgtgtttacaacgtatatcggtctcatattgattgtactgggaattatgttcaaccaatatctggtaaagaaatgaaaaagattatccttgcgatgatagctgttatggttccgctgatgctttctgccggttctactgatttttggtttcgtcatttttcggtagaagatggattatcctccagcgctgtacgtgctattatgcaggataaatatggctttatgtggttaggtacggatgatggtctaaaccgttatgacggtaccactattaaaatatacagattgaatccggaaggagttaatgattatatttcatttttatacgatactacagataggatttggataggaacaggggacggagtttatatttatgattatgaaacagagaacttcgagccgtttaaacttctgactgccaaaggagatagcattaaaaccaatgtgaatcatattgctgaagacagggatggtaatttgtggttttcaaccgtaggtcagggaatcttcaaatataatgtatccaaacattatctggagcgttatgagtttaaagatgctgatggattgatggccagcgtgttgattgatagtgaaaatcaaatatgggctgttactaattggggaaacccgactgtttctaagttgaataaagcggagaataaatttgagcctttccatattacctacgacacgggtgggtatgattccaactctttggttatgctggaagattctgaacatgcaatctggttgggaacctgggagtgcggtttgcaaaagatagaccggtataccggtaaggcaactacttacttgcatccgtcggatggtaaaggggcaacgcatattcactctttgatggaatatgctccccatcaactactgataggttcggatgacgggcttttactgtttaatacccttacatgcgaacaccaattatttacagaagatgaaacgaatccttattctttgtccaatcgttttgtttatcctattgtaaaagacggtgaaggtggaatctggataggaactttctatggaggtgtgaattatctgtcacccaataccgggcagtttgagtgctttgctcattctcgtttttccaattctgtcaatggaactgttatcggacgcttttgtgaagacacttacgggcatatttggattgcctctgatgatggtggtttgagttgcttttcacctaaagataaacactttactcattatctacccgatgagcacggaaatagtctttcttatcataacgtacatgcactttgtatggatggtgatgatttatggattggtacttatacggggggagttaatgtgttgaatacaaagacaggggtattcagggtttatacaactaaagcgggagatcccactacccttgatagaagcagttcttatgctatctttaaggaccgtgaagcacgtatttgggtaacttccatgtcgggagtaaacttgtataacagggaagaggataactttacccgaataagagatcttggttcctggatcatggacatagatcaggatgccgatggaaatatctggttctcttctcagggaaacgggctgttcaagtatgatccggataagcaggaatggacgaattatgtacatagcagtgcccccggtgcattgattaatgatcaggtgaattgtgtattgatagatggaaatggggaaatgtggattggaacgatgaacggactttgcaaatacaatgcaaaggaagaccaatttgaattaattccattggatattccaagccgtaatatttgtgctattattgaagatcagcgtgtcttatggctgactactacaaaagggctggtgcgatatgttcccggagaaagttgtcaggtatttacacgaagcgacggattgcaaagcgagcagtttctggtgaatgctgctttgaaagcttccgatgggaaaatctacattggttctgtaaatgggtttaatgctttctatccttatcagattaaaacgaacaagatacttcctccggtaattattacgggactggaagtattcaataaagagatccggataggtgataagttgttgccgaaggctctgaaccatatggaacagctggaattatcttataaagatcatgtcttcagcttgctttatgcttcattgagctattgtacgcccgaaaagaatcagtatgcctataaactggagggttttgataaagaatggaattatgtaggttctcaaaataaggctacttataccaatctgcctgccggaacctatacttttaaggtgaaagctactaacaacgatggtatctggagcgagcaggaagcaagcctgaaaatagttattcatccgcctttctattggagtctaccggccaaattgctttatttcctgttgttgtgtgtggcattgactttcttcatccgctttctgctgaaaaggagtgaaaagaaacatacagcagaaattaagcaactgaatgtgaataaagagaaagaggtgcatgaggctaagattaagtttttcacaatgatagctcatgaaatccgtactccggtttcgcttatcattggtccgttggaaaagattatgagatcatccatacctatgccggcgatgctgcgtgatgaccttaatattatagaccgtaatagtcagagattattgttcctggtaaatcagttgttggacttccgcaaagtggaacaggaggggatgaccatgaaatacaccttacagaatattcgtcaattgctggaggctgtttgtgaacggtttaatcctttcattacccaacatggtgcccatcttacggtggagtatcccgatgcgaattttacggctatggtggatagcgaggcagttacaaagcttatcagtaatttgctgacgaatgcaagtaagtatacaaaagatgaagttatcctttcgtgtgtggtgcaaccggaacagcatacatttgtaatcagggtaacggataatggaatcggtataagtaaggaggatcagaagaagattttcaaacctttctatcaggccatggacaataaacccggtacaggtattggactgagtattgtgaaaagcattgtggagtctcataatggctgcatagaagtggagtctgaagtcaacaaaggatcgtcctttatagtaacattgcccatcgaacaaagtcaggaagcaattcaggaaggggaaacgaatggattgaatccggcaattcccgaggatattttgtcggaaagcttaccggcggcggtctctaaggataaaccggtcatgctgattgtggatgataacgaagaaatgctgaacttcctttccggcaatttctctaatcaatactctattcttacggctgaagatgggatagaggctttggaaaagttgaaagagaatgatgtgaccctgattgtgagcgattggatgatgccgcgcatggatggagtggaactttgcaaggctttgcgcactgatcaggccatcagtcatataccgtttattttgctgacagctaaaacggatacgaattcaaagatagaaggtatggactgcggggcggatgcttatattgaaaagcctttctcggtacagtatctggaagcatgtattaagaatctgcttgatctgcgtaatttgttgcgtcagaaattctctaaaatgccattggtaccgttgaacagtattgccaataactctatggataataaattccttacccgtatcaatgagattatagagcaaaacttctcaaattcggaactgtctgttgattttctggcagaagaactttgcatcagtcgttccggattatttgccaagataaaaacgctggctaatgttactccgaatgaactgattcagattgtgaggttaaagaaagctgctgccttgctttcagagaataaataccggatcaatgagatttgctatatggtaggttttaataatccatcttattttgccaaatgtttccaaaagcaattcggtatcaaacccggagaatttgttaatggaaaagaataattctgtcaacaaattcgttctataaatttgtactatctttttcttttcatacttttgtaagtcaattaatttttaagagtatgaataagaaattacttttatccttatttgcccttgtaggtgtatctgtctgtctgtcggcagcagatgaagcgcgtttattgcgctttccggcaacgaacgggaacgagattgttttctcgtatgcaggcgatttgtatagagtgcctgtcactggaggagaagcgcagcgcctgacttcgcatgtgggttacgaaatgttccctcgtttttcacccgatggcaaaacgattgcttttaccggtcagtatgatggaaatacggaagtatacaccatcccggcagctggtggagaaccgcaacgcctgacgtatactgcaacgaattcccgtgatgacctgggcgatcgtatgggacctaacaatattgtgatgacctggacaccggatggtaaacagatcatttatcgtaaccgtatcagtgacggttttgccggtaagctttattctgtcaatcaagagggtggtatgcccgaaattatccctttgcccgagggtggattctgtagttattctcccgacggcaagcgactggcttacaaccgtaccatgcgtgaattccgtacttggaagtattataaaggcggtatggcggatgatgtctggatatacgatccggcaaagaaatcagtggaaaatataacgaataatgttgctcaggatatcttccccatgtggatcggcgatgatatatttttcctttccgaccgtgaccgcaccatgaatatctttgtttataatacgaagaccaaacagacgtcgaaggttactaactttaccgaatatgatgtaaagttcccgagtgcttccggcaataccattgtgtttgagaatggcggatatatctataagatggatgctgccacccgtcagcccgagaaagtcaatatcagtcttgcttcggataatatctatgcacgcagcgccataaagaatggagctaaatatctgacagccgccagtgcatctcccgacggagaacgggtagtggtgactgctcgcggagaggtctttaatctgccctcgaccaagggtgtgacgaaaaatataacccgcactccgggtgcccacgaacgtgatgcacaatggtctcctgatggaaaatgcattgcttatatctcggatgctaccggagagacagaactttatcttcaggatgcagtagaaggtaatccggtgcagctgaccaagaataatgatacgtatatccgctctttcgaatggagtccggacagtaagaagattgtttataccgaccgtcaaaatcgtatcaatctgctggatgtagcttcacgacaggtgactatgttattacaagacccgatgggggaaccgcaggatgtgactttttcaccggatagcaaatggctgacctatacccgtgatgcagataatgaaataactgttgtatatgtctatgatattgccggaaagaaggaatatccggtgacggacaagtggtataattcttcttcaccggtattcagcacggatggtaagtatctgattttctcatctgcccgcgatttcaatcctacgtacggctggttggaatggaaccatgtctataataatatgtatggagtttatcttgctttgctctcgaaagataccccgtcaccttttatacagaaagatgccggaatgaagaacgacagtgagagtgaggccccgaaggctgctgaaaagactgccggaaagaaagacgcaaaacaggaaacagcttctgcgtcactcgtcaagtttgatccggaaggtatcaccgatcgtatcatcaagcttccattgtcggcttcttattatactaatttctattcaaacggaaagaaagtatattactggggcaatggcggaacgaagtttttcgatcttgaaggtcagaaagaagaaacggttgccgatggtgctatgatgacgattactccgggtagtcaaaaggctttgttctacaaggacaacaagctttatgtaaccgctataccggaaggagcggctaatctgagtacacctgtcaatatggataatatgtccattacgatagattatcccaaggaatgggcgcaaatcttcgatgaggcctggcgtgcttatcgtgatggtttttatctggagaatatgcatggtgtggattggaaagcaatcaaacagaaatattctgttctgctgccttatgtaaagacgcgtctcgacctgaactatatcattggagagatgattggtgagcttaactgcggacacgcatacgtcaatccgggtgaaacggataaaccggcacgtatcaagactggtttgctgggtgctgaggtatcggcagataagagtggtttcttccgtttggataagatacttcccggtgcttcctggagtaaggaactgcgctctccgcttactgaaccgggtattgaggctaaggccggggaatacattgttgccattgacggtatacctacgaatacggtgaagaatatctatgctttactggtaggaaaggctgatgtgccgacagaaatctcgctgaacagcaaaccgcaattggcaggtgcaagaaagattgtcatcagtccgctggaaaatgaatatcctctttatcattataactgggtacagaataacctgaagaaggtggaaaaggcatccaatggacgtattggttatatctatattcctgatatgggtccggaaggtctgaacgagttctcccgttatttctatccgcagctcgacaaggaaggtctgattatagacgaccgtgctaatggtggcggtaatgtatcccctatgattctggaacgtttgtctcgcgaaccttaccgtttgacgatgggacgtggtacgaagcgtgtcggcactatacccgatgcagtgcaagtgggaccgaaggtttgtttgattaacaaatattctgcttccgatggtgacctctttccatggggcttccgtgcattggggcttggtaaactaatcggtacccgcacctggggtggtattgtaggtattagcggaccgttgccttatatggacggtacggatatccgtgttcctttcttcaccagttatgatgcgaaaacaggccagtggattattgaaaatcatggcgtcgatccggatatcttgattgataacgatccggtgaaggaatggaacggtgaagacgaacagctcaataaggctatcgaagaagtgatgaaagaattgcaggatcgtaagccattgccgcctgttccggctccaagagatttcagtaagtaattatatactttactatactggtataaatatgccattctataaggagagttttgatctttccttatagaatggcatattctgtttatctttgtggctcagatttctttattatagaattaagaggatgaaggatactcagattattatgttaggtacaggtaatgcaggcgttaccagatgctataatacttgtttcgcaatccggacagctgaaaatgtgctgcttgtggatgccggtggaggaaatggaatattggttcagttggagaaagccggtatcgccattgaacgtattcatgatatgtttgtgacacatgctcatacggatcatatattgggtgcggtatgggtaatccggatggtagcacaacagatgcaaagtgggaaatatgcaggaggcttccggctgtatggacatgataaagtattacaagttctggattggatctgccggatgacgttacctaagaaaattgtacagtatttgggaaatggcattgagctttgtgaggttaaggacggagagacatttaaagcaggggagttaaaactacaatcttttgatataggatcgactaaagagaaacaatatggttttcgtaccacattgccgaatggccaatcgctggtttgtcttggagatgaaccttataatgagaagaatcgtccctatgtggaaggggctgactggttgttgtgcgaggctttctgtctgtataaagaccgtgatatattcaaaccttatgagaaacaccatagtacggcactggatgccgggaagctggcggaagaactgaaagtgaagaatctgttgttatatcatacggaagataagacgctgaatacgcgtaaagcgtgttatacggaagaagctgctcagggattttccggtgtggtacacgtgccggatgatttggaaataatagacattattgttaattaacaatatgctatgcagtcttttttctaatttgttatttctctaatacaaagaagttattttgaatatttaattagaggaagtacattatgaaaattaattcagtatttagtaaagcacttgccgtggcaacagtagtagccacttctataggttttcagtcctgcctggacgacgacgacaataacgcttattacctgaggtatcctaatgcccttgtgacagtgaaggaagctgccgatggagcatttttcttgcagttggatgataagacgaccttattaccgaccaatgtgaaaacctctccttttggagataaagaggtcagagcattgatgaattacagtgaagtggacgaagccagtggtgaatacacgaaagcagtgcacatcaactggatagacagtatcttgacaaagcctatcgctccggatctgggagaagaaaatgataaaatatatggtacagatcctgtggaaatagtaaatgactgggtgacccttgcagaagatggctatctgacactccgtttcagaactgtatggggaggttcgcagaaacattttgtaaacttattgttaggacaaaatccggataatccttatgaagtggagttccggcataatgcgtacggtgatacgtatggaaaaacggatgatggcttggttgcctttaagttggatgaattgcctgatacggagggtaaaactgttaagttgaaactgaaatggaagtcattcagcggtgataaatcagccgaatttgattattgcacccggaaatccgttgcaccgagtgagcccgctgctgcggctgtaagaagtaatttaaagttgaaatagtttttgtatgactatgattgattgatagaaggaaggataccattaactttggtgtccttcttccttttttaagatatactatacagttttctccaggcttctctttaatataatggttatccatacggaaatgacaaaaggggcagtcagggttgtaattccccaatgcatacccagccattgtaataaaatggatataaggatggaacatacacaccatgctccggaacgtattgttttatcacccaaagcaatggcgcacaatacaccgttataaccgatcaatccggcatttagtatggcatgatccataccgcttagcacagccacaactattggaaggatggaacctaaagcagtatagaaagcattgatgcgggaattaactgcaatggcaatcagaaagaataatcctgatatactattcccctgaaacattacttgacctatattcaaacagaaagcgcggaggaaatcagaggatggctctgccccaacaggtgtggtggataataataatgaaggaaatatccagtgacatccaaccagtaatatccatacagataaaataaagggagccgtatatccggataaacgatgctgaaggctgaagagataagtgatccaggtggatagggcggaagttattagcagaagcaacattgatagccatgttatctctataaatactccgatggcgatacctactaaagtaccattgaatccgtatagtccattttttatatcctcacggctgtagctgcaaatccaggcagttgcagtacttattatattgccaataatagctaataaagccaattgccaggaactgtacagaattcctgatagcattaatatacctgaaaatgcattgttttggaacatcacttggccgatgccacggctgataacaaataatccctcgcgcataactctattgcatatagaaaaaagtttgtattcttgtcttgcctttaaaggctttatatatgacgtgttgaacgagtttggtttctttttcgatcattgcaaagataggtaaaaagcttcatggcatcaaaaatggaggtgctttttcagtatgtaacctttaattttccagcaatagctatgaacttttcgaaagaacggctgtcctgcatccctctattcatcggccttaacggatggaaggggtaaaaacgggtgcggtgaaggcaatatgtggatatagtattcattcgttttgctataggaattatttgatgttgactaccttcagtaagtctgctgactatagtcagtaagcttgcggattataatcaaacaacttactgactatagtcaaacgattgacatgcttcatgtaaagcaatgtcaagccttatgcaaaacagtataatgtattctataattggcgtagtatatggcgtattgtaataggaaaatgcttatctgttatgttgtggaaaatacgtagattatacctttccacccgataaggcggatgaatagaggggatgcagaggtgtggaagggtaatctgttgaaccttgctacattaaatttgaggctggcttttacattgatccatccgtttttacgttgatccttgtaaaccatagcgcaaaccgagggtaaaaaacaaaaaagaccgccaagagtggaagcctcctaacagtctaaatcttaatcttgtagcgggacccgggattgaaccggggacctcatgattatgaatctgcgtcttccaaaggcttacgcctttgaaaactaccgacagagctatccctttttattgataatcagtgatatatgcgaatttatgaaatattgcggtttgatagaaaagagatttattgtgaggaaaatgataaaatagcgtcacctatagcgtcacctgaaatactgttcataactttctgattatgagcgtaaatattagtgtggtatgttttaaatcaaaaactttatcaaatggtgaacaccctttatttataaaggtgagtgagggtaaaaagagagcaactaaaagtttaggattatctattagagcccagttttggaattttgagaagaacgaacctaaaaagatttgtcccaatagagaggctttgataaagatgatagaatctaaaaagcaacagtatttggagcaagttattgattttaaaagtgaagataaaaactttactccacagtcattagttgataaaatggagaataccgtaatttctcaaacggttggagagtatcttttaaaacaaattgaaataatgaaagttgaaaagagaattggaaatgctaaagtatatcgtagtacatataactctcttttcgctttttgtggtaatttgaatatatcttttgcaagtattgatgtggcttggttaagaaggtatgagacttttttgaaaagtcgtgagaattccattaataccataggtattcgatttcgagaattacgggctttgtataataaagcaatagaggataatcttgtgcatgagaagaattatccttttaaacgttttaaggttgcacgatttagcaaaaaaacttccaaacgagcaataaagaaagaagatataaaaaggataatgaatgtggatttacggttaatcaccaaatatcatagtccgttactttatttgagtaaagatttgtttttgtttagttatttgggatgtggtattaatttgattgatattgcatatttgagatacgaaaacatagtagagaatcgtttacgttttaaccgtcataaaacggggcagcctattaattttgctctgcaaggacagttacgagaaattattctgaaatatgctaaagaagattgtaaccctaaggattttatttttcctattcttgatagaaaaattcataaaacacagcaacaacaaaatgatagaataataaaagtaactaagggcattaataagaatcttaaaaagattggtcaattccttaatctttctattcctataacgacctatgtggcacgacattctttcgccacagtattgaaacgctctggagtgaatatttcgattattagtgaagcattaggacatacaaatttgttaactacacaatattatttggatagttttgataatgaacagatagatgcagctatgaagaaccttctctaaaaaaaatgccactttatttttacggtaaggtggcatttctttatctttacactcaaaaataaaacatggaatatcagataatacctatctcttcattaaaaagaatagaatcatggctgactgacgaaacaggtttcagcctttcaatgctccatagtgaattggactacatttcagatgtatatcttcttggcaagcaattccctgtagaaatacaagacctgtatttatcaataaaaaaagaagagcaggacatcccatatccaaacaggggaacagacgaagacaaatataaattcagtctgaccgttggaaagaatctcgttctcgaaagtggcgatttcgaagctgactatattttgaatctgtggaacttgtacgacacaaacgaagactcagcttgtgaagaacaagaccaagacatatttaatggaattcttcttattgtagccatctattataaatatacgcagacaaatggctatttcgactttggagactacgttgcagcccctgaacagatacaatacacatactccgtccgccctgatatgctgaacttatacaagatgttccatgagaagaaaaagacgaagaataacacgcttacgattgagtataacaaacagaagatagagctaaccaatgatgataactggtttctcaatatgataactccttatcttgataaatatttaggcataccttctttggaggaagcagaagcggagcttaataaggattaccccactacaggtaaaagaggcaggaaacgtgaaaatgcaatacttgatacagtaaccctgagtatatataatctgttgcgtcattcttctttcgcagctaaaggcaaagggcttacagataatgaaggtaagttcatactatcgcttcttgtgtaccttcgattgattgacgaggacagttctaaaaatgacatactgaatctacgtgccacaatcaggaatctacagaaatatgaagttcgtcccaactggtggagaattcccatgtgtaaaacgtctcccaataatccagttgaacatctgaaatcctattggtaaaacacataaaataaaaaaaggaaatagccttacattaatttgtgaggctattttttgtatctatatatagctaataaacaaggtattatgtctttatttcccacataaagaattaaacataaaaaaagggaattctttatgtttttttcttcttttcataggcttatccctccatatatctttgcaccgtaatcaaaaacgataaggcgcccagttaatgattacatcaacaaattgtataacattaaaatttagaaattatgaactcaaatcaaaactttacaatggtagaaaacaaagaaatgaaatctaataacttaatcgtggtaaacatggaagaattaacaaaaagactcaaaaaggaagaaaaggtattgcagcagcttgaaaagaacaaggctgacgcatcagttatcacagcacaagaacaaatcgtcagccagttaagaacacagcatgaagaagcaactgcaaaagaggtacaggcaaaagagtatatcggtgacagctttatgacattctccgttgtggatgatgaaacgggaacacgcagcgaaatacagaaaaaaattgctttcgtaaagcataaccgtcctattaataacaagaaagtagacggcttcatttcaatcatcgccaataataaatatgatacagcctatcccattattgttattgaagctcaaaggctctttgcaaaaggttatgaggtgacaaatcttaaaggtgagaagctgacacaagaagaagcaaaagagtatttctgtatcttggacggacagcacaggagcaaagctttcgccaaactaaatatcacaagcggaacttcctatacaatgcccaatgtacatgtaagagaagtggagaatatcggtgagtatttggtgaacataaataatattggtacaagctggactcaaaaagatagagttacagtagctgcactgacaactaaagacgaactgtttataaacatggcagacctgttgaatgagggtttcaaccaatctaccgcaatgctaatctttactggaaagaaattatcaaacggtcagataaaccatgccttgaaaggcgaagaaatcaaacttcccaaagatgccaaaataaatattgaaagaggaaacaagtttgtcaccctttgtaaagctgccaatatcaaagtacagttcatcaccaaaagatattttatagacggcttcaattcctatgcgaccgcaacaagtgaggagaatgcatttgaagcgttggcaaaactgaaaaaactgaaactgacagaagaaatactgaaagagattaagggtaacgatgactttatcaatctactgaaaaaaacattgcaaacggcataacactaacagagcctgtgtgacaggcaggctctttcatttttcccttatttaacaaccaataataatcaaatatctacttcttatgaaagtacctttattattaaattaccagcagacagcaacggttaattattccatacttacaaaattcaaatctgccaacatttacagatttttctgcctttccctttgcagggatgaatggtattatgtgagagttactttggacgatattaagaagttgacaggtgataaaagcctcagtaaattcaataatgatttcagagaatatttagagataaaagcatatagtcttgacaaaggttatgcctataaaaccaaaaggaatatttaccatgttcccgcaatggaagagaagtgtatcacaatatccaataaatttctccagtacgaattgaatacgacagtaaagggctttttcattcagttaatgctattatcccaattcagcagtatggttttaaacaaacagaatgttgttaaaactttacaccttgataaaaagacctacgacaaatacttaattgatttacagatttcaggactggttaccaatggcaatatcttgaaattacatactgacagtattttactgaataatgattttagcatgcaaaaaagacaatcgacatacaggctactaaaagatgaacagcttaaagtcgatatgaagtctattatctcatagtggtgaggaaaacattacccttattaattatataatataactaactttttcccctgtacctacttgtttataagtaaagagtgcaataaaattgttttatccattataaagtttggagaaacagctattaaagaatcagagatatatcttaactttataaaggcttggtagtggggaaaatcttatctttattaattatataatataacacacattttcccctatcactaaagattatacgctttagatgcaaataaaactcatatctttgggtgacaggttaaccattttcatttttaaagattaagagttacttatggcaaaccttcatttgggaaatacggtaataagagatgcccaataagataaaatgagacgactgtagagactttaataggtgtgaaatagtaccttatcaagtggatataaataagccgccagtggacacatttgtgtatgtacccgcttgcggctttttctgtatagggatgaatcacttcgatgtatggttgtatttatacctttttacaagccgtctttggggagtaaggtcaagttctgaagcggcttttatcaatcgggcaagcaattcaggtgaaatcttcaatggtgctttatctatctgaattgttgtcttataacggatgcagtgctcttctgtttcatccgtaaaggtagtaatggcattgggtacgattggtattctgatagtagtcattgtgtttttaaataaaatgtctttctaatatgattaatctgtcttctttgcttgcgataaccttgtgtctgtatccatacgccaatatggactttattatctctgatgttattcttcaaggctaattcacgtaaatcctgataagtgtatattgttggcatagatgggataaatataaaaaatgaaaagtggcaagcgacggagtagacgccgaataccccgtttttttgccactatcctacaaaatgaaaaagtcgctctaaatacaatgcttatagaggactaccattaaatctatttagctgaattttatctatggaagattgaaaggtgaaagattataattcctgagaatgagcataattaggagatatgagctattcaggaacatgtatatttttctttcttgtgtactacaaatttacaaataagaaatcaggtaaaaaaacgaacggtgcatattcttgaaacattgccactatgttgataccactttctgtagtggtcgtgactacttccacctctatgaaattatacatttatgcgcacgataaagtacgggtacttatataaagatacccctccccatcattgctaaagctgaaatatatatagagctatttctcataggtttatgaactgaaaagttacaagaaagagcgtgtagagttagttataagcacgaatgtagagtaccctaaatacaccgccctagggtatttgaagaaaaatgaaaatattcattgcttcatcctatcaatttataaaccatttaaaattaattcattatgagaaatttagttattggcaatttgccacagagcagaagaagtttaaatttaggtgagtatgcagaagacgctactttagtaatggaagaacaacccacaaaggaaaagagaccgttattcattgaagctaatactatggaagctactttggatcatctaaagagtgactgcattatccctgtattcgcaaaggataatgaggctaccttatcacatgtggctttcattgaaacagtgcaagacgctgcaaggacattctttcaaggtgaacaaatagaattgcctgatattcgtgtgtctcatgttattaaaggcagaatacccgaagcaattcataagcctgccaatcaattactggaaagtgataagactatctattacgaaaggtgtgcttttgtgattgaaatacctactatctatgagacagtaaacggtaacaggttgactcttactattggtggagttcgtgcgtacaatcatacgaacttatacagtaagaagaccgcagaacgatttaaagtattcataggttttacctgtaaggtgtgtacgaacttgtgtgtatcaactgacgggtatctttcatgtttggaagtcactaatacaaatgagttatatcgtgccatcttggaattgttcaatcgttatgatccagccaagcacatacatttgatgcagactttaggcaatacttacttaacggaacatcaattttgccaattacttggaagaatgagactttatcaatcattaccacagagccaacagaaagccataccaagaatgttactaactgacagtcagattaataatgtggcaaagtcttatattcaagatgagaactttggcagcttgggaagtgacttatcaatgtggaaattctacaatttactgacaggtgcaaataagaacagctatatagacagtttcttggatagagcttataatgctacagagatggcaataggtataaatgccgctctgcatggagacgataaatatagatggtttattgattgattgaaacggggaatattctgaaatacgggtattcccctttttattaactacttaaaattgaaaatcatgttttataagaaactattcatttggttattttggttgataatcgcattgttcactggttgcctaccgcttattttgataatcctatgtattccaagctttataaagcaggaagcagaaaagccacctgtaaagtggatgaataacagtagaccagtgaaaaggagatatgaacggtatgagaatgaaatcaaaaaatgaatgtgttcaaataaatctgtacaggtggtttgaatacgcttctttctgttatcaatttaatctttgaataatatgaaaacaaaagcagtgatatatgcccgtgtcagttcgtcaaatgacagacaggacacaacaaggcaaatagaggatttaaggaagtatgccgtttctcagaatatagaaatcgtgaacgtattccaggaacatataagcggtgcaaagaagaatgaggaaaggcaagttcttacagattgcttgaattattgcactactcattcagtcaactatctgttattatcagagctttcgagacttggaagaagtacattacaggttcttcgctctttagaagtgctgcatgaggcaaaggtatctgtttatatacagaacttggggctttacacattacacgctgatggcaaggtcaatcccattgtttcagtattgactactatgttggcagagatgggaaacatagaacggtcaaacatacaataccgcttaaatagtggaagggctaactatattgccaaaggtggaaagctgggaagaaagaaaggcagtgtgaagacagaagaaaagaaactggaagaatacagagatactatagctttactaaagaaaggctattcaatcagaaacatagccaaactacagggtattggtatttctacagttcagagaattaagaatcaatttgtaaaataaatgattgctaatacaaacactttttgtaactttgccccaatttcagaggtctaatgagttagcactgaaaggacttattagttaacgaagagcgtttaatgatattactttgtcttagaaaatcgccaattttcaaaacggaacaaatgtaatacaacagaacgctcacgccttgtgtttatacatcttcataggataagtatattcatattggcgtgggactgttgtttatttgttccgtgggtgtttggcgatacctctaagacagataagaaattaacagttcccacgcttctttttttgtataacagtcagtagggaacactgactataatacatatcaagcaagaaacagatattctattctctaatgtagcaaactattaaaacagtgtgcagctatcgctgtgttcctcacacttattcaatcacagatttactaattgttctttattgggagcatagagacattaataagaaagaaactatgaaaactttaaaattaatgggaatggctctacttgccgcatgtctaaatgtgggcttgatagcttgcagtgatgaaaataaggatgctcctgaaccagaagatgcgttcattaatgaatcaggaagcaataactatttcactaatggcatgaactttacttctgtcgcaagcgaattgacttttgcttttgatacgaatatggattggagtatttcagtagcaaatacagtaaatggcactccttggtgttatgcttctacaactagtggcggagcgggacattacgaagtcgttgtaaaagtagacgaaaatacaagttatgatgatcgcaatgtaactctcactatacaagcgggaatggcaaagaaaacgattatagttactcaaaagcagaaggatgctattttattaacttctaataaatttgaggtagataaagcaggaggaaaaatcaatgtagaggtaaaatcaaatatcaattatactgttgagatagcagagactgacaagaactggattaagaagtctagtactgatactcgtgctttatcaactaatacactaacctttgaaatatctcctagtgaagagtatgataaacgagagggagagatttatgttaagagtggagaaatgattgaaactgtgcatgtttatcaaactggtggaggaactattcttcttacaaagaatgaatatccagtaagtgacaagggcgaaactattgcagtggaattaaagagtaactgcgagtttgaagttaaaatgccgaatgtagattggattaaggatgcaccagcaactaaagctatgtctagccatactctttactatgtaattagccctaatgaaacatacgatagtagagaagctaagattatctactatgataagaacaatatgaatgtggctgatactttggtagtaatacaagtgcaaaaagatgctcttattctatcacagaaagaatatgaagttggagctagtggaggtgatttagaaattaaactgagtacgaatattcaatatgccctttctatttctcaggaagacgcaacatggatacaacaagttacaacacgtagtctagtagatgaaactctatatttcaaaatagctgaaaacaaatctttagatacaagaattggctctattgtaattgaagcagataaagataaaaaagagactataaaaataatacaagctggtaaaagagaagatgttgtagttttgaatgtggctaaagcaggaactctaaatcaactagtatcctattctcaaaaaaatcaaattattaatttaaaattgacgggattattaaatggagatgatattaggtttattagagaaatggcaggacgagattctaacggaaataagactgaagggcaactacaaatattggatttatcagaagctagtattgttgcaggaggtgactattactattacaaaagttctaagaagtattacataaatgacaatacattaactaattatgtattctatcagtgtgaaaatctctcttctattgaaataccaaaaactgtaatcaagattggagattatgctttttacgattgcaaaagtcttacttcaatagatataccaaatgatgtagcagagattggtgattatgctttttcaaattgcacaaaccttgtttctattggtatgcccaatagcgtgataaagattggaagcagtaccttttcctattgcaaaagccttacttcaatagatataccaaatagtgtaacagagattgaaagcgctacctttttaggatgtacaagtcttgcttcaatcaatcttcctgaaagtataacaatgatcggaagtcgtgcttttgaaggatgttcaaatcttacttcaatagatataccaaatagtgtaacagagattgaaaacgatgcttttgcttattgtacaagtcttacttccgttaacattcccaatagtgtaacaaaaatagaatttgctgtttttagtggctgcacaagtcttacttcaattaacattcccaatagtataacaaaaatagaatatgctgtttttagcggctgcacaagtcttacttcaattaacattcccaatagtgtaacagcaattgaaagtcttgcttttaacaactgtacaagccttacttccattgatattcctaatagtgtaacacgacttgcagaccaaatttttagaggttgcacaagtcttgcttctgttaacctatctaatagtataacaaaaatagaatctgctgtttttagcggatgtacaagtcttgcttcaatcaatcttcctgaaagtataacaatgatcggaagtcgtgcttttgaaggatgttcaaatcttacttcaatagatataccaaatagtgtaacagagattgaaaacgatgcttttgcttattgtacaagtcttacttccattgatattcctgaaagtgtgacaacaattaaagaaaaagtcttttatggttgtacaaacctagtttctgctacaatccctagtaaaatagcaacactaattaccaaagtgccttatggtcttacgagttataaagatgtaagtgctgtttttgcagaatgtacaaccttgaaaaaagtgtacgtaaagagtgtaaatcctcccgctattaaatatgacactttttcagagtattcctatgattatgcgaccttatatgtgccagaaggatgcaaggaagcatatttagaacatagtggatggcaaaaatttaagactattgttgaagaataacattatagctatgatagattttaaaatatactggaaagatactattcagccaaaagagataaaagaggtaactagaaagtttctatttgatataggttggcttaaatcagtagatgaaactgttgaaacgtatggtgtcctatttacttttgcatttctacaagatcgttctattgaaatcaaaatagatgataaacaagagaaagcctgtcctaatatagattgggcagaggaactattggaagcattgcaaaaggattctaatgttaaagaggttagcatttttatgaacgaagaaagtaaaggtcttattctcaataaaatgttggatgctccttataatgtagatgaagaaaatcaaaatagatactttgttgtgtatcatagttaaactataaatgaaaatagcatttggagttattcatttgctactcatattatttacaaatttaataattaataaaaatgaaaacattaagatttattggaatggcaataattgccgtaattatgagtgttaactttactgcatgtagtgatgatgatgaagacgaaactgccactaaccctttaattggtacatggcaggaagttgatagtccaaattatgatatttggatttttaaagctgacggaacaggaacagagcaagagtactatcaaggtaatctggatgagccatattcattcacctacacttatgatagcaagacttctatattggttattaactatggggaacatgcaggtgaagacgagattgatagttatgatgttactattgatggtagtactatgaaaactatagaccgtgactatggttacgaaactacttggaagaagaagtaagtactacatcatctaattaagaaaacagcatttgaagcaattcatttgctgtttttttttattgttttctatacattaagaaatagattattcgtatctttgtgatgataacttaatgtcaaatcagaacaggtaattaggaagtcgttaattagcgtcacctatagcgtcacctgctaccaattgatgaaaaaacaaaaaagaccgccaagagtggaagcctcctaacagtctaaatcttaatcttgtagcgggacccgggattgaaccggggacctcatgattatgaatcatgcgctctaaccagctgagctatcccgccatcatttcctgtttgcgggtgcaaagatacagctttttttgaaactgccaaaatttttgcgttttttttctatgtagcatgtaaatagtaacttggcgtataaatggtaatgcgcacaattattctacgacagaaaaaacaagtaatatgtaggatctatatatccaatgcgcaggacatatagaactgacttgcagaatatgtagatccgttactgtggactaaatagttagttcatagagccgactatttgtttttttgtctgtaaaatactttattctgatgatccaaaatattttgtttagcatattgatacgccgtgtttcaagtagcgatacgaagtgcactcatgcaagggtggaggataagtttagtttataacagaaaaagcaagtgcataatttattagattaaaagtatacatcgttggatgtaattgatgttatttgttaattttgtagcagaggtaaacttgatagaaatggcgatgaataaaaaactgtataggtcgatactatgtggatggattgccgctttggcttgcatggcattgttgtggtgcgtagctgtatgccacagtgtcaggcaagggaaggtagctgtgaaagaagttgcaaaggagaatttatgcgaggcggtggagctggaattggacagggagtttgaaagaatgaagattccttattcgaggttctttggagagaagaaacatactaaaaggctgtctgttaccgaaaaaggaatgtttgaagtgatgattgattcagtgaaagagactcaagctttgtattcattggaggtgatgggcgccaaggttgacgttttgttttctttagatagttttcccttggaacggatttacgataattggcaagaaagaataaaaaatagtcaaaatggtgtttcgtcaactttatttttgaagagaaccccgttgggagaagatgccgcacaagaatcatacttgggagatagcactatttgtttcccgcaaaatgaactggggacttattatttggactgcatgtataccacggtgctgacagcatacctgttacccgctttttggcaaagtgttgattggacctccacttgggttttgctgttatcttgtgtttggcttattctgttttttagtttactagtctggtttatgatactgaaactgcgaaaaaggagagctaccggtacatcggttcaggatacctatcagattggagaatatgtttttaatatactaaagcatacattgacctgccagggtattgagaaaccttgttctttacagaatagtaagttgctttatgcttttctgacggctcctgaccactttcttacgtacgatgagatagccaaggtgtgtggttggtctttggatagtgccggtttaggagagcgacgccggaatgcaattcggaatttacgggagttatttgataataaggtggattttctatcgcttccgggaaagaaggcatgccagatggtaatccctaaacaagaacacgcgaaaggataattgcctgaaaataaggcgtgatatttttgtcacggcatggtgggaaagaaaacgataaaatttccaccttcttctatgcaacgtttcctacctttacttgcattaaacaatataaaatgtaaaggaactatgagaaacaaaatgaaatttatcggaattgctatgatcttggttgttgtggccttaggatatagtaaaaatcggcaacctgagaatttggacactctattattagataatgtggaagctttggctgccggcgaagcagcagatggcggagattgtataggttcaggttctatagtttgtccctttaataatactgaagttgctcatgtgcttgtttattatagcctgcctcattagcttgttctctttttcgctttcttcttgccggcaagaagtgcagaagacaaatgtcgcttatgtggactttccgcgaactattgaactgaaggcgagggtgattccgcaggatagtattctattccgctatcctttccgggtacatgtgcagggtgataaagttgtagtgatggatttgcataccacagaatacttctttcatgctttccgttatccggatttccaatacctgacctcttttggcaagcggggagatgctccggaagaaatactttctgctgaaaatttccgatggaatgggcagtttttgtggatgcttgatgcgggaaaatctaaattaacccggttgagctttactttatccggcgactcgctgcttcgtacagaagtagtgagcctggataaggaaattcttcgggcattagactttgttcagtatgatgattccacctttattattcccgattattcaggggatagtcgtttctgttgggtgaatcggcagggtaaactgcaccgtaagacggggaccatacctactactaatgaggatgctttaaataatgcctgtcccgctttggcgcaggcatggcgtagctttattgattacaatcctcgcaatggagtgctggcggcagttactcaattgggtgaagttctcgaaatctataatctgaaagacagtacgcatattgtacgtgttggtccgtgtggtgaacctgattttaaagtatcacaaggctatggcattccaacaggtataatgggctttagtgatgtgcaagtgacggataatgctatttacgctgttttccatggacgttcgtttaaagaaatagcgcaaagtgcacgtagtggtattaatttaccggatggtgggcaatatatctatgtctttagtttggcgggcgaaccgttatgtaagtatgtgttgggacactacatctatggaataactatagatgaacaacgtggtgttattataactacggatgtaaataaagatgagccagtgattgagttttgtatgaaatgaggttaagatattatagtaaaaagaaacgggtagtaaatgcttgatttagggacatgcaaactacccgttttataacccactaaagaaggaggttttggcaaagatacgtattaaatttgaaaaattgaaatgtgaggtttgattgttatgatatgtaatatggacctattgttcttgtggagtggtaacattcttatctattgactaacacaattaatgtgttttgatttaatgaaaaatatattccttaaaaaacaacatggaaatgaaaaaaataatgaaaataacccttgtcgctgcatttataacaatagcaggatatggtgtttatacaaaccagaagtctgaatcaatgtctgatttggcattaagtaatgtagaagcattggcgaagccagaaatttggatcgctttttgcatcgacgctccttatgtctgtaatggtcaaggcatagaagatattgatggcattagacagtattgataaatttgaatattagaaataggtttattacgcataacttatttttgatgtttatttgaagtctgtttgatttttcttcatttgtagaaggttaattttatattgttttctatttttcttaagtgagatcatggaatactaaacgaatagaaatagtgaatgattataaaagtaattttgaattaaagtgttgaatctttatgaggaaaaattaaacagactttttaaataataaagaaaaatgaaagcaggactacttcttctattagcactattaagtgcttttatgtcatgttcagataaggtaaaaactgaagtaaaggaaacaaagttagagtttaaaactttgtttgttgatagtctcatgattggaaaggctactgaaatgttgctagttgactcaaatttgttgatatcagatcgtcagtctgactccttatttcattgggtaaacttgaataaactaacatctaaggatgttggtcagataggacaaggccctggagagtttctacattttgataatttctatcatataaataataactatggtttttatgatcgtagattgagaacttctaatgatataatatttttgaaagatagaattctattaaataagaatgttcgctatgggtctatacattataggcttgttccgactgctttcaatacattcgttggaataggtccttatgaaaagggattgtttcatattttggacataaaagggattgctgtagatacgataggagagcaaccatatagagatgaagcagaaagaagtgttccggaattggcgagagctatggcgtatcaagggaaaatagttacatcacctaaaggggattatttggttcatgctatttttatgtcaccgattatatcattttacaaactttcccttgctaatattgagttgttgaaatcgcatgttgattgctatccgacatataaaccggaattaggtaataactcttatgcttcagctatgagcaggagtaatatattaggttttattgatgttgcagtaacggataggtatgtttatgcattgctatcaggaaagtcaactagagaatcaggtctatctgcttttgcaggaaatgtaattcgcgtatatgattggaatgggaatttgctgaaaatatatacatgtaatactgacttgacgacattgtgtgtttctgccgacgatagtataatgtatgcgatagggcttgttgaagattatgaattattagtggcaaatctgaaatagagtatcgcttccttgagaaaatcatatatgtatattttataatgtattaagtatggtattattagatttggagatgaag

SEQ ID NO: 6321 - DNA, 42214 bp, Unknown
  gut microbiota DNA sequence
tacatttgcaatgtgaaataatagacaatggcagaggtataggtggaaagttttttaataatagatataaataataatattttatgagagttaagttattcatagcattgggtatgcttggtatgagtttgttcacttatgccggttccagacacgccgcggagacttcttatccgagttataaaggattggtaatggcgggatatcaaggttggtttcgtggaccgcaggatggtacaaatcaaggttatggccattatggaaccggaaagcaatttgacgagaaacattgtaccattgatgcatggcccgatgtgagcgagtatgagaaaacgtatgagacttctttccgccatgccgacggaagaaaagcacgtgtattcagctctgcggacaagtctactgttgatttgcatttcaagtggatgaaagattacggagtggatggcgtgtttgtacagcgttttgtggactatacccgtggagatcaaaagaattcggtgcctaaccgtatcctggaaaatgctttggaagcagcttccaagtatgatcgtgccatcgctgtgatgtatgatctgtccggtttgagaagatccggtgaagactgctccatgataatagaagactggaagaggctggtggacaatcagaaggtgactaatcagtccggtgcgaaaacttatttgcaccataacggaaagccggtagtggctatctggggtgtcggtttccccgaccgtccttacaatatcaggaatatcggcatggagcgcttgattgacttcctacaaaatgatccggtatatggcggttgcacggtaatgttgggtgttcctaccttctggcgcactctggaatccgattgtatgaatgatccttatctgcatacattgatccgaaaggcggatatcgttctgccgtggactatccagcgcttctctccgttattgcacaatgatatggatcgttttcgtgacctggttattggagatatccgctggtgcgaagagaatggagtagattatgttcccgccgtaactcctgggttcagttggcataatctcagcaaactggagtttccggatgacgtaaagcctgtaggcagtattccccgtcagggaggacgcttctattggcagcaactttctacagcgatgatggcaggggcggaaatgatttatgtagccatgtttgatgaggtggatgaaggtaccgctatctttaaatgtacgggagatcatccggttagtgacattgctaagtttatcgatatggatggccaaccttccgatcattacctgtggttgactggtgaggcggcccgtatgctcaggaaagaaattccattgacatttaagatgcccgtaagaaattaaacaatgaaacgatatcagttaataatggctctgtttgcatcctttctgcttctggcggaaggggtgcaggctcgtattacaatgccgtctttcttctctgacggaatggtgttgcagcaaaaaagtgcggttgccatttggggaagcagtgacaggaaacagcagaaagtaactgtaaaaacttcatggaatgctaagaaatatacggcagttaccgatgaatcgggtaactggaaagtaaaggtagagacacctgtgtatggtggtccctacagcatagaggtgagcgatggtgagtcggtacatatcaataatgtactgatcggtgaggtatggctttgttccggccagtccaatatggatatgcgggtaagcggacgttatggtgatccggtgattggttcgttggatgccattgtcacttccggaaatcccgaagttcgtatgtttatggtaggaagcaagatgacgtccgaaccactgactgactgtgaaggtatttggcaggaagcttcttctgaaacagtccccgagttctcggctgccggatatttctttgcacgcaaactgaaccaggtgctcaaggtgcctgtcggtattatccatgcgagttatggaggttcgcgggtggaagcctggatgagtaaagaagggatagaaccttacaaagaattgtcggatgtacacaatgcttctattctttataatggtatgttgagtcccgtagtcggttatggcatacgaggctgtttgtggtatcagggagaagccaatgtagatgtccccgacctgtatacgcaactgttcccttcgttggtgaatgactggcggaaacaatggggaataggggaatttcctttctattatgctcagattgctccattcaactataataagggtgaggggaaaggacaaaactcggcctatttgcgtgaggctcaggcaaaatgtctgggtattgtaccttcttccggaatgataattctgactgatatcggtgatgcgcgtaccatacatcctatggagaaggaaaccgtaggtaatcgttttgcatacatggctttaggactaacttatggtaagaagggtttccccgtaaccggtccgttgtataagtctatgcagatagagggaaataagatcgtggtatcatttgatgaagtaggtaaaggtttgactacatatcgccaaccactgataggtttcgaaatagccggtgaggatagggtgttccatcctgccaatgcgcatttgggtaaagatgctcagacagtggtcgtttccagcccggaggtgccgcatccggtggcagtgcgatatgcttttaaggattatgtgaaaggctgtctttataatatgttcggtcttccggtatcttcattcaggacagatgattggtaacaaaaacataaacatataattttatgaagaataaactctgcatgctgttgttggcctcaggaatcggattgttttcctgtgcagaaaaggatctcccaaaggagtataccgatagcgtgaatgtatttatagggactggtggacatggccacactttccctggtgcaactttacctcatggaatggtgcagttgagtccggatacccgtctctttggctgggatgcctgttccggctattattacgacgatacttccatcatgggctttacccatacccatcttagtggaacgggtattggagactatggcgatatactctttatgcccgtagtcggcgagaaacctttgattgccgggacagcagaaaacccggatgaaggctatcgttctcgtttctcgcatgaacaagagagtgcccggccgggatattatcaagtactgttgcaggatgattctatcaatgtggaactaaccgctactttgcgtgcaggcctgcatcggtatacttaccctaaggcaagtgatgcccgtctgattgtggatatggaacctaccattcatggtcatcagcatcctgttactcagattcgtgtggtgaatgattctaccataacaggaatgaaatatactgttggttgggctaagcgtcactatgtatatttctatgcagtgttttccagtccgtttgattataaattgtattcgggaactgagtatcaatcggatagtacatctgtaacggtcaataccgctaaggcagtgattagttttagaaatctccctgctgacggacgcgtattggcaaaggtaggtatctcaagtgtggatgaagagggtgcccgattgaatgtagaggccgaaatccccaattgggactttgaaggtgtcatgaaacaggcgaatactacctggaatgaagcccttggaaagattgatatcgaaacttcggacaatgatagccgtactgtattttatacttcactgtatcacgcctttatccagccgagcctggcatccgatgtagacggacgttaccgtacaatgggacatgagattaaacaggatgcttcttatacaaattatacggtgttctctctctgggatactttccgtgcagctcatcctctctataccatcgttacaccagagcagaatcaggctttcattcgttcactgcttcgtaagtatgatgagggtggtatcttgcctaaatgggaactggcttctaatgaaacaggtactatgatcggttaccatgccgtttctgtcatagccgatgctatgatgaagaaacaatgcgattttgatgtaaagaaggcgctggaagcatgcatacgttcatcggtatatgatactacgggtgttacgccgatgatggatcgccagattctgaatgggaaactgatgcctgtatccattaaatataagaatgaactgggatatattccttgcgataaggcaggtggttctgtttcacaaggactggaatttgcttataatgactggctgatagcccagatgatgaaggagcataaccgtaaagacctttatgataaatatatggagctttccaggaactatcggaactattttgatccggaaactaaactgatgcggggacgtctgagcgatggcagttggattacgccttttgatccggcatccgtgcaacgtcccagtaattacgtagagggaaatgcatggcaatgggcatggtttgtgccgcaggacgtagaaggactgatggaactggttgggggacagaaatctttcgaagcacatctggatacgctgtttactacaagttccgaactgacgggtgatccgaacgccgctgccgatgttaccggaatgattggccagtatgcacatggcaatgagccaagtcatcatattccatacctttataattatgccggtgcacctcgcaagacacaggctttagtagaccatattcttcgtacactctaccataatgatcctaacgggctttccggaaacgaggatgttggacaaatgtctgcttggtatgcattgagtgctatgggattctattcgttctgtccgggccgtccggtttatgaaattggccgtccgatattcgataaagtgactattcatttgagtaatgggaaagattttgtaatccaagcgaagaataatagtgtggaaaataagtatattcgctccatgaagttgaatggtgaggatttggcggaaccgagattctctcatttcgacttgatgaagggtggagaactaatatttgaaatggaaaactaaaaagatgctatgaaaagaagaatcgctttatgtattgctgtatcgctttgtgcgggtgtgtatgcgggtaataatcccggtatatataagaaaggctggattgattttaacaagaacggtgtgaaggatatctacgaagatccttcggcaccgatagaggcaagagtaaaagacctgctgtcgcagatgaccttggaggagaaaacttgccagatggctaccttgtacgggtccggccgtgtactgaaagattctcttcctactgagaagtggaaagatgaaatttggaaggacggtatagccaatatagatgaacaggccaatggcttgggacgtttcggttcttctttatcatatccttatgtaaatagtgtagaaaatcggcagaccattcagcgatggtttgtggagcagacccgtctgggaatacctgttgatttcaccaacgaaggaattcgcggactttgccatgaccgggccaccatgttccctgcccaatgcggacagggggctacctggaataaggaactgatcagtgaaatagctcaggtcaccgctgaagaggcaaaagcgttaggttatactaatatttattctcctattctggatattgcacaagatccgcgttggggacgtgtagtagaatgttatggagaagatccttttctggtgggagaacttggaaaacggatgattaaaggacttcagcaagaagggctggttgccactcccaaacactttgcagtatatagtatccctgttggtgggcgtgatgccggtacccgtaccgatccacacgtagcaccgcgcgagatgcggactctttatatcgaacctttccgcaaggctttctgtgaagccggagcattgggagtcatgagttcgtataatgactatgatggtgaaccgattaccggaagctatcatttccttactgaaatacttcgccacgaatggggcttcaaaggctatgtagtgtctgacagtgaagcggtagaatttctttattccaaacatcaggtggctgccgatgctgtagatggagctgcccaggtagtaaatgcgggactgaatgtgcgtactaactttactttgcccgagaacttcattcgtccgcttcggcaggctattagtgaaggaaaggtttccatgcagacgattgatagccgtgtagcagatgtgttgcgggtaaagtttgggatggggttgtttgataatccttataagggagatgccaaacatcctgaaaaggtggtacatagcaaggaacatcaggcagtatccatgagagcggctttagaatctatcgttttattgaagaatgagaataatatcctgccactctccaaagatttgaagaaagtagcagtgattggtcctaatgcgaatgaagtgcagaacctgatttgtcgttatggtccggctaatgctccgataaagacggtatatcagggaataaaagagtatttgcctgatgcagaggttcgctatgcaaaaggaacagacattattgataaatattttccggagagcgagctctacgaagtaccattggatcaggaagaacaggctatgatggatgaggctgtagccttggcaaaggaatcggacgtagccatcatggtactgggaggaaatgagaagacggtgcgtgaggaatattcccgtaccaatctggatttgtgcggacgacaggaaaaactgttgcaagctgtatacgcaacgggcaaacctgtgatcttgttactggtagacggacgcgccgccaccatcaactgggctgagcgttatattccgggtattgtacatgcttggttcccgggagaatttatgggagatgctgtggcacaagtacttttcggtgattataatccgggtggtaaattggcggtaacctttccccgttcggtagggcagataccttttgcttttccttttaaaccgggttccgattcaaaaggttttgtacgtgttaccggtacgctttatcctttcggatatggtttgagttatactacttttgcttatagtgatttaaagatagagaatccggtcattggtgtacaaggtagtgtgaagctgagttgtaaagtgaagaatacaggaaaagtagccggagatgaagtcgttcagctttatctgcatgacgagatgagttctgtgactacatatgtaaaagtattgcgtggcttcgaacgtatccatctggaaccgggcgaagaaaaagtgattgatttcgtgcttaccccgcaagagttgggattatggaataaggataatcatttcgtagtagaaccgggtacgtttgcggtaatggtgggaagttcttcacaagatataaagttacaaggaaaatttgaagtgaaataacattagattgagatcagtatttattatgcaaagttacaaaaataatcgtattgtttttctggattggttacgtgttattgcctgctttatggtgatggtggtgcatagctcggagtgtgtatattcaaatgattactctttttcttttccatctgaactggggcgttggagtgtatgtctgataaatggttttgtacgtccggctgttcccttatttcttatagcttcggcttatcttttgatacctttgcggacggatacgaaaacattcttccgcaaacgtttcatgcgtgtggtaattccttttgtgatatggctctttatgtatgccgtattgcctggattatggggtgaattcagcaatgaagaggtgaagaataatttgtcccacatctttattaactttattcctcgtgcttctcatttatggtttatatatatgctgctgggtatttatctgataatgcctgtgctgtctccgtggttggaacgtgtcagccgtcgtgaagaagaggtgttcttgggtatctggttgtttactacactattctggcatgctcatgagattttcggagatgtttttggggaatgttggtggaatccatatcctttgttttattacgtatctggttatgtgggatatgtggtgatggctcattacatccgtaaatatttggactggtctattaaaaagacgttatatatagctctaccttgctttttagtcggatatttattctgtatagggtcattctatacacgttcgtttacagtggaagaggtaaggcagttagagttaagttggcagaccacatccatagcaccggtattgatgagttttggggcatttatgctgatacggaaaataacttgtgcgagagcccggatatacaaggcaatctgtgatgtttcagctatgagttatggtatgtaccttatgcatatgctgattttaccatatgtatttggaatatgtaatcctgtaatgtctcctccattggctatatttgctacggctataatcacttatgtagtatgctatattatagctaaacttatatccttgtttaagtttggtaagtatattgttggttagagatggtaagatatggcatttaatgctataaaccgtgagatataggtggcatgaattgaaaagatcgtatctttgctatgtgatatgaaccatagtctttaatcatcatgaaatggcaactttgtaaatagcttcgtttagtatgatagggcagcagctaagtctgttgcccaacttgattgtgaccgtttccgtcacaagatattaaaatactaaacatacaaaaagaagtaattacaatgaatacgaaaacatatccgcgtaccaatgattatcagactatctatttgaataccattatcaacaatccgaatatcatagttggtgattataccatatacaatgactttgtaaatgatccggctcaatttgagaagaataatgtcctctatcattatcctatcaaccaagaccgcctgataatcggcaaattctgttctattgcctgtggggcaaagtttctttttaacagtgctaaccatacattgaaatccttgtccaactacacattccccttgttctttgaagaatggggattggataagaaaaatgtaacttcagcatgggataataaaggcgatatcattatagacaatgatgtctggataggttatgaagccgttattatggcaggcgtgcatatcggagatggagctgtcatcgcagcacgggcagtagtaactaaagatgttcctccctacaccatagtaggaggaacacctgccaggaaaatacggatgcgatttgaggaagagataatcgttaagctgcaacagatacaatggtggaactggcctgttgagaagatacgtcagtccttaccctatatcatgaatggaacggttgacagacttacttaattcctctctttgtatcagaatcatatctccatttttcactttatgcttctgaggtggtttgtttcctgaaatcgtaatgataccatcttcgaacatacgtttcacctgattggcagagagtgagaagcgccttctgattaatgatgataatttgagatcaaactcaaactcgcacttgatgtggattttgataacctcattggatagattcagcaaatcttccaatgaggtattaggaatgacttcgtattctacactaccataatccagccttaggttattctttctctccatttcagtagaaaaagcatacttccaggctgtgtccttatcattcattgaaaaactatggaataatgtcttgtcaatcaaatccggtttactgcgtgataacaaagtgaggttgcaggtgttgtcacacttcacgcatctgtaaatcaaccatacatctatgttcttcttttgagcattcatcctgaacttgtcgctacaataaaatcggtcactatcgcagtgactgcatttcttaattaataaaggggtattcttcacctttacttcccatgtaattgttgtctccataaataagctattatctttctttgcgggttaagtaattttccggcaaagttggatattagccatttgcataattcacaagatgtcacaagacactatgaaatattctttgtttacctgtcaagttcgtccatcatttgggttattttctctttcaatttatccagaaattgtgtcctgcttttcttcctgttcctgatttcaagaaatatccggtagaaatcaccaatctcaatatcaaaaagagtttcgcagcagaaagcgatttctttcaggttcgtgttaccattattaaagcattttccggcatatagtgcataaatgaattctaccaatgacaccttactttccgtccattgcaatagtttgctttctatgatggaggtgaacttaaggtgtagtttctccgataacgcatcaatctccgtggagagatagtgagtgagttgcttatttgctaagatctctgctacgctggaatcatgcaaggtggaaaaagaagtatctctgtccaacgagtggcagtgaacatctgaaaggatatcataatgctttctcatgaaatacagatgatctgagtctgttttaccggcttgataatagttatagaaattcttgtccgaagagatatttttcagactttcatattcctccttcaggtatttatattgagctgacggtgatttcccgatccgattcctttcaatctgatacagacggatataaaatatcagtagaccggatatttgtggtttccggactttaaagaaaagaatctcctcctcgggattaataaactgatagtccgcaatggttgcttttagccgggcgagtgaagtctgtatgaagccgactatttgctttatcttatcgaggatatcaatatcttgttgctcaattctttggatttctacttctatgtcttgcttaatgttctttacgaaattctccattcgcattcagcgcatccataactttcaggcggttgctgcgaagcctgctaaaagtctgaatagcaaattacaattgccttgcagagacaatgtagttaatactaaaaatgataaaatgaaaaacctgtctgaataagaattattcaaacgaaagaaattagcctgtggtttgtgaggctaatattaagcaataacaaatttaagaattgtgcccaaaatagttgcttttagaattcggggcaaatatagttctttttttgtaaatcccctaaatctacagtcaaaatgtagattcagaggatattgagtataaagagtattgaattgaactatcagaatatatattgtacaccaaactggtatccgatatacagttgttgcagtttggtagactcagtctttttccataaggaatggttcgggaatattttgctgttgcttacatctttggtcatcatgtagtttatgcctacccctccgaacagctcaatatgcttcccgattctgaaggacggaatgagtgagtatccagtattcaaaacaggttcatccgaatcgtttccgatggttgaggctttaagttcattgttaatcctgaaccaggaagtaacgggaatatgagcgccgaatccaccttcagccaccaatgagttattctcagttttatggttatatccaacgcctataatgccataagtgtatctgcctcccgaacggaatgtggctaccgtactgcccaatgcatcataagtgacggcaacccccatctcaccatttttaatgatgttgattaatccgatggggcagtcactcttattcgctatattgaccagtccggcaaattgcacgccattgacctcttttgcaatgttgactaatccggcaacctgcaaaccgtttacttctttggcaatattgactaatccggcgaattggaacccggtcatttcagaagctgtatttgccaaccccgccatttggaaaccactgaacttattcttatttatattagccagtcctgcagactgcactccctgtccgttatttcctacatagtttgaaagtcctgccatctggaaacctttggcatcattcagaataatgtttgagatacctccccaggtgaatgcctcttcgtttctggaaatgcctacaagtaagttgagtgaaacagtattcgtatactgatgcgaataggctccattggtactcaggggcgggacaaagctcaattgaaatacggttttcttgtcttcattggattgagcaaacaatgcgctataaactaatacacatagtattaaaactaaaatcttcttcatcattttggttttctttgttattaatctttatatttctatcatcttgatttcggttacaaaagtaagtttaataattcttccttagagagtttgtagacgaaccatactgtttcttatgacgaaatgatgaaaataagtgattattcccgtaatttctttggtatgatacaatcctcaacatgtgataaactaactcccgaaatgcaagaatctattctcgaagatgcataaaactattcatactataactgttattaaatcttacaacaactgtgttactttcttacaatagatataattctatcttacaacaattgttgtaagaataaaaatgtgcattctgagaattagtttcttgcattgtggcgattacttccttgcatcgttgttactctttttgttggcaccgaaatttgctattcgcgttctatatcttgcatcctgaaatttgcttgggtataaattagtatctttgttattcattttaaccacgacatttcagatggatggcaatttttatatatataccgatctctctgcccttcctgtagatgaacatgaagcgtatttggcagaaggatttggtggagtttgcacaggtggaacggctgtaatagaggttttttcagtcagccgccggatatctaaaaacgacctggtgacagttttgccgttacagtcagtattaatccgtgaggtaagtcccgatttctctatgactttcttcaaaatagataaaacgatgttcttggataccatgagtagcctggggaagattactcctgattttttcttttatatgcggaagaatttccaggttcggttgactcggggcgaagttcagagatttcttggtttttgtcgtgcaattgattttcggaacagttctgacgatcccgctttccggcgggaaaccatattgcacttgttgcgtatcttttattgggatttctatgttcatttccgcaagaccgtaagccgggagggagttcccatccccttgaactctaataaggagaatattgctttccggtttgcaatgctggtctatgaacactataagcaacataaagaaatggcgttttatgcggacaagctgtgcataactcctcaatatctgacccgagttattcaggaggtaaatggtcagtcggcccgcgagttacttgcagatcatgttgtactggaggtgaaggcactgcttcgagacgctaatcttgacataaaagacattgtgcggcagacgggtttttcaaaccaatcgtcgttaagtcgcttttttcgccggcatacgggtatgtctccgacagaataccggcgtacaattcacattattcgctaactacaaaaactgataaatggaacgactggaaacacaaacttgcaatggagatagtacatcttttgaaaaagagatgctggcattgttagatgagcagattttcttgacagatagcgtgttcgcccgtctgccgatgggtgtggaaatttacgatgcgtcaggtatactccgttgcttaaacgaacgggcacgacttatgtatggtgttaagctcgatgcggtaatcaacaaagtcaatctgtttaaaagtccttatgtggacgaggcgcttttagcgagaattcaatccggagacgacattgtgcttgaatttgaatatgatttcgaccggatgaataaagagtatttccatacttccaataaagataccattatctacgaggtcaagattgttccgataaccaataagcaggggactatcgtaggccatatattgctcaccaatgatgtgacttctaccaaagaggcggagtatcggactgaagaaagtaagaaaaacctggagatggcgatggaggctgcgaatatgtcttcatgggtatacgacgtgtacaaaatgaagttcgggatcttgcatggaaattctgttttcaaaagtggtatgtccttggagcaattgttaccgatgcttcatccgcaggactgcgctccgttaagggaactattttcccggctgataaacaaagaggtcctgcaggggcagctcacagtacgtgttttcaatgaacaggaaggagaattccggcattatgagagccgtatgcggctttcgaccgagcattttggtaaattgcagattgtaggtaccttgctggatgtaactgaaaagctccggatggcaaaaaagacacaagatcttttagttaagcgtgaactggccatgaaggtcaacgatatagttcactgggatttcaacgtgcagatgcaaacattcgaagcttacaatgatccggtaaacgattatgcttctgacaagttggtatctttggaagagtacttgaatgtgattcatcccgaagacaggtctttggtcaatgatgcgctgcaatctatgctgttggggcggaatatgaatataaatctcacctgccgtattcagaccaggcatgatgatacatggcagtactgtaatattacgggggttcctttcgaattcggagagggcggagaggttatccgttataccggctttagacagaatatttccaaactccatcagttgaacgaggagcttaaagaacggaactacaagatggagctgactttcaaaactgtgggtatgtcctattgggattacgatgtgaagacccggcaatatcggtcattcaatgatccggtgaatgattttaatcccgaaaaagcaattatgcctgaggattatttgaaagctgcccatcctgaggatacggaacgtgttcgtgaaaatatggttggcatgtctgccgggcagtataaggagttctcgcttcagtatcgttcccgtaccaaatgggatcaggattggcagacactgattgttaccgggcttccgtctgagcgcgacaagaaagggaacgtcattcgctataccggtatcgctttcaacaatacgaagtgggaaaaaatggctcaggaactgaaagagatgaaggataaggccgagctctccgaccggttgaagtcggcatttctggccaatatgagtcatgaaatacgtacaccactgaatgccattgtagggttctccgaattgctggtcgacagtgacgacccggatgaaaagaaggaatattggcatatcatcgagtccaacaatgacttgttgttgcgacttatcaatgacattttggatctttcgaagattgagtcgggaattattgatcggaaacgtgaacggtttaacctgacacaactgtgcaatgaactctatgtgatgatgcggtcgaagattccgaacgctgacgtggagttggtccaagataatccttgtccggaatgttggattttcctcgacagtaaccggcttaagcaggtatggatgaacttcctgactaatgcggtaaaatataccagatcgggatatatcagaatgggatactcggttgaaaaagacggaattcggttttatgtggaggatacggggacgggtatccctaaagaactacaggatcgggttttcggtcgtttccagaagttgaatgaatttgttcaaggtacaggacttggattggcaatctcccgggcaattgttgaagctgcgggtggagagatcggattcacttctgaacaggggattggatcgaccttttgggcatgggttccgtgtgagatttttcagcatggagacgtcggttgtccggaaacaactcttccaaaccgtcgtccggtgtttagcgaagacagtgacaggaaactcagaattctggtggctgaagataacgacagcaatttcttgttagtgcggagtattcttaaggattacgatttgttacgggtgaccaatggtgtagaggctgttgaggagattcgcaatgggaagtttgatttcgtgcttatggatttgaaaatgcctgtcatggacggtttggtagctactcggaagattcgagagttcaatagtgacatcccgattgtagcacttacagccaatgctttcgatactgaccgcgccaatgctatggatgccggatgtaatgctttcttgcctaagccggtaaaacggaagcaactgtttgaactactttcagggacctgtcggtaagtttgagataaatagtaactcgcttgtttagtgtgcttcggtagcagctcttggaataacttctaccttattctaactctgttgcgcagatatcgattgtactcagtgcgtccgagatatcagtcggggttattccttgacattcaattctcagtatcttctcccaatcttcaaagtctacgttccatacgtggatctgcggatattgggtgaataacttttctattttctttatttcccgcttcttttctatagaagtccggaagattaaaatattgtctgtcattgcgataacttatttaataccacttatgttatttagtctgtttagcctttctggaagcacttcgtttgatgcaaagataagccgaataatctttccgtaaaaagtttgtagaccaacctacagattccttatgacgaaattaagaatatgagtgaccaacttcttttcctgtatattcatactgcttcattgggtttgcaaaaatagcgtttggattttgcatacgcttgtaaaaaaacgccattttgctatacggttctgaaacgttgtctgtaatctgatggagtaattcaatcagtgctaatgtagattgtctcttaatccatgatagtgttttggcatcgaccatatccgtgaggctttcgggaatacccggaatgaatagggtatctatttcataatccagagatttttattattggaaaaactgacttcctatcatgaaatgtgcttagtgaaagaggcgatggctttttgaagaatagacgtttttcttccaaatgtacttttatgcttgcataatttatatatttgcagcataaaaatcttgtattatgttaagaaaagcaccttttttctcatatgttgtaagaatggtaacattctttggttttcttgggctatctctttatatgaatgcccggaatatacagattaaggatattccccatatagataaattgtccacgaatgtcatcaataccatttttcaggattctgaagggtatatatggtatggtacagcggaaggattatgtcgtgatgatggttataatatccatacattcaggtctgactttaaagatccggatatgatgccaagtaatgtgatcacttgtctgggagaagacagtatcacacacaatatctggattggaactgataagggggtatatatcttaaataaacaaacttacactattgcatctgcggatatcgcagagcttaaggatatcaatatagagggaatcatagtgacctcagatcactctatatggataaatgtctatagaagaacgttccgactttcgccagaaggagagattctgaaaatatactcattgcaatgttctacgggtccgggagaggagtatgtactgtatgaagatagaaaacatcaactgttgctctctatatctggtaaaggattacataaatggaataagcaaaaggatgaatttgaactattcttcccttatactgataggataagtgatcttatacaagatagagagaaagactattattggctggcttcctggcaacaggggattattcgtttggatcccttgaattctgttaaggaattgcaatatgttcctcaaccattacctatgaattctgccgggcaaatagccaagacggctttacatcttgtgcaagatgatgtgaacaactatatttgggcaatatcatggagtgacttgtttgcctatcaggtcacaacgggtggactgttgaagcaggtagatacctcaacgtttttgccgcaatacaacaaagcattaaagcgtattattaaagatagggatggcaatctttgggtgacttctctggataatcacaactttatcatctattttgatgaggataatttgcatgaatacaatatcgccccattggaaaaacaaataaagtggacaccaatttttgaaaatctgtgtaaggatgagaaaggaatattttgggttttccaaaggcgtctcggactttgtatttatcaaccggagaaagataaaatcgaatgttataccagttcgaaagcagtcagtgacagtccatttctggtactttcttatttgctgaaatcaaaaaaacaagggctggtatgggtagtaccgcaaagtagctgtgaattatatggcttgagccagaataatatggagatagaaatagaacgtagggtgaatttgttttcggtatcaaagacctatgatgttatcaattatttatttgaagataatgatggtaatctttggattgcagcaggtaatcatttgtttatctaccagatagaaagtgagaagttggagcttgtttctgataatataggtgttatcaaaggtttggctcaaacagaggatggtattatctggggtattgtaaaaaataaaggcatcatcaggattgacagggaaaggcatatgacagaatattctgcccctcattcttttctatgtgtagctgcagatcataataaattatggctggggactgataaaggaggtattatgttatttgattctgaaaccggctcttttgaagattataatacggcatgtggagtaaacggagacaaaattagcaatatcatagtggatcgttttcatcatgtatggataacaaccagtagggaggtcaaggaatttaatcctaagaatggagcttacagaagtttctatgcatccagtaaaaatattggtttcaaccgttttcttccccagtctgtgtttgaagatgctgacgggcaactttactttggtggtattcctggtatattatctatttctccttctcaacgtctggacaatatttcccaacccaaagatattcttataactgatatacggattatgggacggagcattctactggataataaacggccgggtaaatcattgaaagttgttgatatatatccggaagaacaaaatattgagatacagttttcatctttagactatcagaatagttcgcggatacgatatgcatatcgcttatccggaatagataaagagtggatatatttgtcggcaggaaaaaactcagctttctataataagttgagtaaaggtaaatatgtgtttcaggtaaaggctacagatggaaatggtttgtggagtgaccatgtggttgagatcagccttaaccgccttccggcctggtatgaaagttggtatgcttatacggtatacgtattgtgcatactggcgattacctactatttctatagaatggtacgtaatcgcattcgtatgagacaagccatagcaatggggaaaattgagcgccagaagatagaagaaatcaatcacgccaaactgcaattctttactaatatcacacatgaactactcactcctttatctataatttcagcctctgtggatgaactaaaggaagaaataccaagtagttcgcggcttcttcaggttatggagaacaacacttcccgcttaatcagactgatccagcagattcttgaattcagaaaggtagaaaacggaaagttgaagttgaaagtttcttgtggtaatatcagcttattcctgaaaaactccgttttggcttttgctcctttggtaaagaagaaaaaattatctatttctttggaggcgactgaagagtgttctggatatttcgatgtagataagttggataagattatatataacctgctttctaatgctgctaaatatactcctgaaggaggtgccataaccctatgtcagtcttatgatgaagaaaccggattactgaaaatcactgtcaacaatccgggagaatgtattccggaagaaaaactggcgcatttgttcgaacggttctatgaaggtgaatatcggaagttccatactattggtaccggcatcggcctttcattgacaaaagatctggtggcattgcatcatggcactatccatgcctttagcaataaagaggaaggcaatacatttgtggtacaaatacctgtgcggcgggaggcattcaaagaagaggaaattgatgaaagtatggagtatgcagcttataatgttctgcctgttggtgaagtagaagaagcagttgctacggatatggctgaaagagaaccgggtagttcctctgtattgctggtagaagataatgaggatcttttgtcgtctatggtccgtttgttgcagggcagatatcatatcttacaggcaagaaacggggtagaggcattggctgtgcttgagaaagaagaagtgaatctgattgtttcggatatcatgatgcctgaaatggatggaatagaattatgtcgcaggattaaagagaaatttgaaacttgccatattccagtcatcttgttgacggccaagataactgatgaggatcaggtaatggggtatgaatcgggggcagacggttatatctgcaaaccactccgcttgtctgttttattagccaagatagacaatttgttgaagaagagtaaccgtatgggaatagattttcgtaagcaattagtgtttgaagctaaagagttgaattttacttctatggatgaggcttttatccaaaaagcagtggattgtgtgaatgcacatttggatgattgtaattttgaacatgcacaattcttggcagagatgggaatggcgagaactactctggctgataagttgaagttattgacggggcttactccttctggatttatcaataatgttcgtctgcaagctgcatgtcgtttgatagatgaaaagaagaaaatccgtatttcagatctggcttatgcagtgggattcaatgatcctaaatatttcagtctttgtttcaggaagaagttcggactgtctcctacagaatacatgatgaagtatgagaattgaatttattagcaagaaagtacctttttgaaccatcagtctctcttttccggtaatagttctccttctttttatttatattcctctacttttgaggacgtgaattaattctaaatataaatatgaatttaaagaaggaaactatgattaaactaaaaacggcaacattgctgcttgtctttgcatgcacctttttctgtgtttgtgatagcagtgccaagactggaaaaaattattatgtagatgccttgcaaggtaacgacgatgctaatggattgagtaaacaaacagcttggaaaagtctggagaggttgaaagatattcagcttcgtgcaggagattcgttactatttcgaagagggtctgtttttatcggcattttggaactctcagcgaaggggaaggctgataaacgggttattatagatgcttacggtatcggtagaaaaccatgtatcaaagcaccggacgcttcactatatacaatattagtacagaactcggactaccttacactacagaaccttgaagtggtaaatactggtacagaacggctggcacaccgcacgggtgtaaaagtgctgtgtgagaattacggtgtatctcataacatcatactcaatgcattggaaatccatgatgtaaatggtagcttaatcaagcagaaaggaggtggttctggcattttaattgtgaataaaggacaagatgtaatatcgacctttgatggattgaccattgagaattgcatcattcgccgttgtgagaggaatggcatgatttggtcttcctatagcagccgtaataattggcatcccagtaccaatactgttgttcgtaaaaacttgatagaagaagttcccggtgacggtattgttccgataggctgtgaaggagcactgatagaatataacttgatgcgtaattgtccgggaacactaccgcatagcgaagctgctgccggtttctggccatggagttgcgacaacactgttcttcagtttaatgaagtgagtgaccataaagccccttgggatgcacaaggctttgattccgattataattgccataatacgaccattcaatataattttagtcatgataatgatggggggatggttttaatttgtaattccgggacagacggtggagtaggcaatcagggtacggtagtacagtacaatgtgagcattaatgatgctattcgtccacgtgccacacgcagtggtatattttctgctactattcatatcggtgggccttgtgaaaatacgctgataaacaataatatcctgcatgttaatcctaagacggcttcgttcatagaccgtagtatcattacatctgattcatgggatggatatgctaataacactatatttaaagaaaatatcttttttgctcctcaggaatcggagattcgtcttaccaaatccacaaataacatctttgatggcaattactatctaggaaatttcataggaaaacctgccgataaaagtgccaaggatgcttccgcttattactattcatgtataagtaaagacccaatgggatttgatagtttgtctttccttttcgatacggtaattgttggggatggggctgctgtactgaaggtagtcagtaaggatgccattcatcgattctttgaagatatgaagaattgattttttatctgaaacaaaatatagcgatagtattaccggataataacggtagtgctatcgctatattattattccgcaccgtctgaaggtagagggggctttaccgaatttctttttgaaacattggctgaaatatctcggatcgttaaagccaaccttataagctacttctgatatattgtattgcctttccgacaataggctgcatgctttcttcatgcggacattacaaataaattcactgggtgacaatccggtcaatgctttcactcttcgatagagcatggatctggatatatggatttctgcttgcaagagtggcatggataaatccggattatccatatgtttctcgatagcagcaagtatttgtttaaggaatgcttgctcggatggattgggcgcaattctttgatacatcgattggttctgcatttgtgcagacaatgcatttgtttttgatagcaattgagtaatatagcttgtaatatcttcgtaaagagtcgaaggaagtattatgacttccagtttttctgtaaccggattcatgaatggattgtcaataaggtatgctctcatatgtttttagaattaatgaaataatatatggagcaaacttccgaaaaagtgagtaataggagggtgaattattaccggaaacctgcttataaggcgtttataaccctttcccggtaatgattcatcctcttattccttatatccacctacttttggctaacgatttagaacaaagaacatatatgcatcttgttgaattagtcaccttaattatctaataaattttaaaagacgatgaaaaagaattcgtttagattcaaaagaaatcgaaaggcgataacagccttgctaatctgtgtaggtttcgtcggtattcatcctttggcggtatttgccgaagatgatgttaatgtcgtacagacagtgcaacaacagaaacagaccattactggtattgtgaaagacgcaacgggggaacctgtgattggagccagcgtgaaagaaaaaggagatccatccaatggtgtgataaccgatattgatggaaacttcagattgagtgttcctgctaatgcaactattgaaatctcatttatcggttatcagacggccagtgtgaaagccatttcaggaaaacctttaaatatagtattgcaggagaatactgagatgttggacgaagtggttgtagtgggttatggtacgatgcgtaaaaaggatttgacaggttctgtcattcagattcgtccggacaatcttgctaacgaggcacccaagacagtacaggatgtactacgtggtacaccgggtttgaatgtgggtatggatgcttctgcgaaaggtggtggttctcttcaaattcgtggtcaacgttcactttatacagacggtgggcataatgatccgctgattattcttgatggcatgatgttttatggagaactttccgaactcaatccggatgacattgcgcaaattgatgtattgaaagatgcttctgccgctgctgtgtatggggcaaaagctgctaatggtgttattattgtttctaccaagaaaggaaaaaatggtaaaccgatgattaatttcagtaccaactggagcttttctacaatgggagctaaccgtgatgtttatgatggggaaggttatttgaagtatcgccgcgattggtatgttgcaggtacatacggtgtaaaccctgaaactggtgcttatgaagagtatcaggcggataagaaaaaataccctgcaggatattatgatgctcccacacaggaaaatctgaataaatacggtattacccttgaccaatggcgtgcatataccaatgcgggttcggacatttccgaccaagaagtatggggagccactaggcttggtttacagggaaatagccttgccaattttctcttgggacaaacttttgattggtacgatcattcttttcgtacaggtctcaaccagaattacaacgtgagcatgtctggcgctaccgatcgtgtgaattactatttctctctgggatatatggataatgaaggagtggcagtaggtaatgattataccactttccgttctaacatgaaagtgaatgcaaaagttaccaactggtttgaagtaggcgctaatgtcaacttccaagagcgtaccgatggggataccacggtagactggggcaagcagatcactgaaaacagcccatttgcttcttatcggaatgaaaatggagaattggagcgctttccgatgggaaatgtttcaggaaatacggggtacaactatgattacagacaacaatttaaggaacgtgagtcgggttatacagtacttaatactattttgaatgccaaattgacgttaccgttcggcatcacttatgccttcaatatagcaccgcgttaccagtggtactattaccgttcttttcagtcttcaaaagatcctgatgtaacggcagggtcggcaagccgtaacaatggtaagcgttttgactggtcactgaacaacactttgacttgggataaaacttttcttgagaagcaccattttacagtgacactagtacaggaagctgaagaacgacgttcatggggtgacaatttgagtgccaacaacttacaaccgactgatgccttgggcttccattatgtaaaagcaggtgacaaagaatccagtgctttcagttcggatgatggacatgaaaccgctgacggtatgcttgcacgcctgttctactcgtatgatgaccgatatatgtttaccggctctatacgccgcgacggttattcagcttttggtacttccaatccgcgtgcaactttctattcaaccgccttcggatggactttcacaaatgagaaatttttcaattgggaaccgatgagtttcggtaagctgagattttcttggggacagaatggtaaccgttcattggctaatccctatattgctcttgccgacctgggctcaggtaccggaggtacttatggttatgtagacgcaagtggtaatacgacagaatatcgttactttacaatgaaccgtctggccaatacgcatctgcaatgggaaaagaccactgcctggaacattggtttagattttggcttcctgaataaccgtatcagtggtagtgttgagtattatcacatgcctactacacagatgattatgaatcagtccttacccggattttctgggtttggttcagtcactacgaacttgggagaggtgcagaaccgtggtgtggaaatctcattaagtacaacaaatattaaaaatgatgtgctggaatggaatactacgataggattttcatttaataagaatgaaatcaagcatctgtattatgagtatgaaaatgtgcttaatgctcaaggtgaagtaataggtactaaagaaagagatgatatttccaataaatggtttatcggacagcctattggggctatctgggattataaagtaaccggtatctggcagaaagatgaagtggaagaagctgccaagtatggacagcgtccgggtgaccctaaggtatggaacaatcctgataatgataaagtaaatgcagacggtagtgttactatcgtgtatgacaatgatgacaagcaattcctgggacaaagcagtccgaaagtgaattggtctatgcgtaatgaatttactttcttcaaagatctaactttctcattcaatatttattcaaagatggggcataagagtctggaaacagattacctgaataaagataatgcaggctcaaaagtgacgaatggtcagaatgtatatgctaagaagggatattggactgtagataatccgaccaatgaatatggacgcttagatgcacaaggtccgtcgggagtgactacaccgggcaaattacataaccgttcattcattcgtctggacaacatttcacttgcctataaactgcccaagaagttcatttcacgctggagtatagaaaaggcgattattagcggaagcatcaagaatgttgcagtttgggctaaagactggaaatactgggaccctgaaaccggtggtttggctccgagaacctttaatattggattaactttaactctttaattacataacggatatgaaaaagataaaaaatatagcattgataggtatgattgctgtcggtgtgttgtgttcttcttgttcagaagacttcctgaaaccggacccgctttcattctatgaacctgaacaaacctttactactgaagccggattgcgctctgttgtagctacgctggatagacacttgcgcaattactggacctattatcaagctgccaatctggtaactcctttctatacattgtttatgcataccgatttagctgttgccggaaaaacagatcagagtactatctgggcagatccatccgaacgcctgactccttcggacggaatgggcggcggaggcagcgaagtgaatcagttctcgtatttctggggtgaaacttatacaggtataaaatcagctaatacaataaccagctatatcggcaaaattaaggatatggacgaagcttccagaaataaatacattggttgggcttattttcatcgggcatatcgttatttgtcattggtctttatgtttaaggatgttccattggtgacaaagattatagaaggtccgaagttcgactataaaacaacttcccgtgaggccattcttgcgaagatggttgaggatatggaatttgccgtacagtgggttccggaacaaaaggatatgaaagagatcggtctggtcaataagggagcttgccgcatgttactttctaaactttatctggcaaccggacagtgggagaaggctattcagcagctgaatgaagtgatagataactccggttattcgttgatgacgaatacctttggtacttttgtcactcctttcaatacagaaacgtggcctattcaacgcaatgtgatctgggatttgcaccgacctgaaaataagttgatagccgaaaataaagaagtgatactgggtatgcctaatcgcggtatcggttcatcgaattcttttgttgctttcaatacaatgcgtgctctgggtccattgtgggatgacaagagtaatctattggatcctaatggagtacaagctgtgaaaagttttgctcgtagcgataagaattatgactctaaatatgattataatcgctccataggtcgtggtacaggttatttgcaccctacttattactctcaatatggtatgtgggaagtgaatggagtagatgatgagggagatttgagacgtagtacaaagagcggaaactggatgatgatggattctgtcagggtcaataatccttcttccaaatattatggtcagtatcttcagaagtcttggtgtaaggatacaatccgtgactggttcggatggcctcactataaaatctatttaatggaccagaatgccgaggcgaaagaaagtagtacacagttcaatggcgcttccagcagctccactacaagtggcatagccgactggtattgctaccgtctggcagaggcttatttgctgcgtgctgaagcaaaattttataatggcgatcctgccggtgctgctctggatgtaaacaaagtgagggagagagctcagtgcaaacagctttacacaactgtaaccattggagatatcatggatgagcgtgcacgtgaattgtatctggaagaatggcgctatcttgaattgagtcgtgtgtcttattgccttgccctaagcggaaaaccggatgaatggggaaatacgtatgatgtgaatacttatgataaacaggaaggtacagacccgaatggtggaagttattggtatcaacgcattatgcattacaatgaattctataataaaaatccggagttgattgtgaagaaccataaatataccattgacaagcgtaatctgtatttgcctattccacaatcagctattgatgccaatcgtttgggaaaactacgccagaattatggctatgacaaatatgatgacagtgtgccgatgtggggaaactggcaggaggctgtagccgacgaagataacctgtctaactaaattgggcttcggctcttctgagtagtaaattcgcattttttcaataggtattataaggaacggggtgatcgttcttttcttgagatcaccccgttttcatttgtatcaatcaatatagaatcaagtatgaatagaataacaatgaaaggactgttttttgcttttctgactcttattttttgttccggatattttccgtgtgcagcaaccgaacttccgaaggtgtccgatgtgtccggtattatccataaagtgaacagatactggcaaactacgcatcctaaacatagttgggcattctgggatcatgctgcctatcataccggaaacatggaagcttatttcctgacaggggataccgcttactacaattattctgaagcatgggctgggcataatcagtggatgggagccagaagcaaagataagtctaaatggaaatccggctatggtgaaagtaatgaatatgttctgtttggcgattatcaggtgtgttttcagacatatatcgacctttatactgtggagcctgacgaacggaaaatagcccgtgcccgcgaggttatggaatatgaaatgagtaccgatcgctccgattattggtggtgggctgatggactctatatggtgatgcccgttatgattaaactgtataaggtgaccggaaatccgctttatttggagaagctgcatgagtactgggaatatgccaatagcattatgtatgacgcagaggctggtctgtattatcgtgatgcgaagtatgtctatcctaaacataaaagtgtaaatggtaaaaaggacttttgggcgcgtggtgatggctgggtactggctgcattggccaaagtgctgaaggacttgcctcaagatgataaataccggtcagaatatgtcgaccgttttcggacaatggctaaagctgtagtcgcctgtcagcaaccggaaggctattggacccgaagcatgctcgatccgcaacatgctcccgggccggaaaccagtggaacagctttcttcacctatggtctgctgtggggcgtcaataatgatttattggatagagaaacttatgaaccggtagtattgaaagcatgggaatatcttgctacagtggctttgcaaccgaatgggcatgtaggctatgtacaacctattggtgagaaagctatccccggacaagtggtggatgctaattctactgccaattttggtgtaggtgctttcttattggctgcttgtgaaatggtacgtttcatcgaagatgcgcctatcgtcaatgaaggatatcaggtgacggataaaggtgcctggtgttggtttgccgatcctcgtgccttgcattataaaagtaaagatggcagtatagaccgaacctatatcggctacattgatactcatggaaatataaaagccatgcaatatgattttcataaaaagcagcagaaagaagtccttatccgttcctgcttccagccggatgatcatgataacccgactttcctgatactgcctgatgagcgtgtcatgatattctattcgcgccatacggatgaacgttgtttttactatcgcatctcgcgggaaccgggtgacattacaactttaggagaagagaagaaaattatcactgagaataacaccacctatccttctccctttattctttccgatgatccggatcacatctatctttgctggcgtggaataggctggcatcctacgattgccaagttatccctaccggataaaaaagataatataaacgtggagtggggaccttaccaattggtacagtctaccggagcgcgtccctatgccaaatatacgtcgaatggaaaagataagattcttttcacttatactacaggacatcctgatcaggagagtccaaatttcttatatttcaattatatcgatatacacactttgcaactggaagatgtgaagggaaatgtgctttcgaccatagccgatggcccgtttcagataaataaaagaagtgagtatgtagaacagtatccttatacggtggtagatagtcctgaagagcgtgactgggtatggcagatagccatcgacaaaccggggaatcctgttattgccatggttcgtatcagtgaagacaaaacctcacacaattattattatgcccactggacaggaaaagaatggaaaaagaactttctggctcatgccggcggacattttcatcaaagttcttatatcgagaagtgctacagtggcggaatgactattgatcctgcacagacaaatgtgatttattgttctgttcccgtagaaggcaaatatggacggaaatatgagatacagaaatatatgctgaatgatgggggagatgtggttgccgttgaggctgttacccgtaattcccggtacaataatgtgcgtccctatattattcctgattcggaagatactccgttacggctgacatggatgcatggcaattactatgactggattgtaagtaccacacatccgttggggtattgtactgcgattcattccgattttcgaggtttccctgttaagactgaaactgagaatattgagatgacagttgaacaagctaaggattttaaatttgatcttaaggaagactttgtaatttccgtaaccttgaagcctgatacggtaaaatatcgtggttgtctgttgcaacttggaaaactggggtattatctgaatgccaatactatgaaaccagaggtacgttatcaaagaaaagtatataccagtaccaatatgctgggaacagctgatacttgggcaatcatgccacgtggtacgaatggtaaatggtatgttccgcagaaatactccgagttacgtttaaagttggaatataagaacggtattttgcgtacttatgttaacggtctgcttgatcagaccattgaactattgccatttgtcaggtgatattaacgcccccatgttaattcaatattggtctttacgataaaaacagtcaaggatactatataaccataatttaagtatacacatcaatgaaatcaaatatactaattctcttttgttgtttcttgtttttggcgtcctgccaagctccttctattgaagagtacactctgcttcctcacccagtggatatcaaatatataccgggaatggtgaaactaaaaacgcaaccgacacttgtttatccgggtgaactggcaaatgaagcattactgctccaatgttacttgtcttctgatttctctgtccaggccacattaaagaaaaataagaaaaagggagatattatattacagttagatccggcagtattaccagaacaggcggaaggttatatcttagatgctacttctgggaatatagtacttaaagccaattctcctgcgggtatattaaatgctatccagacattccgacaggttctcaaagtaaaagacggcaggctgattgtacagaaatcaactcttacggattatcccgttttctcatggcgtgctttcatgttggacgaaggacgctattttaaagggaaggaggtcgtttttgatttgctggatgagatggcggcattgaagatgaatgtctttcactggcacttgacagacgaccagggctggcgcatagagataaagaaataccccaaactaacggagattggtgcatggcgtgactcttcagaaatagaccattttggcagcaatcgatatgatggtagacgccatggaggtttttatacccaggaagagattaaagaagtagtagattatgcagcgaaaaggaatattactgttatcccggaaatagagatgcccgggcatgccagtgccgccattgccgcttacccttggctggggacaagtggaaaacaaatcaaagttcctggtaagttcggagtgcaatatgatatctttaatgtggctgatccacgtgtgatacacttcttgaatgatgtaatggatgaagtgataagtttgtttccggctcctatattccatgttggaggtgatgaagtgagatacgatcaatggaaagagtccacacttgttcgggaatatatgaggaagaatgatttgaggactcctgccgaattacaagtgttcttcacaaacaatgtgtctaatatattggcttctaaaggtcgtcggatgatgggttggaatgaaataaccggtgataaactgcatgagtttcaatcggaaacagatacgaaaggaaagcaaaagttggctccgggaacaatcgtgcattgctggaaaggagatcctaaattaatcaaggaagctatagagaaaggatatgacgtggtaaattcctatcattcgtatacttatctggactatacttatgaagctattccactggagaaagcttataattttaatcctgtgccggaaggtctgacagagaaacaaaagggtaaggtacttgggctgggctgtcagatgtggggagagtttatcccgacggtgaacagtatgaacttgaaaatctatccgcgcttggctgcctatgctgaagccggttggactcaatcttctaataaggattacaatcgttttctgaatgtattggatgcattcttgaagaaatggaaacaggaagggattattatcgaagagaatagtgcatggtaagaaataccggagaggggcatattggattaatgcccctttttctttatcggcaatcgtggaaacaacttcctgaaccgtaccaaatgtgtcgtaatattgcttccggctataataaacgtcacagccaggataatcaatataattccgcaacacaatctgggtgtcagactttccccgaagattgttactccgaagaatacagccgttacaggttccaaagctccgaggatggctgtaggggtagaacctatatattgcacagcttgcgtagtgcagaggaaggatatggctgtggggaagattgccaatgcaatcaggttcccccataaataccatttatcgacaacatgcaggctttgcccgaaatctacacggactaaaaagagtgataggccgaaaagcaatacataaaaagtaactttaagcgttgccacatcctttaatatcggtcggtttacccctacgatataaatagcataggagagggccgatgccatgactaatccaacaccaaccagactaagcgttgtaccgtctcctcctttatatagtaacccaataccacttaaagccagaaagatacataagactgtttgtaatgtgattttctctttgaaagcgacagccataatcagtgccaccaaaataggatagacaaacagtattgttgaggcaataccggcttccatatagttatagctttgaaacagggtaagagaagaaatggcgaccaaccatcccagtatgactaacggcaatatttctttccgctttagactaaaacttctacctctcgctttgagcataatccccaggatgggaatggcaaacagatatctgaagaaaagaacggaatccggattcataccttccttatatagtggaagggtaaagaggggattcataccataagtggcggcagcaacggctcccaatatatatcctttgacctttgtattcataaacactaaataatttcttagttctggttttctttgggggtgcaaaggtaaatctttcctttatatattgtcattacaaacctcttaatttttactttttcctgccttggatgacttcagttttcgtattctcaaaatattatttatctttgcgccatgacaaagacattcaaatcggatttggtttaataaacaatctgtgtttctgatacagattgtcccttcgtttactctcggataactcctttcgagagtagttttctattattataattcaagtttaatctgcgtacaatgatgaaggcattgttatgctttccgtgtatgcaaaatacattaagaaaatgagtaacgaaaataaaacaattcacgatttcgaacttaaattaatctgtgacttcttctccaatatggaacgccaaggacccggaagtcctgacgtaacactgaaagcgctgagctttatagataacctcaccgacaaatcccttatcgccgacatcggttgtggaacaggaggacagacaatggtattggccggacacattcccgggcagatcaccggacttgaccttttccccggctttattgatatcttcaatcgcaatgcaaagcaagcgggtttgcaggacagagtgaaaggcattgtcggttctatggataaccttccttttcagaatgaggaattagacctgatctggtcggaaggagccatttataatattggttttgaacggggactgaatgagtggcgtagatatttgaaaccaggaggatatattgccgtttctgaaagttcgtggtttactgacgaacgtcctacggaaatcaatgacttctgggtgaatgcgtatcctgaaatagatacgattcccaatcaggtggccaagatacacaaagcaggatatcttcccgtcgctacatttattctgccggacaattgctggacagagcattactttgctgcaaagattgaagctcagaaaatcttccttcataaatatgcgggaaataaaatcgccgaagaattcagttcgcttcagtttgatgaagaagaactatacagtaagtataaagcgttctacggttatacatttttcatagcaaaaaagatagaacaatgattcatttgaataattacggttggaatgacaagttaagccaactaaagcaagagtcaatatacaatgcccttacacatggacgtatatccatcgtacaccgcacatgctacgaggtcgtttcagaaaacggcctgtttcagtgcgaactgacggggaatatgatgtatggaaaatcagactttgaactcccttgtaccggtgattgggtactttttcaaccattcgacgaacataaagggattatagtggatatgttgcctcgtgaacggactttatgtcgcaagaaaaacggaacggttgctgataaacaggccattgcctcgtatgttgacaaggcatttatagtgcaaagtcttgatgataatttcaatgttcgcagagccgagcgtttcatggttcagatgcaggaagagaatattaatcctgtattggtattcaataaggctgatttagggtttgacaagcagaaagttgaagaacagatcagacacattgcccgtcagataccggtattttttacaagtattcatcaacctcagacgattctccaattacgggagtctatatcggcaggcgaaacggttgtgtttgtcggctcttcaggtgtagggaaaagttctctggtgaatgcgctttgcgagaaatcggtattactaacgtctgatatcagcctgtccacgggaaaaggaagacatacttctactcgtcgggagatggtattgatggacagttcaggtgtattaatcgatactccgggcgtccgggaatttggcttggccattgacgatcctgattctcttgcagaggtattggagatttcagattatgctgcatcatgtcgtttcaaggattgcaagcacatcaacgaacccggatgtgccgtcttagaagcggtaagtagtggcgtattggaccgtaaggtttatgaaagttatctgaaacttcgacgggaagcgtggcatttctctacttccgaatatgaaaagcgtaaaagggataaatccttttcaaaactcgtggatgaggtgaagaagcgtaaagcaaatcgctaatatctattttaagagtgtgtcatttacctattgggtttgtgacacactttcattttatattttcagtgaattataaaaacgtaggtgtgaactcgatgcctaaggcacgggcaatataacttcttgccgtaccaaccttctctgctaactcctgttgagttatctttagtttgtaaactcttgcagatatttaactctgatttttctacactggaccttcacaatcgaggaaactatagttagggttcatagctcttgatacagttttgccgagacacttttcttctgtaatgctagtagaagtgttttatttccgtttcctgtaaaagccgccctattactttggggtcgagtggaaattcttgtacctttgcactcgtttttagaaaagaagaatcacgatgatcaataaatatgaagaacgtctgggaaccgagcgtatgttgccactggttttcaagatggcgcttccggcagtagcagcacaattcgtcaatttgctttatagcattgtcgaccgtatctatatcggacacataccgggcatcgggacggatgcattggcaggcgtaggggtaacaatttctctcgtggtgttgatttcttctttttcagcaatagtgggcggtggtggtgcaccgttggctgccatagccctcggacaaggtgaccgccagcgtgccggaaagatattggggaatggttttaccttgctgattctatttacgttaattacttccttcattgcctataccttcatgaagcctatcctgctctttacaggcgcttcggaacatacattgggctatgcggtcgattacctttccatttatttgctgggaactgtttttgtagagatttccaccggactcaattcctttatcaatgcgcaggggcgtcctgccattgccatgtactctgtcttaatcggagctttattaaatatcattcttgatcctatttttatcttctggtttgatatgggggtgaaaggtgctgctttggctacggtgatttctcaggcttgcagtgccgcatgggtactgtctttcctgttttcccggaaggcttctctgcctttggagaggcgctatatgaagttgaaccggggaattgttgttgcgatgttgggactgggagtatctccgttcattatggccagtacagagagtttggtgggctttgtgctgaatagtagcttgaaagattttggagatatttacgtcagtgcgttgacgatattacaaacttcgatgcaatttgccagtgtgccgctgacggggtttgcgcaaggctttattccgattgtaagttacaattatgggcatggtgataaacagcgtgtgaaggactgtttccgtattgcactgatcaccatgttctcttttaatctgattctgatgctgcttatgatcctgttcccttcaacggttgcatctgcttttacaagtgatgaaaagttgatagaaacggtccgttggaccatgcctgtctttctgggtggtatgactattttcggcttgcaacgtgcctgtcagaatatgtttgttgcattgggacaggctaagatatccatttttatcgctttgctccgcaaggctattctgttgattccgttagcattgatactgccgcattatatgggagtgaccggagtatatgcggctgaggctatatccgatgctacggctgcaatttgctgtacgctgttgttcttttggcagtttcctaagattttggggaaaatgaaataaggtggatagaagccttccaactactttaaagtgattattttcatcttattagtttgataatagagaaactttgattaactttgtaagtgctcatataatagtaattattaaatggaaaatggaataaatgataatatattatcacttataagtaaaactccggattcattgatgctgggtattgctgaacgtgtaaagttgaggcgactggaaaagggatggacgcaaaatatgcttgctacaaaatcaggagtttctttggcttcttataggcgctttgaatcgtcaggggaaatgtccttacgttcactggtgatgcttgcctttgcgctggatatgaccgatgaattcgaagctcttttcaacagtaagacctatcaaagtattgatgatatactaagggcagggcaactaaaacaacgaaaacgggggagtagaaatggataatatttcaataatagaggtctttatatctggcaggcgcatagggcgaatggctcttacgcctgaaggtatgtgtggttttgaatacgatgcggattggatacagaccggtttctcaatatctccattctatttaccgttgaaatcgggattgataatggctaagcgagatccgtttggcggaaacttcggagtatttgatgatagcttacctgatggttggggtaatcttctgcttgatcgctatttgcaagaaagaggaatagatccatataagttgaatattttagaacggttatctcttattggctccacaggacgtggtgcgttggaatattacccggataaaagtgttgtaactgatgctgagtatctcaattttgatagcttggcaaaagaagttgcaaagatacttgagagcaaggaaagtaaagggtcggtagacctgctttataaatatggaggttcatcggggggtgcccgtcccaaagtatttaccaaagtagatggtcgtgaatggcttgtgaaatttaaggctacaaatgatcctgctgatgtgggagagatcgagtacaactattcattgctcgctcgtgattgtggaatacgaatggcagaaactcgcttgtttgataatcgttactttggagtcgaacgatttgacagagctcctcaaggtaaaatccatacggtaagtgcagcaggattacttcacgctaactatcggattccaagccttgattactctatattgcttaaacttacactgaatcttaccaaggatatggagcaagtagcagaaatgtttcgattgatggtgttcaatgtattgatttcaaatagggatgatcatgccaaaaacttatctttccaatgggctaacggagcatggaaactttcgccggcttatgaccttttaccaagtaacggttttaatggttatcacaccacgactataaatggaaaaggagaacctgcacttgctgacgtcattacgttggcagctgaaatagggctatcaaaacaatatgcaactcagaccatagaagaattgactgagaaatgtgctgcaagaaagatggtaaaattcaggttgagataattaccggcttgatgagtatcatttagcttataacttgatcggttttagtcgtatggtaaagaaaaaaactcatatagacttctgtcatgaattgaaagcacagaatttaaaagttactgtcttgggaacatacaaggattacaactctaaaattgctgtaaaatgcgataaatgtggttgtgaatggtcgccgcgtgcaggaagtctattgcacggacatggctgtcccaggtgtgccggagtcaaattgaaatctcatgcggagtttgtgaaagacttaaaatccctgagagatgacgttatcataactggccggtatgtgaaggcactcgaaaaaactaaattcagattcttgaaatgtggacatgagtgtgatatcactcctgcacatgttcttagtggcaggggatgtccggaatgtggacgatcccagaaaggagcgtctcagcgcttgacgatggagatatttttggagcgtctccataaaatcgacccgaatcttgttgtcggcgaaggtgcaatgtatataaacaatcatacacttatgccgcttcattgtaatgcctgcggatatgagtatcaaataagacctcatgatgttctgaaccaacgtggctgtcctaactgtcacaggtcctgcacctcctttttagagcagttcatatatcactcatttgctcatattctgggcgaatctaaagtcatgtcaagagaaaaaacggtgataggagttgaattagacatatatgtgcctgatttaaaagtagctgtagagcccggttcgtggcactggcataaaaatatggtagcgaaagactgggaaaagcatctattgtgcaaagataaaggcatcaaactcataactatatacgaccactatgatgatgcaacagttcctttcgataattgcctggtgacacattgcgatcttgtttctcgccggaatacagataaactgattgaaataacaaaaaaggtcctctccgaattcggattaaattcgaaccttggtacaagtgagtgggaaaaaattaagaagaatgctcaaattgattcaagacgaatgagcactgaggaatttagagaagaactgtctaaaataaatgataagattgaaattattggtgattttgcaggagctaataatagaattaaagcacaatgtaaagtctgtaatcatgaatggcatgtgagaccgtcttctttacgtttaggttcgggatgtcctaaatgtgctggtactttaaaaatgacacataatgactttgttgaaagattaaattcattacagcccaatattatccctctggcagaatatatcaatattgatacttctataagaataaaatgtaaagtatgtggctatatatggtctacccaaccctatcatcttgtagcgaaatataatagaaccggctgtccgaaatgtgccaataaagcacggagaacccatgatgattttgttgaggaaatcgcaacgctgttgcctacaattaaagttataggaacctatgtaagcaggaataaccccatattagtacaatgtagtgaatgtggcaagacctggcaggcatatccgggaaatttattgcggggaagcagctgtaaaagctgtaaattcaagaatacagtgcgacaaagaagtaagaagataaggtgtatcaccaccggagaaatattcaatacatttaaagaagctgccgaaaaatacaatataagctgctcgacaatctgtttgtgttgtaatgatagctctaagcataagcatgccggaggattggagtgggagtatactatactgtgaatcacgctttttctatgtttcgggctttactaatttacagcctttgatatttccagacgaaatctattcaaaccaaagtaggaagaaaaccccatcgtttccttcctacccgattctttattttcagaagtttttttattatgtcacaaagacctttttcatcatttcttcttcatttcttgtttatggtgcttccgtcacattaactgttaccgtcaccttctttgccgcatccgacagattctgtatctcaaaggttgccgccgcatttgccgggaatggtcctgtggggaaatcctttgcattttggtccagtgtcaaggtatagtctatagcctcggtgctatgtccttccgtctt

SEQ ID NO: 6322 - DNA, 21995 bp, Unknown
  gut microbiota DNA sequence
ttatattattttttatatctttgcctcattaaacaaaaatacattggtcatggaaacagggaatttatcagaagattaccgtccgctgatactggtagcggaagacgatgatagtaactttaagttgataaaggctattattggcaaaaaatgcgagatattgtgggcgaagaacggtgaagagatggttaatctgttcaaagagaaccgtggaaagacagcagctattcttatggatatcaaaatgcctatcatgaatggcttggaagcaacaaagattatccgtgaagaggagaaagaacttcctattatcatgcagactgcttatgcttttacggctgaccgtgaaaatgcaatggctgccggtgcttcggaagtattggtaaagcctattaccttgagtgcattacgtacttgcttgagtaagttcttgccacggttgcagtggtaatagaattttcatggcataaattttattataacgaacgcgggatgacttcttaatgtagttgtcccgcgttcgttataatatttaggaagatatttctttttattctctataagaatgcttcttagcgcatattattggtacaatggaaaagaaccttgttttcgggactttaacgatttcatctcgtgcgataaatatgtttcagccaatgttcaaatacggggtcttgtagttctatccggtttcccggtaaaatatcaaccaaatctttttcagttgctgccttttttagatttttgatattagcagatgtccccaactgatatttaatgagtacttcttttgatgagaagtttgtaaccccatcggctactgccagtagaaaatttatttaccgtggtgtcaatgtatcgatgatattggcgaaaagcaaactaagttgcccgataatatcactgaaagcctcatcaactacttcggctgaggcaactgtcgcggttctaaaccacacttgctgacttaattgttgggtataataggggtgattcttcatcaggccggtaatcatgctgcataattctcctgaaatttcctttccggtttcagaaaactttcttccgataaattcgatccaatcctctttgggtatcttttccagaaataagatgtccccgaatttatagaaaggcatgttgtaattatgaaaaatatccagtagcatatgtcttttgctgccgtacaggcaatagcatacgttcgtatgtttctgccagtgcgagcgtagcttccgctgaaatgccaaagggtcgtcatactcgttgatattttgaaattcgtcgatacaaaccaccatctttttgccgtaatccctactgatggcttgtggcaaatccaagatttcatcaaatgtcattttattgtctttgaaatcaagtccgaaagataattcgcatgtttgagccgtatctgagaatgtgacagaaggtagtagttgccccaaatattttcggacggaagcggcgaaatcatcccatacggaatggcttattttcagtacggcagttgcgcttgagcagttcaacttctttttttctattcgtgaaattgttcttatcggctattcgtccatatacaaaaggtgttcccataatgaatgacgttgtttttcagtacaaagatagaaataaagatcaaaaggcataaaggttgctatcctacatcgtatatatagtatgtgaaatctgaaaaataaatagatgttggactcttaaatcaaacttacaaagaatttgcaaaactcttatttttgctttcgattatagatattattccgaatgtagttttaacaatcttgagttttaatggtttctttaatttgtttattttccttgttccgtctctttttcttccctttcctgcatcttccgtttcacaaactctattttcagatttgcttcttccatctctttcttaatttcagtgatagatgaaagtaactgtgccagttcataaatactggccactgcctggcggtctgccggagtcatcgtagtggagtaggggcgttcaccctgatagttcactttaatattcttgtctttattcagataaaggaaaccgataacattgccgtcttctcctattttataatcagctttttctatcttttcccccaggtcagttgtttcatagctatctttggaggcgggtgtttcagcaaaactaccatcgggtgcgataacctttacgctgatgtgatgaatattgcttggaccacaataaatggaagtcatgctcatttgtccggtttcgtttacttgaaagcggagatatgaacgatgcagatttttttctattacttgtgaggggtgcagatagttgcctattttctgatattcggcatctttttcgagggtgaatttcccttttatggcatccaattcgctttgtttcttttgaagcaggctatccaggtaaacaagtgttttttcctgttctttcagttctacctgctgcatcagactgatgccttcacgacgagtttcaaaagcttttgggtataatatcttaatgctgtcaatctgcatttttgcttcactgaagtctccccgttcaaaagcttcacgggcggtttgcaatttttcaccggcttttttctccacattctcgcaagagaagagcgtgcaacagaggcacgcaagaagtatcattgtcttcataactgttgttcttctgttagtgaggacaaaattataaataatatccgtatctttgcagcctcaaatatagataaattgtattttagttttcttaagatatcggatgtttggaacaattatttgtcctcactgtacccggtccgtatcaaagccgtacctggtccgtaccaagtccaagcgtataggtacggagcaaatacgaggatgacacggttcggatacatggaaggtggaaaaatagaccaagagactttctactcttcggaatgaaaactatatgattattttttaaagatgtattatggttgagttgacaacagaagaattgaaacaacattttagtgacgacatatttaaacggatatccgagacggcagatgaattgggattggaatgctatgtggtcggtggatatgtacgcgatattttcctgcaacgcccttctaaggatattgatgtcgtagtggttggcagtggtatagaaatggctgaagcattgggcaaatgtttggggcgtggagcgcacgtagctgtatttaagaatttcggtactgcacaggtgaaatatcgtgggacagaagtggagtttgtaggtgcgcgtaaggaatcatatcaacgtgattcgcgtaaacctattgttgaagatggtacgttggaagatgatcagaatcgtcgtgattttactattaatgcactggctgtctgtttgaaccaaagccgtttcggggaattggtagatccttttggtggcatagaggatttaaaagaaaagactatccgtacgccgcttgatccggatatcacattcagtgatgatccgttgcgtatgatgcgttgcatccgttttgctacccaattgaatttctatattgatgatgctacgttcgagtctttgtgtcgcaattgtgaacgtatttctattatctctaaggaacgtattgcggaggaactaaataagatattgctctctccagttccttccaaaggctttattgacttggatcgttccggactgttgccgctgatttttccggaacttgctgcattgcaaggtgtggaaacccgcaacggacgggctcataaggacaacttctatcatactttggaagtacttgataatatcagtcgcaaaaccgataatctttggttgcgctgggctgccctgttgcatgacatagcaaaacctgttaccaaacgttgggaacctcgtgcaggctggacatttcacaatcataatttcattggtgagaagatggtaccggagatttttcggagaatgaaattgccgatgaatgaaaaaatgaagtatgtacagaagctggtaagtttgcacatgcgtcctattgtcattgctgatgatgtggtaaccgactctgcagtacgtcgtcttctctttgaagccggagatgatattgatgatctgatgacattgtgtgaagctgatattacgtctaagaatatggagcgcaaacaacgttttcttaataatttccaactggtgcgtcagaaactgaaggatcttgaagagcgcgaccgcgttcgcaatttccagccacctatcagtggagaagaaatcatgaaaactttcaatctggaaccctgccagcaagtaggaactctgaaaagtgccattaaagatgctattttggatggagtgatacccaatgaatacgaggctgcacgcacttttatgttgcagcgtgctgaaaagatgggattgaaacattcttaatatttgtcactgatttccgtgacaaataaatattccgcatagttatctttttgatcctcttaatcttgttttttacctgtttatcctgttaaaagcctccttaaacaaaaaaaacaggaatttgttgaccgcttgataggaatttaatgtttatatttgcaaatagtatgaaacataaactattataaacattaaagatatggatgaaatgagaatgtggttccgcccggtcaagggtattgcattttgtattgtggctgctttctttggcagtcaggcaatggcgcaggtacaggtgaaaaggagttttccttcagcgaaacgtatttcggcatttgacaatacaacgttttgtacagctttcctgtcggatggttctttgcttacgattcgcgatatccctattgtcgatctgagagatgttgataaaatagcctttaaccctacgggtagctcactggctttgatgcgggggaagaaacctgttagtatttattctttccgtgaccggaacaaaaagctttttgaactgaaagagcagcgtaagagtaaggaactgaagggcaggaagaatctgaatttctttgtgcccggacctgtaggcgctgagttgatgaaagatgcatcaaagggagacattgtccctgttgccatgtgctatggtgctgatgcacgcaattttttggtttccaattctttaggagaaatcatagtttacgacacaaaagcatatttgcctcaggcttatattcagggaaaagctgtcgcgacggctattactatgagtcccaacaactattttatcgctgccggaaccggtaagaatatcgatatctggaatttccagacaaaagaactgcgtacttctcttccgatgcctgccgaagtaactgaattggtcttttctgccgatgcttctcaaatggctgttgtgacggcagacaagcgtctgactattttcgacacaaagacatgggataaggtggatatctttgataagataggtggaacactgacttctccgtcctttcatccggatggcaaatatatcagtgtggttaaagatggtaacgctattgtcatcatgaacttgaaaaacagtgtgcctgaacagacattggatgaaaatccaggtggtgtgacgggtagtcgcttctttgtaaacaagcaaacgagcgatgtattcatgctttccaatcgcgccaaaggacttgtgttctgggatgctaatggtttgaatcctttctttggtaaattgatgagtaaggaagtggatgctaagatgaacgagtgggtgaagatgatgcagggtgagtccatggaagattatgctatccgtgtgaatgacgagactcgcctgaagcaacaacaattgtttgctcaggaagtggcaacggagttggcaggcgaccgcatctctattgataatcctttcgtgggagaatatgacgcttccaagaatatgctgaacatcggatttaatgcattgcccgcgattgctttggaagtgccttcaaatgaagtaggcgactttaaggatggtaagaacctgaaatttgataatgcggtttatgtattgaatgataaggacgaatttgagttggcttatgtagaagtgcgtaatgagactacaaataaggtctatatttatgataatatcggtcgcactaagttgaccgccttggaagcagatgaaaactttgttccgctggaaattatgcagcaggcaagtcgtgaagaaattcagctgaaggagatcaaagaagctgtaatcgaagaaaagaagcaggataagctgattacggaaaatacacagattgatgtgaggacagaagtaattccgggtgtggatgctaatggtaataagattctgaactacaaagtgggctaccagtatgaggtgatcaataaagagttttctgcaaaggaggacttcccgtcaggtggttatgatattgaacgttccaatgccgcaatgtctctgatgaagataatcaagaatgcttttgaaggcgatttctccaagtatctgtctgaaggtaaacaagtgaaggtcattgttaccggttctgccgatgcaagtcctattcgcggacgcattgcctataacggacaatatggcgaatttatcgatgaaccttattataaggatggtaatcttgataatattaccgtaacaaaggcttcgggcattactgctaatgaacagttggctttgatgcgtgcggcaggtgtgaagaattatatagaaaagaatgtaaccacactggataacaccaagaacgaatatgaatatcatgtggaagtagccaaagaacgcggtggtgaattccgtaagattaacgtagagtttgtaatcatggatgcttttcctgcaaaataatttagtgaggagctaataaataaatatgaagaattttttagtactgacaatctttttaatgttgggagcatatgggagagtagtggcacaggatgccgctgctgcttctaagcgtgctaaccaacaatatgtgctttttgaaagtgagcgcgataaaggaacgaacgtgacgggtatgtatagctatttgctggacagttacgagaatttcatgaaagttgtggaagcaccggataacggtcagtatttgagtggcgccaagaatcgtttgcgtgctatgtatccttatctgttgaatggtgcagtgtattattccgaacagaagcaaccctctaaggcgctggattttgcggcagcttatattgagatgccccggctgaagatttttcagagcgagttgcttcccaaagataaccgctatgcttctgtagtatattatgcggcggtatctgcctacaatctccaaaagtattcgcaggcgttgaagtatttccaggagtatttaagcacgggaacggatacacagcagaaagactgctatgtatatatgaatatgatttatcagtcgcagaagaattattctgaacaggaacgtgttttggaggaagccatagccaagtatcctgtttcgcttgatttcctttataatctggtgaatgtgcatattgccacgaacaatatgccgaagttactgtcggccatcgatcgtattcttgaagttgatcccaataatgataaggtattgcccatcaaggcacgtattctggaacgtcagggaaagaatcaggaagcgcttgatatctacaaacgtttgtatgctctccatcccgatagttttgagttgctcaccggattggcacgtgttaatttcaatgtagctactgaaattgtgaataacggtgctactattgctaatgataccgaatatgcgttggtacgtcagcgtgcttccggttatctgctggatgctaaagacctgttcctgaaaattctggaaaaagaaccttcatctaaaatgtatatgcaggggttggcgggtgtatatcagtatatggatatgaaatctgagtatgaagtcttgatgaaaattattactgacggtgcttcatatacttctttcccatcccgtttgctggcctataatgaggcattgaagaagactgaaggggtggcacagcaacaggaatctgctcctgtgccggtggaacctgctatgttggtcatccatgtggatagttttattgatggtaataataataaggtaatagatgccggtgaaagttttgctgttcaattttctgttgagaataagggacagggggatgcttataacatccgcctccgtctttccgaacaacagggatatgatgaatattttgacggtccccgtgagttggatggtggtaatattcccgcaggaacatcgaagcaatacactttccgttatctggtaaagaaagaaatgccgtcagcactggccaagatcaatatctatgcattcgaagcgaatggttttgatgctgatccgtcggaattgattgttaatacacaggaatatgctatgccgcgcctgcgtgtggcggatcatcagttctttgcttccgaaggttcttctatcactttaggtaagaatggtaagctgacgcttgctttgcagaatttcggttcgaagacagcacgtaatgtgaaattgaacttcaaattgccgaataatgtgtttacaactgatgtacctgaaatgacgattgatagtattgctccgggtgatgtagcaacactggattatggtttcctggtgaacaagcgtttcgatggtgattcaatcgctgtgatggtaagcgtgagtgaagattcccgttcttcttatctgagtgaagcctataaggtgaaggtgggtgaatacttaacggcatccagcacaatcaagattgacggagctgttcgtaaggctgttgatcttaagaatgttagtttaggactcaatactgagttgctgcaagatattcctgtgggtgctgtgaatcgtcaccgttatgcattgatcattggtaacgaagattatagcataaccggtgccaatgcagagattaatgtgccttatgccgtgaatgatgctatggtattccgtgaatattgtgtacgtacatttggtgtacctgatggacaactgaaagttgttccgaatgctacggctggtatgatgcacgaacagcttgactggttggtgaatatggcaagtactgatcctgaagcggaattgatattctattattccggtcatggtaataatgatgaggctacgaaagaaccttatctgctgccggtagatattacgggtaagaacattcgtctgggtatttctctggcggatttatataaacgtctggcaacctatcctatcaagggagcttatgttttcctggatgcttgctttagtggtggctacaagagtgctgctccgttgctggcccaaaaaggggtacgtgtagtaccgaaggtgggtttgccacagggacataccttgagtttctcatccagtagcggtgaccagacttccagtgtttatcatgataagaagcagggatattatacttacttcctggttaaatgtatcaaggatgcaaagggagatttaaccatgaaagaactgtttgaaaagaccaatgcagaggtgaagaaagctactgctttgattggcaagatgcaggaacctcagtatatggtttctcctacatggtctgattgggcagatgtgaagctgaagacaccggcgacaatgaattagtttattggcaatatagaaaaagggactctgcaacatttatgtcgacagagtccctttttctttttcatgcttcttttcataagtgcatgtaaaagttccataaaaaagaactcgaatactgcctggaataagggcaatgcataactttgtgaaagaaacaataaagacatagagttatggagacaatgaacatatgctgcgaataggtgtaaagacttcgatgtggaatccctggcatggctgtcataagtttagtacaggctgtcagcattgctatgtttatcgtacagatggtaaatatggtaaggatagttccgttgtggcaaagacagagaagttcaatctgcctgtgcagcaaaagaaaaacaaaacttacaagataccttccggtaacctagtctatacatgtttcacttctgattttctggtggaagatgctgatgaatggcgtcctgaagcatgggaaatgatgcggttgagacaagatctccactttctgtttatcactaagcgtattgaccgactgaaggattgtttaccctcagattggggagaaggatatgataatgtaacaatctgttgtacgatggagaatcaggatcggattgactatcgcctgcctatttataaggcagctcccattaagtataaaattattatttgcgaaccgcttctcagccggatagatttcaggggagagttaggtgagtgggttgagcaggttgtagccggaggagaatctggacgggaggcgcgtgtatgcgattatgactgggttttggagattcgtcgccaatgtatagaagctaatgtgggcttctggtttaagcagacaggttcttatttattgaaagaagggaaggagtttaaagtagcccgacaatttcagcactcgcaggcccggaaggcggagataaactatgagccggatcgtacctcttttatagaagagaatacaggcagcgctatattgtagtctcttgtgttcaactatcctatcggtttgattgttatatattcatatatcaatagcataagatttgttggagagctgaagatatgaaacaacttatatttgtattgttaataagttgtctggcttgtgccaataatcaggcagggcaggcagaaaggaaaaaagatatggaatcaaccaaggaaatttatctggcaggaggctgtttctggggaaccgagcatttcctgaaactaattgatggcgtagaaactacgcaagtcggctatgcaaacggcaatattgccaatccgacttataaacaagtatgtaccggaactacggactttgcagaaaccgtgaaagtgcagtatgatcccctcaaagtggacctgccttttctcatagatctttatttcaaaaccatcgaccctaccagcgtaaacaggcagggtaatgacaagggtacccaatatcgtacgggtatttattatactgacccagctgatttagcggttattcaagaaactgtgcaccgtctggcaacagcttactcccgtccgctggcagtagaaataaagcctttgaagaatttctatccggcggaagactatcaccaggattatctggataagaatccgggcggatattgtcatatccatcctgaactatttgacttggcgcgtaaggctaaaatgccgaaaaaatctgtttatagtaaaccggatgatacggtgttgcgttctaaactcaccccggagcaatatgccgtgactcaaaagaatgcaaccgagccggcttttcataatgattattggaatgaacaccgtcccggtatttatgtagatatcactacgggtgagcctttgttcgtttcaactgataagtttgattccggctgtggctggcccagtttctcaaaaccgattgaccgtaaacttattcatgagaagatggatacttctcatggtatggtacgcacagaggttcgaagtgctacgggtgatgcccatttaggacatgtcttcactgatggtccggcagataaaggtggtttgcgttattgcatcaacagtgcttcgttgagattcattcctaaagagaagatgcaggctgaaggatatggggaatacatccgtttagtaaagtaatttttcgtatccggaaaactttcgtatctttagcaaaaacggaattatgattgaatttaaagctgtaccattggcatcacttctgaatctgagaaatcaatatctggattctttgcgttacccccaggagttacactgcgagtggctggttgcaaaaggcacttgtttctgtatcgaacaggatgaagaaagagtggggtatttcattcagtcggaagaaggagagctgattgaattctatctgtctgatgaactgctttcacgaaaagaagaaatattcggaagagcgttgaaagaatttcagattaagagtgctttctgcaagtcatttgatgattccgcaggcaggggtatgcaacgatgattatttcacatcttaaagaatcatgcttaaaagcgggatatactcctattgcagggtgtgcagctgataatgttgcttcacgcaggacgctggagcggtgtggttttatgacaaaacattgtgccattgcatttgatttctatcggaagtaacattaaacgggtcgggaacttaaagtcaaaaaacagtaaatcatcgaatagaggaagaggtgtttcctcctattcgatgatttactgtttttttattttagtcatcaatgtcaattactctcatcttagagtcgaacttgatttcccaacggttagacagctttacttcatattcttttttatcccgttcaatctgtaagattttaacatccggatagtttgtctttacataagtacggattgcttccgggatgatctgtgcagggacttcactttgctggcatttaacttctgtccattctcccgccttatcgaattctactttttctccattagtgaagaccacatcgtagcttttatagaataattctgtttcctgttttgccaatgccactttatgatctttaaagtaggtattgaggaaagtttgagcctttgcagggagttgatttacctggatcggtttgtcattatctgccattaccattgtgtgcattgtgaacatacatactaataataaaactaactttttcatattcttctatttttaataattaatactttggtttattctgatattgcaaaggtaaagggagattctggaaagaaactggaatcccttaccgaatgattggtttctcggtgtgaaactgtcagtttcattacttggaactgcttgtttcattacttgaaactatcggtttcattgcttgaaactggaggttccattgcttgaaacacttcgtccggtctgctgaaacagaacagagggtcattcggcaggtggtaataggtttttgccggtgttagcgaggatgtgatatcaataaactttagctttattggaatgacatcctattctttttttccataaatttgtcgtcgattttaaaagtaagactgctatgcttgaagatattctgaaattcaataaggagttcgtgcagaacagaggatatgagaaatacctcactaataaatacccagacaagaagattgccatcatttcctgtatggatacccgtttgcttgaactgatacctgccgcgctcggactaaagaacggtgacgtaaagatgataaagaatgcgggaggtgtcatatcccatccgtttggtagtgcggtgagaagtctgctgatagccatttatgaacttggcgtggaacaggtgatggtgatcgggcataccgattgtggtgcgcaaagcctgaatagcaaaagagtgcttgcacacatgaaggaaagaggcattgcagacaagaacattgatatgctgaaattctgcggtctggatgttgagtcctggttgaatggatttgacagtgtggaggaagcgattaaaagttccgtggagttaatcaggaaacacccgcttatcccatcggatattaagataaacgggtttattattgattccataaccggagaactaaaaattctgatctgacgagacaggaataaattcacttggtcgtccgttgtaggttagtgtcagtctatgcatagcccttgttacagctacatagagcatacttttgtcaatggctgagttgtaattcttggcattgacataaggaacgattacttcgtcaaactccaacccttttgccatgtgagatgaggtaacgataatacctttcataaaagcagagctttgattggacaggaaatggatatcaccggtatgcacccggaggctttctgatagttctcttgcctgtgtttcggttttgcatactatcccgagtgacgtataaccagactttttaaaagaagaaattatactgaaaatacccaggatttcctgttttacatcttcaaaccgtaggattgcaggaggttcaccatggcgtatgataggttctaattcatgattagtctgaatcctttgtgagaaatccgtgatttcaaacgtagagcggtagcttttgcatagtttcattatttcgcctatagtgaatgctttccgaatcatatcggctgttgacgaaccataagggttgacagattgtgatgcatctccgagaatagtcttccggcaggggtaaagtttctgaattactttgtattggataggagaataatcctgcatttcgtctatcaaaagatgtttggcaccggacgaagcaatatttccgtctaaagccagatgcaggtatgccaaaggtgccaagtcagcgtattccaacatccggttcttgcgtaatttgaatagttcgggtttacctacccatacgaaaaactctttataaatctgaagatcgttgttacctgcaaacatcttctttatttctttcttcaacagatttttctctgaagtggtaattgtaaagtagtattgtaccttcatcatttccaggatataatccgtcatagcttcagaacgctggcgcatgggataacggttgaagcgcctgaattgctcttcaatatattcagctggaattgtgatgtgcctggtgagttttacttctgctgctttgaagtagttgttttccatatagaggatgaacttatcgagctgtgaaataaactcgaaggaagatttgtatttgatccgttcaatgaagtccgaggacgtttgttcgagtaattccgttacctgttcaaagaagttctggtatttgtatttgttttcaagaactcccgaaagaatctgctccatactggtttcgggcacactttcttcgccaagctcgggaagtacgttcgagatataatcaccgaaaactttattgggtgaaataataagtatatcttttgaggaaatattccctttcaacgtatagagcaggtaggcgatgcggtgtaaggcaatggatgtcttgcccgatccggcaactccctggataatgagcacgtgggcttcttcattacgaatgatccggttttgttcccgctggatggtggtgacaatattcttcattttatcatcggcattgctgctgagttccttctgaagaatttcatcatgtacagtcagcgagctttctatcatatattccattttgcctttacggatgcggtattggcgtttaagtgaaatatctccgctgatttcaccggtaggggaggtataaaccgctttccccagttcgtaatcgtagaacataccggaaatgggagcccgccaatcgtatatcaggttcgtcttactttgtgaatcatagaacgtatgtatgcctatataaataggtaaaacactactgccgtttttcttttcctcgaaatctatccgtccgaaataggggatatccaatattttgcccaaccgcctgcgtttgtcaattacgctttcacccagtgcgaaatgattgaggatgctttcgcgcatggatcggatttcatgcggatcgatatctttgtttgaccagatataatctttgtattcctgtaaggtttctacatgttctttgactgatgtatcggtgttctgaatcgtatcgttaatgatgccgatgacctgttgcaagtactttttttcctgttgttctgatagattgaatgtcataactcttttaattttttatctgggaagtttggaaagggtggcaaagttagtccgaattatcaggttattaaatagttatttatagctatatatccgtccttttttctacatttgcacgtcattacaaaagaaaaacaatggatattcttgatcttgccagacggaatcaacagaaagcccggaaaattatagaagacacaaagatcatccctatttgggaaagtataggtgccagagtgaatttagtaggttctttaagtacaggattgctgatgaagcatcttgacattgattttcatatttatacctcacaatttagtctgtgtgatagctttcaggcaatggtgaagtttacggaaaacaagtctttcatgaagatggagcataagaatctgctggatacagaggaagcatgtgtggagtggcatgcttggtatcgggatgcagataatgcgctctggcagatagatatgatccatattttggaaggttcccggtatgatggctattttgagaagtttgccgaacggctttccgctgttttgaccgatgaaacaaggtatgccattttaaaattgaaatatgatacgcccgagtcggaaaagattatgggaatagagtattataaagctgttatccgggatggcatacgcagttatgaggactttatggaatggagaagtctgcatccggttacgggaattatggactggatgccgtaacttgcatatttctttcgcagagcggttagcttagtattcctgactttaatcctgcattgatagcttcgatagaattctgtacccctaatttgtgcaataggttttgccggtgaatattgaccgtatgaatactgatgcagagattgtgagctatttctttacttaataatcctttttgaataagctgtaaaatctccagttcacgctgtgtcagatgaatccgtggaatagatactaaagtaggcgagaacatttctccatttttgagattcaatacagtgcattccacctgatcggtttctgtctgattgggcgcaatctctatatttccaagtatcagccatgcttttccgttgcggctttgttctaaaacctgttgtcggctgattacccgtatgtactgttgtttggcattcatcagccggaaactatagatattacaataatcatttctttgttcgtgaggtaggctatagataaacttgctaaggttaatctgcaattgctccagtcgggcgaaatcgtccggatgaaagcgtgattccaaataatctccctgcttttccagagtagctattttccggctgtcatatcccagtatatctgcaaagttagaagatgcgaaagcatatctgtatttataaacatcaactacaaatgagcaacttctgctgatttgggacatctgttgtagcacaactttatcctgttcccaaatggcatagtcgatttcatttgcagacaaatgttgctttgcccacatttcttctcttgtgatttcagttgatttcatgcagtggagtaatttcacgcaaaaatataataaccgttgatttatctgggtaagatcacttgcttttttattatttttcctacatttgctgtgtagaattcacataaaacgattgttcaactcatgaaacatcaactctgtatatagctacgctccacgaatactactttccaataaaagctattcggctatcctgacggatttttgtaattcgtcacagagttttcctatctgattatttacatcgagtggcacgcagctatgcgcatagctgtgtggcatgcgtttattttagttgaacaatgaattatacgtataagcaaatatggctcatcaactttcctgtgatgatgagcatcctgatggagcaattaatcaatattactgatgctatttttctgggacatgtaggcgaagtggagttaggtgcttctgcgcttgcaagtgtttattatctggccatttatatgctcggttttggctttagtttgggtttacaggttatgattgcccgcagaaacggggaacaaagatacgaagaaacagggaagactttcttccagggattattgttcctgagtggactggctatgtttttaagtcttgcgtcctatatactgtcacctgttatcctgaggtatttcatccgttcaccggagatttataatgctgcggttgattatctgacatggagatgtttcggtctgctattctcttttccatttctggcattccgctctttcttcgtgggaattacgaaaacgagagttttgttgtgggcggctataatggcggttcttatcaatatcccttgtaattacttgtttattttcagtctcaatctgggtatatccggggcagcaatggcttcttcactggctgaagccggttctttattaattctggttatctatacttttctgaaaatggataaggagaatttagggttaaaacctgtttatgataggaaattgctaaattcactttttcacttatccgtatggagtatgatgcatgctttcattagtgttgctccgtggtttttattcttcgtggctatcgagcggttgggagaaaaacaactggcagtgtcgaatattataagaagtgtttctaccgttttttttgtaatagttaattcgtttgcggctactaccggttcactggtcagtaatctgataggtgcgggtgaggggagaagtatgttccggctctgtggtaaaattctcagattgggatatgcaatcggtcttcctttgataattattgctatgttatttaatcaacagattatcggattttatacggataatgcagaattaatcgaacttgctcagtatccgtttatcgtgatgttgctgaattacacatttgctttgcctggttatgtttttatgaatgcagtaacaggtacaggtaatacccggattgcatttatctttcagatttccactattgtcgtctatctggcttatttgtatctattgagttattgtttcacaacgactttaccggtctatttgacggctgagtatttgtttgtgattctattaggtgttcaatcttgcgcttacctgaagataagcggtattagtaaggggaataaagtaatatagccgatacctttattttattggtaaagtgacgatcattcgtattccttccttatatgcaggatctatttttatctctccggcaagtcgttttgtgatgagccggcagagatataatcccagtccattaccgggaataaaagtgtcaagtttggagaagcggttgaatacttcttcatgtttctcctgaggaataccgcaaccggtatcggtgacgtatatcaggattttctctttggatttatccactccatatcctaaagtgatctgacctttttctgtgaatttattagcattattcagcaagtgttcgattacttgggtcaggtattgggcattgcttggaataatcatactttcttctgtaatctccagcttatattctatgccctcctttttcttgagttgctccatttcatgtacacagatgttcttcaaatctgtaggctgacagggaagtttttcttcggaaacatccagattggcaacttccagcatactgttgataagacttgttagtaatacagtattcttttgaatttctggtggaaactctttgcgcatctccgcatcgatttcttcattcatgatcagatcggagaatccgacgatagcgttgagtggagtacgtatctcatggcagattgagttgataaatgattgtttcatcttttcgctttcctgtgctttgagatgcaaggcttttaattccattttcatccttttctccttcttccaggaaaaatataaataggtacagataagtactacgattattaataaaatgctgagagaaatgagcatcgttttcttattttttatctccagcatagtcttttcattattgagagtattcagatcatactttacttgtaattcattgagctgcttatgtgtagcttctgtgcttaatgaatcctgaatcagatgtgaaatcttcagatatttcagagcattctgataatctttgattgcttcataagtcatggaattgatgttgtataatccgggcagattctgtggcgctaatgtttctgcaaatttaatcagactgtcattggctgctattgccttgcgaaaatctctttcggtacggttattggaataatagttgttggcacaaagataataattgtatttgtccagatcattagtcagactcttaccaatttcctgaatacgcttccagtaatatttttcttgttctaatgtcagatatggcaaactgctaatcataaatgaatagtactgaaggagatataaatctatattatagaaaggacgatgtttttggtaatcatttttgtatttttgctctaccatattaataagctgctccatgattttcacagcttctttgttcttaccagcttgggcgtatgtaaaacatactctccaggtaatgaattttttgtagatgtatttttctttttccgggagtgtttctgtaagttgcatggctttatccaaataaggtattgcctttttgaattgatcactcatatagaaactcgttcccatattataggctgatgctatttgtttgtatacattgtcttctttatctgtctctacattcttggaatctaattcttctttgatagcttccgttctctctccggagtagcatcgtgagtcaaaagttcgcatatgataaaaaggtaataaacttttgagttcatcctcggtcgctatctttttaaaatattcggtgtatttggctattgtatctttattgtattcgctgattccggcgataagaatatcgtcgagtgcattcagcatattttttctgtcatcgattgtggctgcttcctgatacatctttaatagataaagatgggcttcaggattttcctgatagaggtctgccagatttctgtatatttgaattcttttctcggaagactgggtattttttaaaacacctaggaggctatctgctgcctgtgtttggtttgaggcaagcactgtcgaattgataagtataaatatagcagttagtaaatgtcgcataatatgttgctactttgtaatggcgcaaatctactgctttttttcgtgattttgtgttgtttgagaaaaatattttcggaggtttatctttggtattttttacctttcagatttgctttctgaatttatccgatttagtgataaatacttgtttaactgcaatttccagaagtataattcttgtggatcagaaagaaaaccttatatttgtaaaatgacgataaatgtcatataaatctttatagacttaatacttaaaagcgtaactaaatggcaaaaatcaatttttaccttctctttaatggcaattgcgaagaggcattcaatttttataaatcagcttttggtatagattttacttttataggcagatatggggatattcctccgcagaatgggatgcctccgatttctgaggatgaaaaaaataaaatagagaatatctgtttgcctattgctgaagagactgttttgatgggagcggatgtttgcggctatatggcgcaaaatactgtattcggtaataatttctctctttatatagaagctgatagtagaggagaggcagatcgattgtttgccgggttgtcaacagagggacgtgtaacgatgcctatgagtgaagcacattggggggattattttggaatgtttactgataagtttggtgtgaattggctgataaatgtccgcaagaatatagggtaattatatagtgataaattaaaagaataatagttttactatggaagaaatgtattgtcagagttgtggtatgccacttgtaaaggcagaagattttgcaacaaataaagacggaactcctatgagtgagtattgcatctattgttttaaagatggagattttacaggggatatcactatggaggatatgatcaatatcagcctgaagcatatgagggaactcttcaaaggtgatcctgatttcaacgagcaggcagcattgactaaaatgagagattttttcccggagttaaagaggtggaagaagtctctataatcttttcttttggaaatgcattaggtaacattctatagaaaaagaaaagcgttgtaaataagttatttacaacgcttttcttacaagtggtgccaccagcaagagaactattatcttatctctgtt

SEQ ID NO: 6323 - DNA, 838 bp, Unknown
  gut microbiota DNA sequence
agcaacaaacaagcatccggaaaaaagaggggtaatcaccttccgggtatgccctttccattttacaaacacagcctgcatcgggcaatatgtagtatatcccgcagcattcaaacgctgcatcaacttatgttcagacttaggtgctgtgtacaatgcatgccagcacatcatatcattatccgtcatcatattgtttgctttttccatccctttaataaatcttttacaaataatatccatcccacactgccgacacctgccaagaacatgaagccgatcaaaatcatcaatttattgggctttgcaggcttcaaaggtaccgtagccggctggacaaccgtatataccggtgtaatctcctgcaccttagctcttgccatctgcaattgttgagacacttgtgtatatacttgataggctaaattcatttcattctgtaaacgctcttgctctgcgcgataactcagtaatattatattctggtttgcatctacaaaatttgcgtatttcttctgggcatcctcataactggcctttgcttctccataaagtttttcggtaaatgccaaatcatgacgagccttattagtccgataatctgtgatgtagttctgcaggcaatgcatcacggtatccgtcagcgaagcagatatcaaaggatcctgcatagtaacagacaaggttgtcacacctgtctttttgtctacggaaacagagatacgtttacttaaagcatctgcaatggcagactcatctctagtaagacgaaaaggatccagctttgcatccccctcttccggttcatccttaaacaaagacaatgtccatcctaaca

SEQ ID NO: 6324 - DNA, 9975 bp, Unknown
  gut microbiota DNA sequence
cagccccttgtccccttgtcaactgattaccttgtcaactgcgaagcttcgcttcgctaaattatcatttataagcttactctccacactttcttatgtaccaacctatttttaagcgttacttaaaagctgttgtatcttgtagctgttaaatttatccaaaaaagcattttgtacacttcaaccgttcctccgtactgataatcaaaacattaaaaaaggcaagtgtacaaaagcgcaaagtatctaaaaaaatgttttccataccttcgaggcgtgtaaaggcaatagtgccaatgcacgactgtaaaacataaacagatatggaaaatacagtaaatcgggagcccctggtttccgaattcccaagcgtgcggagcaaagcaccacacaccatcagtattcacgattttattgacacggtacgcagcgaccgcttcaggcaagtagtgcaggactaccgtcgcctgaaagccctgcccggccacgaagccgaagcacagaaactgaaagacggtatgccgtgcatcatccccgcaggcgtatgcagcaacggacacgccgtaaaagaccttcaacaacacagcgaactgctctgcatcgacctcgaccacagcaacggacgcacccgggaaatcttcctcctctcccaatcgctcccctttgttgccgcctcctttatcagcatctccgaagaagggaacaaaatgctgatacacgtccgtcccgaagacgtgcagaaaaattacgaacagctttatgcagccgtaggcagagcggtcagcgcacacgtaggtcacccgtacgatgataaatgcaagatactgacgcagccctgtttctactcctggcatcccgaagcctactacaatcccggtgcaatcgccttcgaaatgcctgcggaaagcgtaacgaaagtaacagaggtaggaacgaaagaaacaatcgccccgggtaacgccccatcggaaaatggcttcatagccaacttcctcgatgaattcgaacaccgcaaccccttcatccgcggtagtcggaacgaccttgccctgaagttgggacgtgcggcagcaagtaagggattttcgcaggaggaaacaaaaaagctcaccgaacttttcgcgcagcattacgccgctaccgattttacgatgcaagatatacaaaaacgcgtagtatctggttatcagttcattattcagaagaaaaaggaagaaaaagagacgaatcggtgccatttcggtgacagtgacacctatgcacctttttcggttgcaaacgaggaggaatcacccgaagaagtgttagaaaaaaacaacgaattacgggccgcttccccatacatccccgaggaagtttatacccgcctgcccgaatttctgaaacgttgctgcacacatgccaccgacaagcgcgaacgcgacctcatgctgctgggcagcatgaacagttgtagcgccctctttccccacgtcagtttcttctataagaagtcactgctttcgccccatttctatcttgccgtcgtagcacccgcaggagccggaaaaggtgcgctggggttcacatccatactgctggacgccacgcaggagttctacgaccggctgcgccgcgaacagaaaaaggaatacgatcagaaactactggcctgggagcaggaacagcagcaggcccggcacgccaaacgcctgcccaacctcgacctgaaaccggaagagccccaggcgcaatacctcaaaatctcagccaccactagtaagagccggctcatacagagccttgccgctgccggcgaaataggttgctgcatgactactaccgaaatcaacaccttggtctcctcgctgggacaagattgcggcaaatacgaagacatcctctgtaaggcggcccatcacgaagaagtctcctcttcttacaagatagacggcgaccccatcgttgttcaccacccccacctggcactgagcatcgccggtacgcaggaacagttccgcaacttcttccgttcgctcgaagtgggactctacagccgcttcggcatctacacccgccagcaaagccagttgtgggaatcgtgcgcaccccaggaaggggaagtggacctgcacagctacttctacgggttgggaagcgaactgtttgaaatgcacaagctgctgctccagtcgcccaccctcgtcaccttcagtccccaacagtggcaacaacataccgcccacttcagcctcctgctgaaacgcaccctgctggaaggacgcgaatcttcaagcggtatcgtttaccgcaacggactgcttgccatgcgcctggcagccattctcaccattttccggaaatacaccgactacgcttacgcgaaggaatactgctgcacggacgatgatttccggacggccatggacatcgcccacacgctgctcgaacacagtcttctgctcagcacctcgctgcccgacaccagtctgccgcccgtgagcatgcacaagttccaccagcttgaggacacccttgcatccatgccaagagtttttacctacatggatttcgttcgggccgtacaggaaaatggagcctgcgcacgaaccggaaaacgctggatacaaaaagccgtcaaagcccaacttattataaaagaaggagataactataagaagtgcaacacaaagagcacaaaataggtgtataggtgtcactgtcaccattttgtcactgacacgggcaaaaaaagcggccgaaaatggctgcattatgtaaatattctaccttagtctgcaattgttccggacttcccgataagcctccacgaataattcagactaaaaacttcaaaacaacaaattcttaaaattcatagaacatggaaacaacagaaaaaacgaaaaggattcccgaagataaaaaagagactcccgaagataaatttgaaatcaaggcatacctgaagactgagttcgcacagctctatttcccctgcctctcggccgaagccgcactgaaaaaactgcggaagtggatcgccgtcaatcccgaactgcaccgccagctctacggcggccgtgaaggaaaaaatgaccagaccttcagcaaacgccaagtgcaattattgatagattttctcgaagcgccctgatcagaagcaatgttccggaggataagaagcaatgctgtctatcataagattgcttctttatcgccggaacattgcttgttttatttcttgtctattttcaaattgataattaatgcgaatcaggagttgaattgattcatatctttccggttatgaatgaattcaccacagattacacagattgacacagattctattttaatgattattagattaataaatctgtgtgaatctgtgtaatctgtggtgagtcttattcattactataccgttataaatcaaactcaccccctgattcgcataattaactatcttttcattgcgccctaacttaaaaaaatgtacttttgtgaaaactaaaaagcagaagaatatggaaactacaatacaaattctcacctattcagaattttccagtttataactttgcagcatgaaaagaaacttactcattctcatatatttcctcctccgcctcctctgcccgtccacggcctccgcccagccgcaaacgccgcaagaagctacccccgactccatccgcatcagcctgctgacctgcgcctcgggtggggaaatctattccctgttcggccacaccgccatccgttacgaaaacttcacccggggcattgacgccgtcttcaactacggcatgttcaatttcaacgcccccaacttcatcttccgcttcgccctgggagagacggactatcaactaggcgtaaccaattacgagcacttcgcctccgagtacaactacctgggacgggacgtctggcaacagaccctgaacctcacccaagcagaaaaagaacacctcttcaacctgcttcaggaaaactaccggcccgaaaaccgcatatatcgctataacttcttctacgacaactgcgccacccgtccgcgcgaccagatagaagccgccatcgacggcaccttgcagtatgctgacaatatgaccgataccgacacgggagtcactttccgcgatttgctgcataaatatagtgaaggtcatccatggtcacgcttcggcatggacctgtgcatgggcagcaaagccgaccaacccatcaaccgacggctgatgatgttcgtccccttctatgtgcaagacttcttcaacacagcccggatcgtagacaacgaaggccaggcacgtcccctcgtatcctccgaagagaaaatagtggtaaccggactgactgatgccgaccaccgctccggaggaatcaccccgatgcaatcggccctgctgctgtttgtgctggtggcagccgctaccatctacggcatccgccgcggaaaaaccctttggggactcgacctaatcctgttcttctgtgccggaatagccgggtgcatcctcgctttcctcgccctgttctcccaacaccccgcagtaagccccaattacctgctgttcgtattccatcccctgcacttattttgcctcccgtggatgataaataaggtgagaaaacggcagaaaagctggtacatgagaacgaattgcgctgttttaacactttttatactgctttgggcgataataccgcaaagaattgacttagctgtattacctttggcactttgtttgctggtacgttcagcaagcaatcttattttgacattgaaaaagagataaatgaaaaagggactgattacttccatactcgcacttactttcaccggtctgcaagcacaaccgttgcctgccacacctaaattagtggttacgctgacgattgaccaactgcgcaccgactatatggaagcattctcaaccctctacggagagaaaggtttcaaaagactgatgcgcgaagggaaagtgttctaccagaccgaattccctttcaacggaacagaccgcgcttctgccatcgctgccatctacagcggcacgacgccttcgatgaacggcatcatatcccagtactggatggatgcaagcaccctgcgccccgtgaattgcgtggacgacggcgcatttatgggcaacttcaccgacgaaaactcttctccctcccaattactgacctctaccattgccgacgaactgaaagtagccacccgcaacaaaggcctggtgtatgccatcgccccctcgcgcgacgcggccgtactggctgccggacataccggaaacggtgctttctggctgaatgagaacacaggcaaatggtgcagcactacatattacagcgagttcccgtggtgggtaagccagtacaacgaacggaaatcacccgacttccgcatccgcgacatggtatgggaaccggcacaccccatcaacaaatatacattcctgcccgaatggcgggaccagcccttcaaatataagttcgacagcgaacgacgcaataaattccgccgactgctcaccagcccgttcatcaacgacgaagtgaacctgctgacagaagaacttctggaaaagagcaccatcgccaaagatgagatacccgacctgctggcactgacctattacgccggaaactacaaccataagagtacgcaggaatgtgccatggaaatgcaggacacgtatgtacgcctcgaccgcagcattgccgcactgctcgacctcatcgaccgcaaagtaggtctgcacaacgtcgtcttctgcatcacctctacgggatatgccgatccggaagctcccgatctcggcctgtaccgcatccccggcggggaattctacctgaaccgctgcgccaccctgctgaacatgtatctcatggccacgtatggcgaaggacagtacgtagagacttatcacaaccagcaaatttatctcaaccataaattaatagagaacaagcagctgaatctggcggaaattcaagacaagtccgccgacttcctgatacaattcagcggagtgaacgaggcgtattcagcccaccgcctgctgctgggtccctggtcgccccagatagaacttgcccggaacagctttcatcgcaaacgttcgggcgacttactgatagacgtattgcccggatggactatcgtggaagaaaatgccaccgataaccgcgtggtacgtcatgccaatgttcctgctccgctcatcttcctgggcggtggagtgaagcccgaaacgatccgggttcccgtcaatattacccgcgtagcccccaccctgtcaagtgtgatgcgcatccgcgctccgaatgcttgcacagagactccactgaatttctgaggtctcggaattaaatgataattttaggcgcggattacacggattacacggattttttatgaatcaatgtaatagcgtagcctttaatccgcgtaatccgtgtaatccgcgcctaatctttgataacaggtttacaaattatcatttaactagcctagactcacatcaaataaacagcgcaaaaatgtgtaatctgtataaaaatcagtaactttgcgcactcaatcaacttagtaaataataataaaaatagatataaaatgggatttaatgaatttttaagctcgattttcggcaacaaatccacacgcgacatgaaagaaattcagccgtgggtggacaaaatcaaagccgcttacccggaagttgccaaactcgataacgacgccttacgcgccaagacagaagaactgaaagaatatatccgcaattctgccgccgaccaacgcgccaaggtggaagaactcaaagctggtatcgaagaaatcgaactggaaaaccgtgaagaagttttcgcacagatagataagatagaaaaggatatactggaaacttacgaaaaagctcttgaagaagtactgccggtagctttctctatcgtgaaagaaactgccaaacgcttatccgaaaatgaagaaatcgtagtgacggctaccgaattcgaccgtcacctggctgccacgaaagacttcgtacgcattgaaggcgacaaagccatctggcaaaaccactggcaagccggcggtacggaaattgtctggaacatggtacactacgatgtacagttgttcggtggcgtcgtattgcataaaggtaagattgccgaaatggcaacgggtgaaggtaagacattggtggctaccctccccgtattcctcaacgcactgaccggaaacggtgtacatgtggtgaccgtaaacgactatctggccaaacgtgactccgaatggatgggcccgctctatatgttccacggcttaagtgtggactgcatcgacagacatcagcccaactccgacgcacgccgtcaggcttatctggcagacatcaccttcggtacgaacaacgaattcggtttcgactacttgcgtgataatatggccatcagccccaaagacctcgtacaacgccagcacaactatgccatcgtcgatgaggtggactccgtattgattgacgatgcccgtactccgttgattatttccggtcccgtccccaaaggtgaggaccagttgttcgagcaattgcgtccgctcgtagaacgtctggtggaagcacagaagaaactggctacccagtatcttgccgatgccaagcgcctgatcgcttccagcgacaagaaagatcaagaagaaggtttccttgctttgttccgcagccacaaggcactgcccaagaacaaggcattgattaaatatctgagtgagcaaggtatcaaggcaggtatgctgaagaccgaagagatctacatggagcagaacaacaagcgtatgcacgaagctaccgacccgttgtacttcgtcatcgaagaaaagctgaacagtgtagacctgacagataaaggtgtggacctgatcaccggtaactcggaagatcctaccctcttcgtattgcctgacatcgccgcacagctttccgaactggaaaacgaaaccagtctgacggacgagcaacgcctggccaagaaagatgaactgatgaccaactatgccatcaagtccgaacgtgtacacaccatcaaccagttgctgaaggcttacaccatgttcgagaaagatgacgaatacgttgtgatcgacggtcaagtgaagattgtggacgagcagacaggccgtatcatggaaggccgccgctactccgacggtctgcaccaggccatcgaagccaaggaaaacgtaaaagtggaagccgccacacagacattcgccaccattacgttgcagaattacttccgtatgtaccacaaactctcgggtatgaccggtactgccgaaacggaagcaggcgaactttgggacatctacaaactggatgtagtggtgatccccaccaaccgccccatcgcccgtaaagacatgaacgaccgcgtttacaagacgaaacgcgagaaatataaagcagtcatcgaagaaatcgaacagttggtacaagccggacgccctgtcctggtgggtaccacatccgtagaaatctccgaaatgctgagcaagatgttgaccatgcgcaagatcgagcacagcgtattgaatgccaagttgcaccagaaggaagcagacatcgtagccaaagccggtttgaagggaacagtgaccatcgctaccaacatggccggtcgtggtacggacatcaagctgagcccggaagtaaaagctgcgggcggtttggccatcatcggtaccgaacgccatgaatcccgtcgtgtagaccgccagttgcgcggacgtgccggacgtcagggtgacccgggttcttccgtattcttcgtgtcactggaagacgacctgatgcgtctgttctcttccgaccgcatcgccggtgtaatggaccgtctcggcttcaaggaaggtgaaatgattgagcacaagatgatctccaactccattgagcgtgcacagaagaaggtggaagaaaacaacttcggtatccgtaagcgtttgctggaatacgatgacgtgatgaataagcaacgtacggtggtctataccaagcgtcgccacgccctgatgggtgaacgtatcggaatggatatcgtaaatatgatctgggaccgcgttgccgcagccgttgaagctcccgattacgaaaactgcaaaatggacttcttgcagactcttgccatggaagtgcctttcaacgaagaacagttccgtaacgaaaagaaggaaaagcttgctgaagcagccttcaatgtggcaatggaacagttcaaacgcaagacggaccgcatggcacaggttgcttatccggtaatcaagcaggtatacgaaacccagggacacatgtacgagaatatcctgatccccatcacggacggtaaacgcatgtacaacatctcttgcagcctgaaagccgcttacgacagcgaatgtaaggaagtggtaaaagcgtttgaaaagtctatcctgctgcacgttatcgacgaagcatggaaagagaacctccgtgaactggatgaactgaagcactctgtacagaacgcaagctacgaacagaaagacccgttattgatttataagctggagtctgtaaacctgttcgatacaatggtggataagatcaataaccagactgtttctatcctgatgcgcggacaaatcccggtacaggaaccgcaggaaattcagcaggccgctcccgaacagaagcaggatatgagcaaataccgcgaacagaaacaagatctgagcgatccgaaccaacaggccgccgcccaacaggacacacgcgaacaggtgaagcgtgaaccgattcgtgcggaaaagacggtaggacgtaatgatccttgtccttgcggaagtggcaagaagtacaagaattgccacgggaagaatatgtaataagtggttagtgataagtaattagtgattagtatgctaaccacttatcgctaatcactaat

SEQ ID NO: 6325 - DNA, 67468 bp, Unknown
  gut microbiota DNA sequence
tatttttgttattcctagataaagaataagcttatgactaaatattcgtactcactattggtgtgctgtgttctgctgttcagcggttgccaaagcatagagcaactctccatcgactatatgttgccggcggaagtcagctttccgtccgccctcaggcgcgtagctgtggtaaataatatgcctcctatcccggataacaagctgattctggaggaaaacgatgagaagaaaaaagatgagacagaaatagcacgcaagacaaagtatttcaatggggatggcaaaatagccacggaatcactggcggaggcacttgccaacgagaattatttcgatgaagtgattatttgcgactctgccttgcgtgcccatgatatgattcagcgcgaaagcacccttagcaaagaggaagtggaaaagctcacccaaagtctggatgcggacttcctgatagccttggagaacgtacagatgcgctccatccgtaaaatcgaatatttaccggaatggggagtatatgcaggtacgcttgacctgaaagtatatcctaccgtaaaggtgtatctgccccaacgcaacggtccgatggtgacagtcaatgccagcgacagcatcttctgggatcatgcagctcccagtatggcacaggcaggcgcaggactcatcagtgaaaaagagatgctgagagaggcttccgaatttgccggcactatccccgtgagccatatgctgccacattggaaaacagcttcccgctatctctttacaggcggttccgtaaacatgcgtgatgccgcggtctttgtccgcgaagataactgggacaaggccattgaactctggaagcaaacctatgagaaaaagaaaaaaggaaagcagaaaatgtatgccgcctataacattgccttaggatatgaaatgcaggacagcattcatacagcagaagaatgggccttgaaagcgcagaaagtagcatacgatgtagacaaaatagacgagaagaaaactcaggaaggcgtagacctcatggatatccccaattacttcgcaataacccgctacctgaacgaattgcaggagcgaaaggagggaatgacccgactgaacgcccaaatggaaagatttaaaaatgatttttagagaaatgatgcagaggtaattattttttttatacctttgaacgtccattaagaaagaatatctattatgaaactgagccaagcatcattatcactccttgaaaaggccattaaacaggcagtcgccaaatacacttgcggctgtgagcaaaccattgtgaccgacatccatctgcaagccaaccagaattccggcgaattgtccatctttgatgacgaagacgaatatctggcttgtgtctctatcgaggaatggatgacttatgacggagatgatttctacgaaaatgtagaacgtattctttctaccttactccacaacatgaagaacggaggtgactttgaaaaactgactattctgaaaccttactctttcgtattagtggatgatgaaaaggagacaattgcagagttactgctgatggatgatgatacgttgcttgtgaacgaagaattgctgaaaggtctggatgaagagttggattcttttctgaaagaactgctggaaaagtaatagcatttgatttataaaaaataaattagcccttgcagtaatcggatattgcaagggctattttttagggataagtaattagggataagtactcatgcaaaattaacttgttctataaatgataatttaccagcgtagcgctggagcaaggttctccttcggcgtgcaagtaatctttcagacacggatgacacggatgacgcggattcttttttccttcggtgtgatatgccggtatgtatagcgcagctttaaaaatccgcgtcatccgtgtcatccgcgtctaaaagattaaagtccgcgttcgtccgccttatccgccttatccgcgtacccattccctcgccgataaattatcatttaccatcatataaactaattatgctcacctacttaaataaatcatttcttcagcgcagcaatgctctctttcagagagttgataatactttccgcatccgcctgtttcttacgttccagttcaaggacagcggcaggagcattattcacaaacttctcattgctcagcttcttcatgacgccttgcaggaaaccttctttgtgcttcaattctgcttccatacgagctatttcagcttctacatcaatcatattccccagaggtacggcatattccgtagttcctaccatgaatgaagcagcaccttcggttttagtatctaccacatcaattgccgagagattacacatcttcatgataaccaagttgaatgcatcaaccggattctcaccaaccacctgcaattccagtgtttccttctgagctatgtttttctgcaaacggatggaacgaacgttactgataacttccttcaccacttcgaattgctgaatcatctcgctgtctacatgggcattcatactcaaaggacataccatgatgctctcaccctcctcacgctcatacatctgttgccagagctcttcggtaatgaatggcatgaacggatgaagcagacgaagcaaattatcaaaatagcaaatcgcagcattacgaaccgtactgtgaatgccttgtccgtaagccggcttaatgatttcaaggaaccaggaagagaattcatcccagaacaatttatagacagccataagagcttcactcaggcgatatttactgaataaatccgctacctcggctgtaacttcattctgtttggattcaaaccaggatatcgccagcttagccgcttcgggaataggctggttatcatcaattgtccagccacttaccaagcggtaagcattccatatcttgttacagaagttacgtccctgttcgcaaagagcgtcatcgaacaagatgtcatttccggcaggagctgcaagcatcatacccatacgcacaccatcggcaccaaacttctcaatcagttccaacgggtcgggagaattacccagggacttggacatcttgcgtcccaacttgtcgcgaacaatacccgtaaagtacacattcttgaacggcatctttccttcatattcataacctgccataatcatgcgggccacccagaagaaaatgatatccggaccggttaccaggtcacttgtcggatagtaataatcgatttcctcattacccggattgttgataccatcaaacaaagagatgggccacaaccaggaagagaaccaagtatccagacagtcttcatcctgacgaaggtcttccatagtcagggccgaattaccggtcttctcttttgccagtttcagagcttcttcttcagtagctgctaccacatatccaccttccggaaggaagtatgccggaatgcgatgtccccaccacaactgacggctgatacaccagtccttgatgttctccatccagtagcgataggtattcttatacttggcagggtagaatttcagatcgtcattcattacaggaggcaatgccatatctgcaaaatgctgcatcttgaggaaccactgcatagaaagctttggctctataactacgttggtacgctcggaatagcctaccttattggtataggcttccaccttatccaacaggccggcagcatccaggtctttctcaatctgcttacgaacatcaaagcgatccataccgatataaaggccggcagcctcgctcaatgtaccattatcgttgaagatatcgatgcttggcaagttatacttttcacccagcatatagtcgttcacatcatgcgcaggagttactttcaggcaacctgtaccgaactcaatatctacataatcatcttcgattaccgggatcacacgatttaccaaaggaacgattactttcttacctttcagccattcgttcttcgggtcgttcggattgatacacatagcggtatcacccatgatcgtttcaggacgggtagtagctaccacagcatagcgtccttccgcatcaccttccactttatagcgcagataatacagtttgccatgctcttccttgtagataacttcttcatcagaaagggcagtcaaagccttcggatcccagtttaccatacgtacaccacggtaaatcagtcccttattgtagaggtccacaaatactttcaatacactttcgctacgcttttcgtccatagtgaaagcagtgcggtcccaatcacaggaagcaccgagtttacgcaactgcttcaggatgatgccaccatgttcatctgtccactcccaggcatgcttcaggaattcgtcacgggtaagatccgtcttcttgataccttgtgcagccagcttatttactaccttcgcttccgtagcgatagaagcgtggtcagtacccggtacccagcaggcatttttaccttccatacgggcacggcgtaccagaatatcttgaatggtattattaagcatgtgtcccatgtggagcacgccggtgacgttagggggcggaatgacgatggtgtaaggctcacgaccatcgggttttgaactgaataatttgtggtccaaccaatactggtaccactttccctctacgtcagcagggttgtacttacttgctaattccatatcttttaaatctgtatataatttattttatcgcgaataacgggcgcaaaattactaaattaaattcaaatcttgccaccctccggcgctttctgtgcagagaacgacaatttataaccttcataaagagcaattccataaaatacgattgtcatggaagccatattttctattaccacagacatcacttcaccataactggcgtcgaaaaggacgtccataaaagagacttcatattctttggccaccagacctacgatagagaagaaatctcccatcacacagcttatcaacgccaaagcagcaccaataatgccgaatatagggcgtattcctttcccctggcgcatcgcaaatcctaccaggaaaccgacaccaatggccatatatcccatctggtatccggtagaaatagagatcaaagcccaagccacagcacctgcaatgcatgccagcactccgaacaatacagctttcggtaaattctcctcagccaacagtttctccctgtctacatatcccgaataatcttcaggcttaggagtgggagccattttctccagctcttcatctttctgatagctttcacattcacctacaaatgcaggaatagccccggtacgcttgcaaaccagtcctctgccattcacgaaatcgcgtgaaacgcaattacggcaatagcgttcaatgtcattttgatcagtcataattacagtgtctaatgtcgttacttaagttgcttattaatagtttttttgcaaatataaagctaatttcctacgtgacatttaataaatgtatatttttgcctttcaaataaatttgcgatgaaatataagctgaagattcgttatatcgtgctatgcacactcttgttagtagtctgggccacacagctcattccggctatgggaaaaatatatgcacacagcgtatatcctgtcatagcttatattctttcgtctttctcacgcctcattccctttgccataggcgacttattcatagccctcagcattgcgggcgtactcctctaccctatctatgcccgccgctttcagaagaaaaaatggaaacgcatcttgctgaatgatattgaatatctgttatggatatacgtctggttctatctggcttggggacttaattattcacagcccaatttctaccaacggacaaagattccttataccgcatacactcccgaaaacttccggaactttgttgatgattacgttgacaaattgaatggatcgtatgtagatgtaactaccatcaataaggaccttatccgccgggaaactgttcgcggatacaatcagatcagtgatacgctgggtgtacatcatcctttccataagtcgccacgggtgaagacaatgcttttcactccgctgatttccatggtgggcgtcaccggtagcatgggacctttcttctgcgaatttaccttgaatggagatctgctcctttcacagtatcctgccacgtatgcgcatgaactggcacatttattgggcatctccagcgaggcggaagctaacttctacgcttatcaggtctgtacccgttcgcaagcgcgaggtatccgtttctgcggatacttttcagtgctgggacacgtacttgtcaatgcccgccgactgatggatgaagaagaatacaaagagctcttcaaccggattcgccccgaaatcatagaactggctaaaagtaatcaggaatactggacggaaaaatacagtccactcatcggagatatacaagactggatatacgacctgtacctgaaaggaaacaagatacaaagtggccgcaagaactactccgaagtagtcggattacttatatcctattatacacattgcaataaataaccctataaaaatatgttacatacaagaaaagaacagatggaagccttcggacgcttcctggacatactcgacgaactccgcaagaaatgtccctgggaccgcaagcagactaacgaaagtctgcgtcccaacaccattgaagaaacttatgaactttgtgacgccctgatacgtgacgataaaaatgatatctgcaaagagctgggagacgtcttgctacacgtagctttctacgcaaagataggttccgagaaaggcgattttgacatgaaagatgtatgcgatcacctttgcgagaaattaatcttccgccatccccatgtgttcggtgacgtaaaagccgatactgccggacaagtttccgaaaactgggaacaactgaagttaagagagaaaggtggaaacaagagtgtattgagtggtgttcctgccgcccttccttcactcatcaaagcttaccgtattcaggacaaagcccgcaacgtcggcttcgactgggaagaacgggaacaagtgtgggataaggtaaaagaagaaatccaggagtttcaggcagaagtggccaacatggataaggacaaggcagaagccgaattcggggatgtactattcagccttatcaatgccgcacgcctctacaagatcaatccggataatgcattagaacgcaccaaccagaagtttatcaaccgctttaattatctggaagcacataccatcaaggaaggcaaaaacctgcatgatatgactctggaagagatggacgccatctggaacgaagctaaaaagctggagagagaagttgacaaggaaagaagttgacaagggggaaaagggtaaattaacaaaagaacaaggggacaaggggcttgcattatcataccgcatggcccttgtccccttgtcaacttcttcccttttatgcctattttattttttctttccttgcggtttttgaggttctccacctttatgatgcatccccttcagcaactcacggttaaaacgcatttcagcacgctgtactaaatatatctttttgttcgaaagtatcttcttaaacttctcatagtaagttttctccagacggttggtagcaatacgggcatcgtatacgccttctaaaatctcattatattgcgcttcggtcgtcttttcatcccttccttttcgaagtaagttccatgcttcgtcattcagttgctttttgcggtcctgtaattcaaaataaacaggaaagaatttagcggcttcttccttagtcaatccggctttctcagtgatatacgctttctgcttggcacggaattcgtcaggagacaaatgttgattacatccgtccatagcccatgacaaggggatgaaactgcacatcacaataaacaaaacaatcagctttttcattttcttctcatacagttaagttgttactcacatcactctgcaccggcgtctgtgagatagacatacagcgaataatcatccagcatcgaattatccagcacagcactgatatattcatcagaaacaacttcggtttcaggttcatccatcgccatccggttgttaacaggtgtacggtcagtagaagcaacgcggataatcaatgctgcgccggcaaacatggcagtcatatatacccatggctttattctctcccacttcgtaggttctctcttaataattgcaggtgtttccttttcgggaagccggctcatcacctctgaagtaagattctcaaagtatccgtcaggaacacggaaaacattttccttccctaccttcttcaatatgttatcttcttctttcataagcttttttcctctctgttaggttagactatgttttggggtaaaggtttaaacctctccctccaaaaacttctcgatttttttcacggcatgatgataagaggctttcagagcgccgacagatgtaccgaagatgtcggacatctcctcgtatttcatttcctggtaatactttaagttgaataccatacgttgcttttccggcagtgtaagcagtgctttctgtagagacttctgtgcccggtcgccggagaaatagggatcgctttccagcttctgaagtacagaagcatcttcatcatcgatagaaacagtagttacagcgcgttgtttatttaggaaagtcaaacattcattcaaagcgatgcgatagagccaggtagaaagcttcgcatctccacggaaataatcgatattggtccatgccttaatgaacgtgttctgaagtaagtcattggcatcctcatgcaaaagcaccatacgacggatctgccagtataattgttcgctatattgcgcaacaatcaactcaaaccctcgcttttgtgtactttcatcttgtagaagctccagcacttcgcgttcattataggaaggattcataagtatctattccgtttcgtttatttgattaccactttccgcacgacattcccaatcttaaagatgtaataacctttaggcaaattcacctgaacggtgacatccgtagagtcaatgcgtatcgtggtaagtttcacgcctacaatattgtagacttccatctgggaaccgggttctgcattctgcacacgtacccggttttctgccgaaacagtcagcacaatagtagaagacggctgctctttctgagccgtttcctgcttccgaccgtcctgcgcccatgccacggactgcgacgaaaaagtcaacaaaaagaaaaaacagtagagtaactttctcatctataagcctatgttttcagattattccgtacaaatatacggcattcggttcgataaaacaaaaaacagacggttaaatgataatttgttagtgattatcatttatacctccaaacacagcgtttccttagccagcactgtttcggggaaaacatccgaagcttctttaagcaaaacattctcatcttcatagcgggcagaaaaatgcccgatcaccaacttcttcgctcctgccgccttagctatctctcccgcctgagcagcagtagtatgaaaagtttctttggcacgaggcaagtctgcatttgcaaaagtggcctcatggaatagcaaatctactccttttatatgttccgcaatctcaggcatatagatggtatccgaacaataggcataactacgcggtagatcagacggacgtgtcagtaaggaattggaaatgattttgccttccggagtcacatagtcttctccattctttatcctattcaactcatataccggcacttcatagaagtcaaccatctcccgaatgatatgattgggccgctgtttctctgcaaacagaaagccgcaacaaggcatacgatgacgcaatggaatggtagttactgtcagagaacggtcttcatagatcattccgggttctttcgtctcaaactcatggaaaagaaccttatacgtcatttgccggcaaaagaaacttagcatcggagccaatagggtttccaatcctttcggtgaatgaatatgcaactcagccgtacgccccagcagattgagcgtagatatcaatcccaacaaaccaaagcaatgatctccatgcagatgagaaataaaaatatgattcaagcgggaaaacttcagtcgggacttgcggaattgcaattgcgatccttctccgcagtctatcatataaagtttgtcacgcacattcaccacttgcgaagtggcaaaatgacgggtagtaggcagcgcagaaccgcagcccagtatatgtaattcaaacttttccattagcaatacattctgaacaatccttatttatttggacagaagctcttttagttcagcaacagtaaaaaggtattctatattttcaccagaggtatcacctacatatcggtatgctatccctttattatccttcacacatgcttccaggaacatttttaaggaaggttcggataaattcaaagccccctttatattctgtttcatctgctcctcattactctttaaagcagccattgctactttttcttcatcaatcgtataattgtatactactttatccgcctctatcgttaacttattaagaatggtagcctcatctatcgtcatcggacatgacacattggtaacattcaccagttcttccaacttctgccgctcactctctttttccgttcccttctgattcaagatgcgtttcaactcttcagtttccagtctacattccacttctttgccggtagactttcctttatatattaatctaataccggatttagtatccactaccatttccagcattgactttatttcccctttcggattcttgaacataaccattacagcagacttcattgcatcggtattcttccccaaggcatccaagtccagatagtcttcattcatcaacagactgtatatcacatccgttccatcaaaagtaatgctcgatatttcgcctgtcgttcctatactcataggacactgcttattagccatttctattgctaatttcagttgagacttccgactgcatccggtcagcaagatgagagacaaacaggtcagcaacatagtgcttcccaaattcttaataatgtttcgcatagtaaatctacattaaattatttataccattcagaatgcggtagattcagagccaccacattcaaccactattctgcaaagataatcataaaataaaaaagcacactttattccccaagattctatccaaatataaaaaaaagagaggacactttcaagtaagtgccctctcgtctttatctatctatagaagtgattacttctttccagcttccatttgctctttcaaagcagccagagcgtcgatgtcgcccagagtagtagaagcggcctggttttgaatagccggagcgtcttctctcttattgccagccggcttcttaccagcagccttcttttcagctctttcttctgcctttgcagcatcttcgaagatacggctgtgagaaaggatgatacgcttagcatctttgttgaactcgataaccttgaatgacagtttctcatccatctgagcctgagagccatcttccttaacgaggtgtttcggagtagcgaaaccttctacgccataaggcagagcaacaacagcacccttatccagcatttcgatgatagtaccttcgtgtacagaacctacagtgaatactgtttcgaatacatcccaggggttttcttcgagttgcttgtggccaaggctcaagcgacggttttctttgtcgatttccagtacctgaacttcgatgtctgcaccgatctgagtgaattcagaaggatgtttaactttcttagtccaagacaggtcagagatgtggatcaagccgtcaacaccttcttcgatttcaacgaatacaccgaagttagtgaagttacgaactttagcagtgtgcttagaacctacagggtacttctcttcgatagtttcccaaggatcttgcttcagctgtttgatacccaaagacatcttacgttcttcgcggtccagagtcagaactactgcttccacttcgtcacctaccttcatgaagtcttgtgcagaacgcaagtgttgtgaccaagacatttcagatacgtggatcaaaccttcaacgcccggagcgatttcgatgaatgcaccgtagtcagccataaccactactttacccttcaccttgtcacccactttcagttcagcgctaagagcatcccaaggatgcggagtgagttgcttcagaccgagagcgatacgcttcttctcatcgtcgaaatcaagaataacaacgttgagcttctggtcgagttcaaccacttccttcggatcgcttacgcggccccaagacaggtcagtgatgtgaatcaaaccatctacgccacccaagtcgatgaatacaccataagatgtgatattcttaacggtaccctcaagaacttgtcctttttcgagcttaccgataatttctttcttctgttgttccagttcagcttcgataagagccttgtgagaaacaaccacgttcttgaattcctggttgatcttaacaaccttgaattccatagttttgccaacgaatacatcgtagtcgcggataggtttcacgtcgatctgagaacccggtaagaaagcttcgataccgaatacgtctacgatcataccaccctttgtgcggcacttgatgtaacccttgataatttcttcgttttccaaagcagcgttcacacgatcccaagagcgagtagcgcgagctttacggtgagacagaaccaactgtccttttttgtcttcctggttttcgatgtatacttctacagtatcaccgatcttcaagtcaggattgtagcggaattcattcagaggaatgataccgtctgatttgtaaccgatgttcacaacaacttcacgtttgttcatcgcgattacagttccgtcaactacctcacggtcgttaactttgttaagcgtactgtcgtaagccttttccaactcttcgtggctggcaccaccgaaggtttcgccattttcataagcatcccagttgaagtcttcaacaggcgctacattttttaagttttccattaaataaaataagttgtttaataattaattgagtgagacattatattagctcataaattcgggcgcaaagataggagtattttcttgaagagcaaaaagttccatctgaaatttcttggtatttttacatccgaacggtatagaacaatcggtagtatagcctaaggtgttttgtataggaaacaaaaaagcataaaattcgttctgcatacaaaacaaaagtattatatttgccatcaattcttacataattcatgttcttatggtagaaagagaagtaatccgcagaatcatcatagagggtcaggagtttgtgaatgaaatttctctgacagaacgtccgttcttttttgagcagaaggggaactacgtattcgtaggcatccgacaagccggaaaatcctatttactttatcagcgcatccagcaactactacgcgaagagcataacatcaatgaaattgtttatatcaattttgacgatgagcgcctccgacaaatgacagcggatgatttagacctaatcctgcaagcatatcatagcctgtttgatttgcgtcctttacttttctttgatgagatacagaatatcgaaggttgggaacactttgcccgacgcctggcaaaccagaagtataacatttacatcaccggtagcaatgccaaaatgctgagccgggaaattgccactacattggggggacgtttctggaataaagatatctatccttattcctttgctgaatatctgaatgcccggaatatcattttatccaagaactggatgtatggcaaacaagctgccgaagtaagcaaggccttcaatgactacttcctgtatgggggctttcctgaattaaccgatgtcatagctaaaagagtctggctgaatgacatttacagtaaaatattcttcagcgatttaattgtgcgaaacaaagttcgaaacgaagaagctttgggattactggtgcgaaggttggccgagaatgtcaagcaacctgtttcatatacacgattggctaacttaatcagttctattggcataaaaataagcaaagcaaccgtcatcgagttcatccgttatttaaaagaatcctgcctcatattccctatagagaactatgccgccaaatttgccgagcgcaattcaaacatgaagcattattttatagacaatggcttactgagtatctttttgcttgatggcaatacttctcttttagaaaacatcgtcgctattcatttatataagagatatggtgcccagctctacttctacaaccaaaacatagaagtggatttcatcataccggaagcaaaaacggctattcaggtcagctactctctgatggatgaaacaacctgtcggcgagaagtggaaggcctcatcaagctaaaccgtgtttttccaatggataatatgtgtattattacacgagatgaagaacggattattactcacgaaagcggtgtctctattcatgtgattcctgtttggaaatggctgttggaagaggaaccgttgcaaacttgaaaaccgaattgttgtcaagagcagatttacatattattaactcctctaagcgaatttagatagccgactgcattgctggcacacttacggaacagatgatgcgcttgccacaaacagacgatgcatttgccacatgttaacaagacaaatgccacactttaatcctccaaatgccacatgttagcgggtgaaacctgtggcatttcacctgccgaggtgtggcattcgggaaactgaggtgtggcatcggaagtattggagtgtggtattcaggaagcatgaaaagggaggatacagaaatgaagagaagcaatgctcctcctcttatgctaatttaaaattgaatatgagttaagattacggatacaaatatactacatacaaaagccgaagtcaagcttttcaccgtatttttctgaaacataagcataaactttagactgctttattgcttcctaaaaggattttaagtatctttgtccaaacgattggataaaaacaccaccgtttcatccaacagattggataaaccaccttgctttttatccagcagattaaacagtatggataagcaactattaaaatcagtcatgctggacaatcagaaagaggttcagcgttacgaggtcttcaagagagactttcattttgaagatttcggtaattatgtacttataggcatcaggcgcgccggaaaatctttcttgatctatcaacgcatccagcaattactcactgaaggcgttggatgggacagtatgctatatatcaacttcgaagatgaacgcttagacggattgcaagtttccgagctcaacctcatcattgaagctcacctcgaaatgtatggaaagaggcctatacttttcctcgacgaaatacaaaatatagaaggctgggaaaagtttgcccgacgcttagcggatgaaaaatataaggtatacatcaccggaagcaatgccaaaatgcttagcagtgacatacaaacgacattaggaggcaggtatattacaatcaatgtatatccttacagtttcccggaatttctggaagtccaccacacggcttatgacgagctgtctctattgggtacagaatccagagctgccgtaatgaaccgttttattgactacttccataatggcggtttccccgaaggtgcacttcttgcagcaaaaaggaactatctcaccagcgtatatcaaaagatatatttaggagatatcgctgccagaaatgccataacgaacactttcgggctgaagattatgattaaaaaactggcggaaagcataaaacaacctatatctttcaaccgtatagccaatatagtatccactacgggcagcaaactcagcacaacttctgccataaaatacgttgaatatgcagagtcggcctggcttcttcaacgcatcaataatattgccgctaaactggctgagaaagaaagcaacagcaaatattatttcacagataacggaatactcaatttattcctgatagacggaaatacatctttgcttgaaaatctggtagcaatcagcctgattcgccaattcgggaaagaagatgccgtattcttttataataaagggatagaagtcgatttctatattccggaaaaagaatgggccatacaggtatcatatagtataaaagacttggaaaccagggaacgggaaacggatgcattaataaaactgtccaaggtattgccttgcaaacggtttctcgttattactttcgatgaggaaagtgtgctgcaaatggataatcatataggaatagaggttatcccagtatggaagtggttactgaaaggggaataataagatgctcctaaaagttttttgcaaacttttaggagcattatcgagtagaccgcctcttttaccagaactattaatgtttagcgcatcctacttttgaagttacttcattactttatggcaaccttcttgccttcgaggaaataaaatccacttgataaaccggtgactgtattgcttccttcgtgcaccactactatgcgaacgatacgtccggttacatcataaatggagatgcttcggtcacggtcactgtctatataaagcacattgccagcggtatatattttcagagattcgtcttctttctttaaaatttcttccaaaccggtaatttcaccaccttcgccaccaatactataatataacggagcattagtagccgattctttggtaactacataggcttcaaaaggatctatatctctcaaacaactcacaaagagactacccgcaggaaaatcgccatgttcctcttggctcaaggcatatactctattagttttcgaaacagaacgcaatgttggcaccaactcgtacagagcattttctcctgtcggcatcacagaaggagttgcaggtatcataacacccgcttcatccgccgcttcaaactgtacacagcctgatatattatattgctcttcgtattcatcactattattgggcatagctataatataaggtttgttagcttccaacgccgccacattcttaaatccatccgaggccagttctctcagccaaaacggcttacttcctatttcggtagcaccaaaaggggataacttgcctctactttcatgggtaaactcctgcacggtaaaaggaagaactacagaggtccacccagcagcggttcctttcttcgtcggtaaagtaaattcgcgtgtataagtaatatgtttagcctttaattcacgggctacgtagcatgaatagccagcattgaatactacttgctccgccacattctctctgacaatattatcgttccacgtttcaggcaacaccgtcccttgtgagacataaagcaaacaattacacggttgcacatctgcaaagaaactgctctttatctccagctcactgttccaaacgatactgcccatgtttgcgcatccatcgaacacataatcctccatttgagtcacagtggacggaaccgacacataaaccagattggcacaacccgaaaaagcattatccaagatagctacacaaccttcaggaatttcgatagcttctaactgactacaaccagcgaaagtaagagattcaatcctcttcagattcttaggcaatagcacctcttttaatttcgaacaatctctaaaagcccagtatcctatctctatcacagaatccggtatttttatctcctgcaaattacgacatcctttaaaacaggaactttcaatagatactaatctatcaggcaactttatgttcaacagaccggaacatccctcaaaacaagcagcacccatatacgttagactattaggaagcacgacagtttccaaagaattgcaagataaaaaagcataatctcccagtttctctaattgtgccggaatatttacatttgacaattttccgcaagaataaaaagcattttcgcctatagtcttcacgatatcaggaagtttcagtttttccaattgcaggcaaccgtgaaatgcactttcctcaatcttagtcaccccatctggaatctccaacttgacaagagaggttccttgaaacaaactgtgttctattacagtaatccctttgggcaaagtgatttttttcaagttggagcaccccataaaaacactatgcccaatataagtcaaccggtctggaagtactatatcctcaaaaccacaatcgccaaaagttccccattcaattaccaaatcagtattacctccctgaataacaacctcctttagcccaatacaaccttgaaaagaattactgccaatactatccacgttctctgaaatccttatgctttccaatgtcttacactgacgaaatgcgtcacttctgatcgaatgaaggctttcaggcagagataccgtcttcaatttttcacacagatagaaagtactactttcaatggaagtaattccttccggcacctcaaccgaagttaagcctgttcttgaaaaagcagcccctcctatccgaacaaaattattgggaataatcacagatgacaataaagagcactctgaaaaagcatacgcccctatgttctcaatcccgacaggcaagctcaacttattgagcatcctgcatccgaaaaaagcttctttttcaatcgttagagtatgttccggaatcaatgcttcctgtagaagtgggcatttataaaaagcattatattcaatacacttcaaagctgttggaaatgttactctttgcagattattcatccaagcaaaactatgattcctcaatgtatccaccgaatttggaatcacaatctcttccaatgcagattgactaaaacagctattccctattttcttcagattttcaggaagcgtaatgtttcttaaattcaaacacatataaaaactaagtgtgccgatttcagtcactccatcaggaatcgtaacagatttcaatttctcacactcccccaaagcatatgttcctattttataagccttatcaggcaaaatgatattttctaatgtactcaactgataaaacatataatcgcctatttcatcatcagtcttaatgacatgttctccatttgcagtatacggctctacataataaacaatgtcacttttcagaatttccgtcccgttcatatccaatgtcctcaactttttcatttcccgaatacactttatatccgttccattcaacttccccgtcaatgtcaattcttctactgtttcttttttatctccaatcaaaacaggaagagtcccagccacttcaacatggataacttcctgtgcccatacgtccgtagatatccaaaggcaaatgagcattactatgcatgatatttttattctatccataactttctttattttttatctggtgattcaatatcgtcaataccaggttcttttacctctgtcgccgttacaaactcctccacaggactataacctatatctattccattatttgcataagcacgaatatagtaccttgtcccggcagctaaaccaatcaaatcagcagcaacattcatcgcttcgtcagatgacgttatcttattatctgagagagcaggtatcttattcacagaactataacaaaaccctttttctataacagcagctccaccatcagaagaaataacgactaaagcagatgctgcgtgctcaccaatattactaatagtgattttacccacagtaggagcaaccactacttgttccggcggatcagttgaaaacatttgtactataccatagccaacacctttctcattcgctgcataagcacaaacataatacttcgtaccggcagccaagttcgtcacatcatatacaaaagtagtgccgtcagccgtcacttcccgctttgttccatcattcactggattggcgctcgtgccataataaaaacctttggaagtcacagcactctttccgtccgaagtgatattgccggagaagcgggcagaagtctcaccaatattagtcacatcagaagttaccaccgtagggattgtacggtcatcggcagtcataaattcttccaccgcacccaaagcagtgcctttgctgtttatcgcatacgcacgaatataatattttgtattcgccgacaagccgctgagagaagaagaaatcatattgcctgatacagcagaaacggctttagcatcagctgccgtgggaactgcattcgtactactgtaataaaatcccttttcagagatagtcaagccaccgttagaagtgatttcggcagaagcagtagcagtagtttcggtaatgttactcatggtagtaactcccacagccggtgcagtagttgctacatccgtagcaaaggatttcacttcaccataactcgtacctttcacattaatagcataagcacagatataatatttggtaccggcagccaaattcgttacatcatacgtaaaattagttccgcttgccgtcacttcatgcttcgtatcgttcaccgtaggagttgtattcgtactgctccaacaaaagcctttggaactaatttcactattaccgtccgaaacgattgttccggcaaaccgggcagcggtttcactgacatttaccacttccgaagttgtcactgtaggcagtttcacctctttcaaagtagtaaacagattggcctcaccatatccaacgcctttctcattcaccgcatacgaacgaatataataagtagcctcaggttccagttgcgtaagtacaatgacaaaaaactcttccgtaccgtccacctttatcttgatattatttatatccggttgcatcttctccttactcaaacaaaaaccacgttccgtcaccgtattaccgttatccgtaataacagaagaagccgctttagcggtagtcgccgctatctccgtcattgtcgtagcagccaattcaggaataacacttgccggagtggtaaatacaaacacatctccatatcccgtaccttgttcgtttatggcatacgcacgaatataataagttgttgcaggtttcaattcatcaataactccattgtatgtgtcagcatctccctcaactactttctttaaattcgcagtggtaggtgtctgactttccgaactccaacagaaacctttttctgtcaatagcgcttctccccgactcagaatacgcgcttcaaccgttatactgacatccgtggaatctttcggattgatgctggataccaccggtacggtagaagtatgagtagtaaccagcaaactctttccatagcctacccccttagcattgatagcataggcacataccagatattctttaccaggtgtcaaatcattaatcttagcggtaaaggcagaagcctccaaagaaacattgctgacattatcagacactgtaggttctccaccgcccgacaatttccagcagaagccgcgaagtataaaatcgcttccaccttcatcaatgattgtggtagaaaccgtaaagctcttctcatccttattactgacctgcaattcgccaaatacaggcacattactatctgtggttctgaaagattttatctcccccttcgctatgctatagccactgctggcataagagcaatagtaatagtcttttccgggctctaagccttgtacagatacgctgaaagacaccggatcggctgtcgttgcttttacttccgtgtattcaaccatactttgtaattcagaataaagaataccgaaatcctttactactgttccctcggacttccgcacactacccgaaagcgtagcacccatacgataaacttccgataccgcacccgtactcaagccgggggcaaaatttgacggttccgtatctttctcacacgctgtcatcaacagcaacagagtgcataataataaatattgtagttttttcatacctttaacaatgaatggtaaataatcaatttagaagaagaaaccaacaccggcacttaactccatatatttaaagttcacagtctggcaacccactgaaacggcaaatttgccgaaacgcccgatagcaccgatttctgcggctatgccggtggctgaatgatcggtattctttaccaattcatcctcaactgtttcccaagccagagtacggcttccataacctgcaccgatataagcataaagcgttttggctatcctgcgcatatatcctgcggtaacagacatacgcgctttctgcgtcacaccttctttataataaggagtaccatttcctccaccggtcagtgctcccgtatcgtcacattccaaatcggcagaaacggaaccaaagtcactgcggaaacgaacgtaggcaccatttttagccacaaaacccaccatagctccgaaagaggtctgcgaaggatgccaaccggcttcaagcatcactaatgtacggcgaggttctttgggtttaatggtggatttcatcttaaaggtaagactacttgtttctccggcagcgataacgatggtgctatccatagggaaaaagaactctttctccacacgaacctgataatctttcaatggcatacggtcgctcttataaggcgtttctcctgcaagttcgttgtcaatataaactttcgcatcctgttccggcaaagaaaaaacttccagataaccaaaacgaggtttaagagcaacactcataatcttttgttcacttcccaaatcaataattccagcttcaggagcatacataggggcttctacccgataagtatgcgtccctttcttcatcgtagcagtaaacaatcctttctccgtcggcatctttccatcatcaacataaatatccgcaatagcaggttcgggacgcataacgacaagttgcatatttgtatcaacagccatctccttagcctcatcccccgcactaagctccatctcatagactgtcgccttttcaatcaggtcaggatagaaataattacggagtatgccatacttctcgtgcatgatagaaatgcgccgtgccccacggggaacatagagccagatttctcccggcttattctctcgcgccacaataccaagggcatccggttcaaacataaagtctttttcagtagtaacaatacggataagagcgcagatttcaccgttctgatccctctgcggagcagtgatgcgtgctgtaatgtctgtctccatacgctgaaaagaagtcacttgaattttgttttgtgccgtagcggagtgcggaacaacaagcaggaatagcaatagtaatcccaccggcaacaaacgtgcaatagtactgtttgtcatacgtgttttttctttatttcttccgcctatcctctatcaacgggattattatataaagaaagcgtgaggaccgttattgtctatcttctcttcaaggctctggaaaatgcccttaccacagatagacaacagccctcacgcctatattatataacatagacatgaagaaactgttgctattaccccgtggtatacgaattttccagattctgaagaggggataataacttttcgcttcttgcgtttttcttaaaaacagaaagtcatatatgtcacttatcactataactgacctgacttcaactgcaaatgtagaacaaattcttttataaaaagtactttctatgaataaaaaaacatttcaagctcttttctttttatagtaaagaatattcgtcactgaaatccgtgacattttctggtatatgccagtgccgcccctatcgccgtcctatactccgcatagggtggaatatggaagcgcaccccatatatcttttccatattcggaaaaacctcctggcactgcggaaatttagtaagattaccaatcaagacgaaatctttgataggaccattcagcgcagacaacacagctgcaccacctatcgtttgcagcaccatataaataatcccttttgcaatatcttcctgcgaagcgttactatccgcttttccgaacagcgaagcagtggcatgcaccggaagatccggcaaaggacgattgcaaatatctccaatctgcaagtttacacgggtaatgtcgcctttctcggcaattgctgcaatctgcctgaaatcatgcgtcttcagcaacaagcgggaaagtccctgcaaagtacctccgccaattgccataccaccaatatgctctatcttttctccgttgattcttacgaaagaagtgcccgttcccatgcttaccacgatcagctggtcaatatctgtggcatgacgtgcacccaacccattggctataaactcatcgaccttatccgtgggtaaaccatacaacggactatctacaaatgcactacccacacctgtcagcatcacttgctctatatccgaaagctgaataccattatcataaatatacttcccgaaagccccgaacaaagaagtaaccggatcagtcgcagtgataaacatcggtgactgtatctgttctccgttgattcctacaatttttgtagtacttccgccaacgtctattcctattacaattcccatagtttcaatattgtattcggctacaaaggtacaaattgttttattgtagatgtgtattcaaatcttttttgttgcatacataaagccccgttacaaaaagtttattcacacctttccctacacgcttgcactcatgtcttgtatctccttgttcatcggggttagagcggtggtggcagcaaatagaaataaagtgtaggcaaatttgcttgcaccaagtaaaatgaatatatatcgcttataatctgtcaaatacatcatgtaagatacttaaaatagctgtttggtaaccagctattttcatgccgttttatgaggaaaagtatggagggtatgccatttttttgcttggtatacgcctttatccgttcagtacatcacaatcttgcgtcaaccggcctacatttctttcactagccgcctatgtttcttctgtttacaacctatatttcttccattgacaaacgaagtttcgacatgtccacatatgtggttcaggagcttcacattagtaaagcagcatacccacaattgtgaagcacataaaccacagctgtaggcacacaaaagtaaagcatccgaagctaaagaaagtactatgtaagagctagttaaagagtatgtaaagcagaaagaagcgtaaagtaaaaagacatgcaaagtggaaggggcatgcaaaatacatgggcaactataattacaaaacggcacttcaaagtcgatgcttaattattgattatcaaaaaagtacaagaattccgttttctgtcagcaagaagttaagagtttgtcgacaaggagttaacttcttgttcacaaactcttaacttcctgtaagcagagaatataagatttttccattattttacaaaaagagagacggattctattttttccattttgagggaaagttgactggtttccgtcctttctggtgtaataatgaaataggtccgctttatctgcgtagtccgcgtacctatttcataccacggtgaactaaagttatcagcatcaatggctgcaaaccttcgttatatccaccgtaaatccatcgtcagcaggcataaacttacctttcgctttcagaaactctatcaatttatccgcatccatatcttctgccgagcaagtataaaaatgttgatgctcaccgaatttctggatgattgcctcttttaatgatgattccgaataactgttgccttccatcatatgaaggacttcatgagcatgtaattgttccataatctattttttctgcaaagatagcacgaaacacggattggagttgtaacatatgtgacacgaacctataaaaaataaagaagcaaagttaaaagctcttttttacctcctgatatacgtttcgggaagtttctccgttatagaaaaagtatgagacatttttggttactgacagctcttataatactattctccactcccgcccttgcccaaaaaacagtcaagataggcggaacggttacggatgaaaatggtaatccgattgaattggcaacaatacgattggaagggacggctataggcacagtcagcaacctgaaagggagatattcactgaaattcgaaagccgggacagtgtaacggtcatcttctccatgctgggataccaaacccgcaaacgaaaattagtacgtccgcagggaaatatcagtctgaacataaccttgcccccgatgaactttgaactgggtgaagtgagcgtaacagagcgtcgccgacaaaccggaaccatccaacagatagaaaccaagcaaaaccgcctggcccccgacgcttcgggcggaagcatagaagccgtgatagccacgcaggccggagtgagtagcaacaatgagctcagctcgcaatacaacgtacgcggcggtagtttcgacgagaacatggtgtacgtcaacggcattgaaatataccgtcccttgctgatccgttccgggcaacaggaaggattgagtttcatcaatcccgatatggtgcaatccgtcggcttctccacgggaggctatgaggccaagtatggggataagatgtcatccgtgctggacatcacttacaagaaacccgaacggttggaaggaagtgcctccgtcagcctgttgggagcctcggcatacgtaggaattgccaccaagaagctaacctggacaaacggcatccgttataaaaccaaccaatatctgctcggcacgctggatacaaaaggagaatacgacccgcgttatatcgactatcagacttatctgaactggacaccttcgaagcgttgggaagtaggtgtcatcggcaatatttcagaaaaccgctataacttccagccggaagaccgctacacccgcttcggcactctcagcaatgtacgtgagtttaaagtctattttgaaggacaggagaaagatttattccgcaccctgttcggaaccgcctacgccacctaccggctgaacgaacagaacagcctgaccctgcaagcttccgccttccacacgaaagaacaggaaacgtacgacatcaccgggcaatactggctgaactccctggacagcggaacgcaagtagacggcactaccaacgaagaggaaacttccgaaaccatcggcgtgggaacttacatggaacatgcccgcaattaccttaccgcagaggtgcaaagttattccatcacaggccgccaccgactgaaaagccactccctgcaatggggtgcggagttcaaacgggagcgcatcaaagaccggatgcgcgaatgggaaatgcgcgactctgccggatactccatgccacaaacttccgaaggaccggaactcttctacaccctccgttcgcgcaacgaaacggacagcaaacgatacggattttacctgcaagatacataccgcttccgctccaccgccggactattcaccctgaccgccggcatacgaggcagttactgggactggaacaaagaattcattttcagcccgcgtgcctccctggctctgattccggcattcaatgagaaattcaccctgagagtagctgccggagtctattaccaggcaccgttctataaagaattccgggataccacccaggtggacgggatagctaccgtatctctgaaccgtgacatccgttcgcagcgctccctgcacttcgtggcaggtggcgactataatttccgtgccatggaccgcccgttccgcttctccatggaagtgtattacaaagcattgagcaatctcataccttataatatagataatgtacggattagttattacggacgcaacctttccaaaggttacgccaccggtatcgacatgaaactgttcggtgaatttgttcccggaacagactcttggctgagcttctctctgatgaaaaccgaagagaaaataaacggacaatggctcccccgtcccaccgatcagcgctaccgtctttcactctattttacagactattttcccggtagccgcaagtggaaaatgaacctgaaaggtacacttgccggaggtcttcccttcggccctccacatagcggacgcgaggctgccgtgttccgtacatccccttaccgacgtgtggatataggtatgtcccgctgtattatcgaccgcagtgaacgcgaaaatcagcgcggcatccgcagcctttggttgggggtggatattttcaatttgctaaatatcagcaacgtcaactcctattattgggtgacagatacccgaaataatcagtttgcagtacccaattacctgacatctcgtcagattaacgtccgcctgttgctcgacttctgaacagaagtctaaaaaaacctttctaaacttcaaatatccaataattaattgacgaaaaatttctctattaaggaagaaatctctttctttgtgctgttttatgcctttgattaagacattataccaacattaataaatatagttatgaagatttcacacattgagcatctgggcattgctgttaagagcattgaagaagccctgccgtattacgagaacgtattaggtctgaagtgctacaacatcgaaactgtagaagaccagaaagtaaaaaccgctttcctgaaagttggtgacactaaaatcgaacttctcgaaccgacctctcccgaaagtactattgctaagttcatcgaaaacaaaggtgcaggcgttcatcacgtggcatttgctatcgaagatggtgtagcaaacgcattagctgaagtagaagctgcaggcgttcgcttaatcgacaaggctccgcgcaaaggtgctgaaggtctgagcattgctttcttacacccgaaatcaacactgggcgtattgacagaactttgcgaaaaaccgtaagataattacaaatgacaaattactccgttcacgggtaattttgtaatctgcaattcataatttgtaattcataatttataatttaaaaaaagtattaacccattatatttaataaaatgagtaatcaacttgaaaagattaaagagcttatagatcgccgcgcagctgcacgtctgggtggtggtgaaaaagcgattgccaaacagcatgagaaaggtaaatatacagctcgtgagcgcatagccatgcttctcgacgaaggtagtttcgaagaaatggatatgtttgtagagcacagatgtaccaacttcggtatggaaaagaaacactatcccggtgatggtgttgtgaccggttgtggtactatcgacggtcgtttggtttatctgttcgcacaggactttacagtttctgccggttctttgtctgaaacgatgtctctgaagatctgtaagattatggatcaggctatgaaaatgggtgctccttgtatcggtatcaacgactcgggtggtgcacgtatccaggaaggtatcaacgctttggctggttatgctgaaatcttccagcgcaatatcctggcatcaggtgttatcccgcagatttcaggtatcttcggtccttgtgccggtggtgctgtttactctcctgcactgactgacttcacgttgatgatggaaggtacttcttatatgttccttaccggtccgaaggtagttaagactgtaacgggtgaagacgtaactcaggaaaatctgggtggcgcaagtgttcactctaccaaatcaggtgtaactcacttcactgccaagactgaagaagaaggtttggctttgttgcgtaagctgttgagctacattccccagaacaacctggaagaagctccttacgtagattgcaccgatcctatcgaccgtctggaagattctctgaatgaaatcatccccgatagcccgaacaaaccgtacgatatgtacgaagtaattgctgctattgttgacaacggtgagttcctcgaagttcagaaagattactcaaagaatatcattatcggtttcgcacgtttcaacggacagtccgtaggtatcgttgccaaccagccgaagtatctggcaggtgtgctcgatagcaacgcatctcgtaagggtggccgcttcgttcgtttctgcgatgctttcaatattcctatcgtttcattggtagacgttccgggattccttccgggaacaggccaggaatacaatggtgtaattctgcatggcgctaagttgctgtatgcttacggtgaggctactgtacctaaggtaacagtaacattgcgtaagtcttacggtggttcacacatcgtaatgagctgtaagcaactccgcggtgacatgaactacgcatggcctactgctgaaatcgctgttatgggtggtgccggtgccgttgaggtattgtatgcccgcgaagctaaggaacaggaaaatcctgctcaattcctggcagaaaaagaagctgaatacaccaagctgtttgctaatccttacaatgcagctaagtatggttacatcgatgatgttattgaaccgcgtaacacacgtttccgcattatccgcgctttgcaacagttgcagactaagaaattgtccaacccagctaagaagcatggtaatattcctttgtaatcaggcttttaacactaaaaacaagaacgattatgaataaaacaaaaatcggaatattctttaccttgctgctgatgttaggtgtatgctcttcctgtggagagaagaaagacactaataaactgctgctgaatgaagtgctgattaccaatgaaagcaactttcaggatgactacggtgtacacagcgcatggattgaaatattcaacaaatcatacggtagtgccgatcttgcaggttgctatttgaagttcagcagccagcctggcgatactattccctatttcatcccgaaaggtgatgtgctgactctggtgaaacctcgccagcatgcattattctgggcggacggagaacccaaccgcggtactttccacaccagcttcaaactggatgccgccaatgccaactggattggtttgtatgactccggcaagaaattgcttgatcagattgtgatacctgccggtacgctgggtgccaacgagtcttatgcccgcatcagtgacgctgccaaccaatgggaagtaaaaggtagaagtagtgacaaatacgtcactccaagtaccaataaccagaccattgaccgcaatgccaagatggagaagtttgaagaacatgacagtgtcggtatcggtatgtccatctccgccatgagtgttgtattcttcggtttgattcttctctatgtttcatttaaagttgtcggtagagtatctgttaatctcagtaaacgtaatgctatgaaggctaagggtatcaccgataagcaagaagctaaagaaaagaaactgggcgaagctccgggagaaattttcgctgctattgctatggctatgcacgaaatgcaaagcgatgtacacgatgtggaggacaccgttcttaccatcacccgtgtaaaacgcagctattcaccatggagttcgaagatttacacattgcgtgaaactcctctgaaaaagtaatcacctataaattgataaaacgatgaaagaatataaatataaaatcaacggtaatacatacaaagttaccattggagatatcgatgaaaatatcgctcacgttgaagtgaacggtaccccttacaaagtagaaatggaaaaggcaccgaaagtggttgttaaaccggtagtacgtcctactactcctgcccccgctccgactccggtagtgaagccggccgctccttctactggcaaatcaggtgttaaatcaccgctgccgggtgttatcctcgacatcaaagtcaatgtaggtgatacagtgaagaaaggacaaaccatcattatcctcgaagctatgaagatggagaacaatatcaatgccgacaaagacggtaaaatcactgcgatcaacgtaagtaaaggagattccgttctcgaaggtaatgaccttgtaattattgaataatatgggagaatttatcacatttttaggaaacaaccttgccgacttctggacgtacacgggttttgccaatgcaacggtaggccacgtcgttatgatcctggtaggtttgttcttcatatacttggcggtagccaaggaatttgagccgatgctgctgattcctatcggattcggtatgctgatcggtaatatcccctttaacatggaagccgggctgaaagtcggcatctatgaagaaggttctgtgctcaacatcttgtatcagggagtgacctccggatggtacccgccgctcatcttcctgggcattggtgctatgacggacttctcgtctctgatatccaaccctaagttgttactgatcggtgcagctgcccagtttggtatcttcggtgcttacatgattgctttggaaataggtttcgatcctatgcaagccggtgcaatcggtatcattggtggtgctgacggtccgacggctatcttcctttcatccaagttggcccctaacctgatgggtgcgattgcggtatcagcctattcgtacatggcgttggtaccggtaatccagccgcctatcatgcgcctgttgaccaacaagcacgaacgtctgatccgtatgaaaccgccgcgcgtagtttctcacacggagaaagtaatcttcccgattatcggtttgttgctgacttgtttccttgttccgtccggtctgcctttgttgggtatgctgttcttcggtaacctgttgaaagaaagtggtgtaacccgtcgtttggctgaaacggcacgtggtccgctgattgatacaattactatcctgttaggtttgacagtaggtgcctctactcaggcttctgagttcctgacactcgactctatcaagatcttcggtctgggtgcattgtcattcgtaattgctaccgcttcaggtgtgatcttcgtgaaaattttcaacctcttcctgaagaaagataataagattaacccgttgatcggtaatgcaggtgtatctgccgttcccgactcggcacgtatctctcagatagtaggtttggaatatgatccgactaactacctgctgatgcacgccatgggtccgaacgttgcaggtgtaatcggttcagcagtagctgccggtatcttgctgggattcttgatgtaaaagacatgtgcgttgagtggtatctttaccattcaaaacatccggtatattttagcgctccttcgtctgaaggggcgctatttttattcgttaatctatctaaaagtagctacgaatatttcgtaaagtaaatctttttagtaacttgcagccaattaagcaatactttaaagataaaaagactatgcggaaactctttattctactctttttcagtgcctcttcattgctgatggcacaaaacaccaaccccattcaggaagcaatggcaaactatgattatgaaacggcattgacacttattgataaggagacgccgactgttcccctactctatcaaaaagggaaagcgctgaaaagtcttggcaacaacagggaagcgcttcaagtatatgaagaagtcgtaatgcaagattctctgaatccacgagcttatattgaagcagcagagtgctgcaagtcattattaaaaaacaaacaggcattaaaatattatcaaaaggcagtggacctgaatccggataataaatatgcccgtatccaatacattactctattactgaatcagcggaaattcgatgaagcattgggagagagcagtctacttacagaaacagatagctcggctgttgcattacatctacaagctcaaagttttgaaggggtagatgacattttagctgcattgggatgctatgaaaacatacaggaaaaatatcccaacgactttctggctgctgccaaagcagcaagactacacatcgaaggagcattttataattatgctatagaagctactgaaaaataccgccagatagacagtacaaacgttgttgtcaatcaacaaaatgcattggcatactgcctgatgaaagattatcagaccgcaatacagagatacgaacagttactaagcctaggggacagtacatttaccacctgttattatttaggagtcagttattacgcagtagaaaagttttatgaagcacatgatatactggaagtagctcgccaatatgataagcgtaatgtgaatctgctatattatttaggacgctcctgttccaaaacgtcatggaaagatcaaggagttgcatatctggaagaagctgtggcatatgctaccccacccgatagtgctatggtacgcctctatgtcggcctcacagactgctataaaatggcactaatgcctaaagagcaaatcaaaacgatgcaagacagatatgataaatatgatatagaaaatcataagctcttgtatgacatggcatatgtttaccaatatcagttgaaagataaaaagaatacagaacgttgtctggaggctttccttaaaacgcgtcccaaaaacagcagtgagcaacccgaaacagatgataaaggaaatgtaatattaggattaagtacttattatggtgcggccgaaacttggctgaaagatcttcgcgagaaaaagaaagtggatgacttctttcaggggaaagtgattgcagtaccaacaaatacgaaaaagacagaaacttccagagacacagtaaagaagtgaaaacgtttgcataacattataaagtatataatagcggagtagcggcagctttctccgctatttgcttatattagcaccaaaatacggatataataacgaaaagctaatatcatgaaaaaattattccttatcctgggaacgtttttactttcccttagtacgtatgcagctatgaacgtaaacaaaatcgaccctccgttttggtacaccggaatgcaaaatcccgaactccaacttatggtctacggtgaagacatcggtaactcttccgttactgtcaactatcccggcgtttctttgagcagcactgtcaagctggaaagcccgaactacctgattgtctacctgagcctggagaaagatgtgaaacccggtaaagtagctctcacttttgcacaaggcaaaaagaaaatcgtcaaagagtatgaactgaaagcacgcggcaagaaaagctgtgaacacaaaggttttgatgcttccgacgccctctacctgttgatgcccgaccgctttgcaaacggtaatccggacaatgaccaaatccccggcatggccgaatacaaagtagaccgcaatgatccgaacgcccgccatggtggtgaccttgcaggtatcgagcaaaatctggattacttctccgacctgggtataaccgctctttggttcactccggtactggaaaacaacatgaccggcggttcgtaccacggctatgctactaccgattactataaagttgatccgcgtttcggcaccaacgaagagtatcagcaactgatatccaaatgccacgaccgcggcatcaagattgtaatggatatgatcttcaaccactgcggtgtagaacatccatggattaaagatatgccgtctaaagactggttcaacaatcccgatcatgaaaagaacttcgtgcagacttctttcaaactgactccgcacgttgatccttatacttcacaatacgacttcgaccagatgaacgacggttggtttgttaccgctatgccggaccttaaccaaaagaacccgcacgtatatcgctacctggtacagaatagcttctggtggattgagtacgccaatatcgacggtatccgcatggacacttatccgtatgccgactatgacgccatgagcaactggatgaaagagctgaacgaagaataccccaactataacaccgtaggcgaaacttgggttaccgaaccggcttatacagcttggtggcaaatggattccaagctctctgccccgaagaacagtaacctgaaaaccgttatggacttcagcttcttcgataaaatcaatactgccaagaacgagcagaccgaaacatggttcaaaggtctggatcgcgtgtacaatagcttcgtatacgacttcctctaccccaaccctgcttccgtactggcatttatcgaaaaccatgataccgaccgcttcctgggtgaaggcgacaatctgccaatgctgaaacaagcttctaccctgctacttaccacccgccgtattccgcaactttactatggtacggaaatcatgatgaacggtgtgaagagcaagagtgacggatacgttcgtaaggacttccccggtggatggactggcgatacagaaactgcactgacagccgcaggacgcagcaagatacagaacgaatgctataacttctacaagaccttattgaactggcgtaaaggaaacgatgtcatcgccaaaggtagcatggtgcagttcatggtacagaatggtgtttatgcgtatgcccgccagcacgaaggtaaaaccgtattcgtaatgttgaatggtacagatgccgaaactactgttcctttgaaattctacaaagaaatattgaaagattccaaacaaggaaaagatattcttagtggaaagacagttgcattcggtgaatcgctgacaatgggaccaagagagtcattggttattgagttataaataacatttcataaaaacaaaaaaacgcagagaaatacactctgcgttttttgtataccaatgcctaattcacttaaaaagtcaaactgtcttagtagatcaattacctactagtaaacgagtaattatttactagtagttaggtaattactagtaagtaaccacccaactacctataggcaatttatgcagtatctaaacttttcaaaagcgaaaaaacatagttcaggatgggaaataggaaaatggcataattacaacaggtaaatgaaccttttttaaacatataataaaataattgttcccacctttgtctattgaatttacattcaaatcaagtattatgaaaaatagacaaactactatcttatatgtcttattatgctgtgcatgccttttttcgtgtcagcgtgataatactaccaagctattagagttggcagaagcccaaatatgggaaaatccggattctaccttacagatactggaacagatttcttcaccggaaaaactcaaaggaaaagaacaggctgactatgctttgctactgacacaagcaaaatatcgctgcaacatcctggcaccttcagattctctgataaatattacaatagattattataaggagaaagaagatgccgatagaaaaggggcggcatatctgtataaagggggtgtgttgaatgagttgcatgaatccgaaaaggcaatccaagcatataaacaagctgaggagtgcataccggaaatgacagatactcatctgattgcacgaatatatagtgatttaggatatttgaatcaaatggaattgaattatgatatagctaaatcatattataaaagatctctcgccataaacaaaagtgcaggatatacgtccaatgctgtaaatgacttgataaatatggtgggaatatctattcattttgattatgagaataaacaagacagtgcagaatggtatacctctgaacttttgactttaatttcaaaggtcgactctgcccagcagagcaatatataccacaacatagcagtcctgaagatatataaagaggaatatacggaagctgataaatacctccaaaaattaaaagagatttcaggtgggaagcttaagtataaagctctgtctgtatgggggaagttatatgtaaagatggggcataaagaaaaggctgacagtttattacatgcagctttaaaaacttctgatctaaatgtaaaagtgaatatctattctgcattatataaacaagcagaagagaataaacaatataagaaagccattaaatatcttaaaaattacattgcggttattgattccgttcgggatgaactaaagagtacagaaatcagagaattacaactaaaatacgacaagtccatcaccctcaggcaaaatgctgaaatacgaatgagttggtatctcactattgctattggaatcttaatagtaatagcattaatactcctttacttctatagcttgaaaatgtataagaagcagaaaggaaaagagttatctcaacggaagcaggagtctatcaaattacaagaacggatagataccctccaaataatgatagaggaaaacgaaaatctgcacagcctggagcaaagtgaaactttgaataaaattatagccttacagaatgaaaaaagagaaaaagatatacgtataaagcagctggaaattatgttccgagcaaaagacatctccgtttcatcggcagatgccgaagcattacaaacattcctcagaattacagaacaaaaagaatatacttcggctgcaaatagagataatctccaccactggctaaacatcagccatcaaaactttgcaatccgtttaaatggcaaataccctacactcaccggacgtgaaaaagagatttgttacctgacagctttaggcttacctcttgacactgtcgcccaacttctcgatgtacaacctcgaagcattgagcggtacatcagtcggatatgtgagaaatttggctttataaagagaagtaaagagagttttattgattttataatagcacttgctcataataaagagaaacatacattataatacaaattcaattttaaagaagatgacagaaaaagaactggttttattacaaaaagcactaatgcaatctcaaaactacctggaatttggttccggtaacagtactttgatggccacagaaatagaaaccatcagacaaataacagtagtagagtctgatgcctccttctggaaggagaaactattaaatataccttctattaagtatgccgtacatactaagcgtataaaaccgttattaatcaacataggaactacgggtgagtggggataccctatagataacagttgccaaaaacaatggcccctatattcatccttagcatttcaagaaaaagcatcgtacgatttagtattagtagacggacgcttcagagtggcatgtatattacaagcatgcctaaattgttcctccgaaactaaaatcatgatacatgatttttttaaccgtccttattatttcattgtctgcccatttttaaaattagaaaaaagagctgatacattaggcatattcactataaacaaagacaagtgcattgatatattgaatgaatatatagccatctatgagaaccttcctggtttatgatatcatttctgccatgaatttattctccattttgtctcacaactcattccaataaagccagaatcatctatatatcaacaaattaataaatctcattatttattccattatcgtagcgttttcccgtatattgcatctaattttgcacctatagaatcaaaaagataaatattatgagaacagtaattttaatgattttactattatccagtgttcctatctacagcacagtttcgaatgagacaaaagcgattgagttaaagggagattgtgaatcaccacaaagcaaatctttatcatttcctcttaaagtatatatagaaggaaatactgtatttgtgcaattctacatagttatgactgatgctacaattacacttaccagttctgaaggcgaaacagaaagtcggacgatttcttttacagaatctcagacagaagcattttatatctcacaaggcatgtatcacattacgattacaactcctcgtggcacaaatctatatggaacattcttcatagaataaataagaatccttttctgcaatagtaacttaagtatgaaaagagtatacatttacaacgattatcaactatcttcgggcaatggtgtcggaattttcctagaagaatttacacgatgtgccactaaatggggagataatgtacgtatatgcatggttatgtttcgtactaatgtagaagaattttgcattcacacacgagatgagttggattttttctttattccaagaaaattatgtaaaaatccttttaaagaatgtggatctattatttcaatactgaaaaagtacatagttgatgcgaaagatacttttttcctatttaactatgcgcccagtgacaagttgatgtttgagactcacaaatattttcctctatcaaaacagatatgtattattcacgactttaactggacagcacccttattgggaaatgttgatttgttccgagagttaattgcaaaaacaagagtagggattccttctcaacatataggaatcatgaatttgtatcaacaggaagtaaaacagtatcatatagccaaccatgtgatttgtctgtcagaagactcccgtagcatattacaaaattattattttgtaccgaaagaaaaaataacattaataccgcatggtatagataccataaaaaaaggattctctgcaataatgaaacaaaagtggagagaaaactatcatttagatagtaatgagaaagtcattttgatggtaggacgtatttgtaaagctaagggtatgtttgcttatctgaatgctttcaaaaaagtattaaagagagattccaattgtcgattggttatagcaggagaattatgtaatgcccctgatttattggatgctaccgataaagtcacagtaaagattacattaacaggaatgttggataaagataaactatcctattggtatcggatggcagacataggagttataccttcttattcggagcagtgtagttatgtgggattggaaatgatgagttatggacttccggttgtagcatctgacggctttggagttagatgtatgttccgggatgagataaacacactaactgcttctatcggaaatcgaaataatccagaagaatttgagcaaaaccttgcagatagtactctatgtttactgaataatgcgaagcttcggaaaaaattgaaaaagaatgcccgtcaaattttgcaaaagaaatattctttttctgagatggagaaacaatataaagccatttttatggcatgagagttcattaacaatttatttaccctttaattttatctaaacatgaaaaagttgagtaaaattaaactgaatcagcttaataaagctgaactcagtgagagagaattaaatcgccttttgggcggaagtaactgttgcatttgtagaggtcaagcgaatttagacgcaaatgtaaaaggaggaactagtggcttaatacctggcgatggtggcggaggaactggagctggaagcttcaagtagttttttctacatcgcactcaattctaaggaataagtactatttaaaaacgcattatgccattcaagtttcttatttatttgaaacatgaatatggcataatgcagatacaaattttgcataagacaagtcatgaaatatatctacatattactattatgtatgctttggggatgcagttccaataaaaagcaacaaacaataatttcagaacaaaaagaaatcccgatgattaacctctctgagaatatatcggaagtatcttcgttacctttgagtgaagtagccacaaatatagaatttgtccagctagaatcgactgatgaatcttaccttggtgagatacagagacttcatgttacagagcatgatatatggatagaacaaaagagttttttttatatctatcatttttcccgctcgggacaatacataaataaaataggaaaaataggtcaaggaccagaagaatatgctacctgttcagatttcttcattgacgaaaatcgtaaagaagtctatattgtttccggggaaaaaggaattttagtatatgattttgaaggaaactttaaaagaatggcaactaaactaagacagagtgatatattcatgagttccgaaacacaacatatactgttcaacaagaacttctttatatcacaaaacatgaatttttataatccaaccacggcagattctctatggtcttttgctttagtagacagtacctttcataagaagaaaatatttaaaaatcctattcatataggtaaagaagaacaaattattgcgaatcgagctcagatggatagaatggttaattattggactgaacacatgactagcattgctacatataataatcagttaactctcaaatttcctgatacagataccatttatcaatactgttttgacaaagaagaactaattcctcaatatatcatcgccacggaagaagaaaaaggggattacgaagccactcataaatggttcaaagaaagaaatgcatttaactatttcacaattaccgcttattacccaactaaagacttcatttatttacttggcaataaaggggataagatatatacctattgctataataagcaaaataaaaaagtaagggtgcaaaaacggcaaggtaaaatcacagaacgtaaagtgccatggttcaatatcccctataggcgtatggaacgtccgttcattctaaataatgatttttgcggaggcagcttcactgtagaatattactcttatggcaaatattggactgatgttttagagccaaatagtgataataattggattgacataaaagaaattagaacttctacaacaagagacgagaataaacagcaggaatttattagaatgttagaaaatataaacgaaaacagtaatcccatattggttattgcaacattaaaataaaattgaatatgaataactcccctttaattccactaacaggaaatcaacatcaatacatgtattcagacacattacaatgctttttatatgctcctagagcactaaaaatagctatggaaaagaatgcaactactgctatagaagtaaatgactattatatgcgtaaattacattttttacaaaatcactccttctttgataaagcatccgtaaactttcaaacggactacacagaggaagcagttaaacaaaacatggcatgtctacggcaattacttatagaggtcacggacttatgtaacctcaagtgcaaatattgtggttatggagaattttattcaaattatgatcaaagagaaacccgtaatcagacatttgcaaatgtcaagatattaatagactatttggcagatttatggcattctgactataatacttcacataacaactctgttattattggattttatggcggagagcctctattaaatatgaaattgattaaagaaacaatagcctatgtggaaagtttgtctataaataacttaaaatttaaatataacatgacgaccaatgctatgctacttgatcgttatattgattttttagttcaaaaggatttcacccttcttatcagccttgatggaaatgaatatcaatcaggttatcgggtagatagaaatggaaattcatcttttaagcaagtaaccaaaaacatacaaaaagtaaaagattcctatcctacattctttgaaaagaatgtaaacttcaacgctgttttacataatcgtaattctatagagagctgtcttcacagtatttatgatatatttggtaaaaagcccattgtttcagaacttaataccaatggaatcatacctgaaagaattgacgagttcatacaaatgtttaatgataaagctgagagttttaaaatagccatagcgcatgattctaaaattaaagatgtgtttaatatggaagatacagactctatttcatatcatgcggcaattatgaattatagtggaaaccgatattcaacttatgtggacatgtttgacacagaacaaaatgggaaatatatcccaacaggaacttgtagaccatttgaacgaaaattattcctgacagtcaatggaaaagtattaccatgcgaaaagattggccaagagaatgttatggcacgattatcaaatggtaaattgaatttagattgtaacgccatagctaaatactatagttacctatataaaaatataatcaaaaactgtactcattgtaacatgaaaaggaattgcggtcaatgcttgtttttactaaaaaagaaaaatggacaaataatatgtccaagtatccaaactgatgaaagacttaaaaaagagttttcaacctttttgacttatgcagaatcacatcctggagattacgagaaattattatcatctatcgttattgactaatataaatcaaacactatgaactattggttttatttagaaccttacgctttcttatttcataatgagaataaggcagtaatttataatacgcttaattccgcttatttagtatgtccaaatcatcccatcatacaacagatccttgtccagtgggaagatgccgccaacggatatggagttgaattgaatgaagatgcgttgaatgaaagtgtcgtaaaacattttataaatgacattagagaatctttttctggtgattgtttagaaatagattttaaatatgcgaaaccatatatattcaaaccgaccttgtttcttaatacagacattcgtatcaaggaagataagaataagacctcattgggagaacgtattttacaaaatctccatgaggtaaccctgttcttcccctcatcatgcatacaaagttgcgcagcttgttcttcctattatcgacagatgaatcactgtacaacttgtcatgaagatgcattgaaaatagaagattacattcatctattacatcagtttcaagtctgcggcattcagcgagtgaatctattggcagggggaaatccactacagaaccgttatactcgcaatttatcaatagactttactggatcaactttcaaaaaacatctatatttggagtataatttcctgaataatgagtatatagagtttgcacaacaaacgaactccatattagaaatattggttcattcaggagatttaaataaccaattggctgagagtatgcagaaataccagcacgatatggtacgatggaatctgattgtttctgcagaaactgatttggaacaattagacagattgattttgcctgagaacattcttattcaaattcgacctttttataatggaagtaactataacttctttcatgatttcgttttctttgatttgcaagatatacttgttgaacctatcgacagaaagacgatattcagacataaagttttgaacgacaatttttttgggaagttaacaattttcccttcgggagaagtttttgcaaatgtgaattgttctactattggaaatatacaaaaatcatctttaaaagaacttgtctataaagagctaacggaactagaaacctggctaaaggtacgaagcaaagaaacaccttgtaaacaatgtattaataaagacttatgtccttccatatccaattatgagttagtgataggtaaaaataacctttgcaatatacaacacagataagtgaaagcatttcctcattactcccaactggacgctatggactgcggtcccacctgcctacgaatgatttcccgttattacggaaaaatttattcgttgcaaaccttgcgcgaccgttctttcattacccgtgaaggagtgtccatgctgggtattagcgatgccgccgaatctataggcttccgcacatcaggcgtacgtatttcttttcaacagctaattgaggatgtgccacttccatgtattctgcattggcaacaaagacatttcgtcgtatgctataagatacgaaaaaagagaaataaatactttttccatattgctgatccggcaaccggtttagttacctaccacgaagaagaattaaaaaaatgctggttatctacaaaaatcgatggagaaaaaaaaggagctgcattggctctggaaccttcaccggaattctatagtcgagaagatgaacaggaaagtaaacagagaaaactttcattctttctacaataccttacaccctataaaaaacaactgttgcaattgatgcttggcatgctaaccgtcagtttattgcaattgatattcccgtttctcacacaatcgttggtggatgtaggaattcgagacggaaatcttaatttcattaccttaattcttatagcgcaactgataatatcaatatcacagctatctgtagactttatccgcagttggatattgttgcacatgaacactcgtataaacatctctctcatatctgacttcttatccaagttgatgaagctgcctttacgctatttcgataccaaaatgataggtgacatcatgcaacgtattggcgaccataaccgtatagaaacatttctgaccggatcatccataaataccttgttctcatttgtcaatttcttcatcttcggctttattttggcttattacaacctaattattctgagtattttcctccttggcaattcactctatgtagcttggatactctgtttcatgaaatatcgccgagaattagatatacgacgtttctcacaagcatccagcgaacaaagcagcctaatacagctggtaacagccatgcaggaaataaaactgagcaactgtgaaaaacagaaacggtggcaatgggaacgtattcaagtgaaattattcaaaatcagtgtcaagggactggctttggggcaagtacaacaagtaggttctgtctttttcaaccaaacaaccaatatcatcatttcattcatagctgccaaatcagtagtggaaggacaaatgacattgggtatgatgatgtctctcacctatatcattggtcagcttaacagccctataagtgctttcatcggatttgccagacaactgcaagacgccaaaatcagtttggaaagattaaatgaaatacatgaaagaaaagatgaagaacaggatattacatccaaacaacaaatacttccgatccagaaaaacatcacgatcaaccatgtatctttcagctatagcggttccgaccgcgactacgtactggatgatatctgcctcaacatacccgaaaagaaagttactgccattgttggtgccagtggaagcggaaaaacgacattggtaaagttgttgttaggattctattccccgcaaaaaggtgaaatacgattggatgatactcctttggaaactattaatccgcatttatggcgaatgaaaagtggggcagtaatgcaagacggcttcatattctcagatacaatagccaataacattaccgtcagtgaagaacaaattgaccttgaaagattaaagcatgcggtaaccgtggccaatatccgcgactttatagactctctgcctctgggttacaacaccaaaataggaatggaaggcaacggagtcagccaagggcaaaaacagcgcctactcattgctcgtgccgtatataaaaatccggaatttctgttctttgatgaagcaaccaatgccctggatgccaacaatgaaaaagagataatgggacatttgaacaagttctaccaaggaaagacagttgtcgtagttgcccatcgtctcagcaccgtttgcaatgccgacaagatagtagtattggataaaggaaaaatagctgaggaaggaactcatcataagcttactgcccaaaaagggatgtattaccaattagttaaaaaccaattggaacttggcagctgaaacaatactgatgtatggaagaaaacgaaacacacaaagatattgaactgaagagcgaggaagtgcaagaagtgatgaatcatattccatcctcaatcctgcgctatggcatttctgtcctactgggcatcctgctcgtacttctggttggcagttctttttttagctatccagatacagtagatgctgaatttacgctcaccacacaggctccacctgcatatattatcgcaaatacggcaggaaggatagcacaattgtatgtaaagaataagcaggttatctatgaaaaggacattatcggcgtaatacaaaataccgcaacaacagaagacatattctatttacgggaaaatctgaaagaatggaaagcacaaggttcgcaaattgagcagacggacattctgtttttccatagaatccctgagttgggagatacacaaaccacttattcctcctgcctgcttgcttggaataattatctgcaacacatgcaggaaagcagaattcatgaaacggaacttttgaacaccatagcctccctacaagtagcattaacagaatgggaaaaaaactacctgttggtaagtccagttaacggtacagtagcctttatgcaaccatgggaaatgaatcagacagttgaaagcggtgaaactatgttcgtcatcattccccaaaatgcaacaaaaccaataggaaaagccctactcccaatggatggaatcggcaaggtaaaaacaggacaacgagcaattatccgctttcctgctttccctgaacaagaatttggctttatagacggaaccgtagtttcgatatctccagtaccaaatcaagccggattttatgtattggaaatatctttgccacgcaatcttaaaacaaattacggaaaagaactgccattgataaaaaccgttaaaggtacagcttctatagtaacaaaagagaaaaaattgcttgaaaaattattgaatctaaaactgtgatatatgaaaagagaattagttgatgacatttataagcgattgcttaatgaagactggaaaggtttaccgccttacttaaaaggcgggcaaatgggaatgtgcatgttcatggctctctattccgaatatagaaattgcggaaaagccagaagtttatccgcaagaatactgcccgaagtgattaagtttatacaatatatgccaaatcgcttattggatggaaaaaccggaatagcatgggggatgaaatatttatcaaataatgccattttagaagaagatgacactatccgaaacatacacagtaccattcagaatgaatgtttaaattactgttttgcaacgccaatctacttaccggaaaaagaatatctattctccattggcatttactgggcacagttattcaagcaagaagattcgctcgaaagatatatcatagaagaaagattacttgcattggtggacgaatgtgatagacaactacattgtacaataaagggaatatattctcccaaggacatgcctttgtcagtactgcattccattctctactttctaaaaaaaataaacaaagagcatatcgattcataccagacacaaaaactgatagaatcagctgaaaatgtatatagcaaaattaaaagcaaagaactattggatgactacatctaccatgtatttataaaaaggacaaataacttgccaaaaaatcatacagcaaacttctatttggagtttttaggtaatttagggttttacagcttattatatagctatccggatattttcagtgcagccctgaaacggttaaacgagcaaagaccttctttttactcagaagctacacaaataataagaaaagaaaatatcactgtagagactttatgcggattgggatttggcttattaacccacacaaaacaggataattatgaagaacaataaaataaatttaaaggatctgacgttctgcattccagtacgtatagactccccatacagagaacgaaatctggtggctgcattaaaattctatgctcgacatatccattgtaactatattattgtggaagccgccaaagaacagcatctaaagaaattgccttcaattgaaggacttacttatcacttcatatatgatgacaacccaacatttcatagaacatactatataaaccaaatgctggcacgcactacaacaaagatagccgctatttgggatgcagatgccatcgtcgctatttctcagctaaataaagcctatcggagaattattgaggaacaagcaacaatggtatacccttatgacggttgcttttggagaataaatgatttcttctcttcatttttctgcaagaacttaaaaattagtcttttaaaagacttccccataatgaaaaccttaatgtgcggctaccattcggtaggaggaggatttctggtaaacgtcaaactgtataaagaatgcggctgggagaatgaatactttataggatggggaccggaagatgcagagcgttataagagattactgattctaaataagagaccaactagaatatcaggacccttataccatttacatcatccacgaggtgacaatagtagagatggcaacaagcaagtggcatatataaccaaaaaagaatattgtcatgtatgcagtatgcagcctgatgaattgaagaaatacattgaaacatgggactggataaaataaagatatgaaacatgcaattttgttactttggcacaaagatatagaacaactgaagaatcttatcaaactattcgatgaggatttcaaattctatatccatatcgataaaaaaagtattataactaaagaggaaataggacgacttaaaaacaatcaacaaatagctgaagtttatcaaaaatatagaataaattggggcggcttcaatatactgaaagccgaacttttgttgctgcaagaaattgtaagggataattcaattggttacattcactttatgagtggacaagattatcccataaagaaattagatggcatcaaatcttttttttcaaaaaacaatggaaaggaattcattgaatacataaagctaccggtaaaaaaatgggaacatggcacttatgacaggtttgtatactatcgactaaatgattggtttgattacaacacacataaaggatatagaatcattgagaaattcattgctatacaaaaacgaataggttataaaagacgtatacctgatcaattcgaacatttatatggaggatccaactggatgtccataacctatgaatgcgcaaagcatataaccgaaaacaaacggaaatatcgacgtttctataatcggctaaaatatacattcgctgcggacgaggtatactttcacaccgtaatattaaactcaattttcgcaaataaggtagaaaaaaacaatcaacgttgcattctatgggacggaaaaggttctccaatcattcttaacgaaactcattggtgggaaatcattaccagcaataggctttttgcccgcaaattagataataaagtttccgccaagctcatagagtatatcaaccgttacctatttgcagataatgaagttataactaattcacaaggctgttggttaaacgagaacttgaacggacattgttatgataataaactggcaactggattattacgattattttccctgatggaagtttacagtatagcggacttcggctgtggaccaggttggtatgtagccttgctacgaaaacagggatatgaagtagaagggtatgacggtaatccgaatgtagagaaaatgtcatcactcttattttccgatggcttccactgtcaatacatggatttcacggaagaatcggaagccgaagaaccttttgatgtagttatgagtctggaagtaggtgagcatatacctgttcagtgggaagacacctttattaaaaacctgaccagaaacgcccggaaatatatcattttaagttgggcagcagaaggacaatatggagacgggcatattaataaccgccctaatagctatatcatagaactactgtgccgacaaggatttatattgaaccgtccagccagtgtatatttaagagaacaagcatctctatggtggtttaaaaatacaataatggttttcgacagaatatgaaagatataatagtcatcgttgcacatgaaatgcacaagtcaatcagtgagaagtattttcgtatcaaagaagggtttagaaagtacggagatgttgtgttattactaaaccatgaagatgaaagtgaaattcattttccagaaggtttggactattgcatatttactacagatatgctcaatgaattggaatatgaaccgatagaagaaaccattactccgggaagtaatcattttgcattgctctatttttatctaaaacatcccgaatatcgatattactggaatatagaatacgatgttgagttttcgggcgaatggggtattctatttgatagtttttcagatgtcaacactgattttataagcactcacattatgggatatgcagaagataaggaatggttctggtggaatagttatcaaggaaaaacaatgaacattccgcttagagaaagacttcgttccttcaatcccatatatagaatttcagaaaaagccctcaatttcttggatgaattcttaaaagctcaaaattgcggacaccatgaagtattgatcccctcctccctcttccactccggttttgcaattgcagactttggaggaaccgggagatttgtgctgccgggatatgaaaacagattttatttatcaacagatttgttctgtgaaaaatatccaggaggaactatgcgatgtttccctcagttccatgatataaaatcctatcatctatcgaataagctgtttcatccgctaaaatactcagactaaaaagatatagtacatggaaaattatatcaaagattactcttcagcactatataacctggcatgcctaaaaagcatgccaggcaaatatattgtgagaccggaagaaaactggattgacatcatagaaatattattctggctttccgggcgcagaggcgaatgtttagaaaggacactcattctgctgcctttgcgcgaaagaataatttgtatcctcacctatttaggatacagcagtgcggaagttgcaaaaaccatttgtataagcaccgcaggcgtggttaaagccaaacaacggattaaaagaaaaatcggactgcccacagatgtcagtctgaacgagtttattgcctccgtataaaatctccttcgcactcattacaacatataggaaaagttgcgactttccatacttcttccaaacctcctcccacaaatgttagtcaaacatttgactaattccaataaaaagctctacctttgcgcccgaaaaataaaaagcaacgtagcaatggagaattacaattcatcccgcgggcttatccagcaaatgctaagaacccgcatggcattccgccaagctctgcaacgcgtattgaaacgcaataacatagatatcacctttgaaatgttacaagtactgagttccctgtggcaggaacaaggaatcagccagcaggcattagccgaaaagacagccaaagacaaagcctgcatgactaatctgatggcaaacctcgaaaagaaaggctggatcatgcgccaggaagaccctaacgaccgccgtaaccgacttgtgtacctcactcccgcaggagaagagatatccgaccgtgtacgcccgctcatcaaggatttttatacccagacgggccaactgatgggaatagagaacctaaacgcatgttccaatcaactagagacactctatgagatattcaaccagttctaattttcttcgcctcttactcattcacatacttgctgtagctccgttgtggataactgctcaggagaatactcatctattatccgtagacgaacttttccgtctgggcacagaaaacagtcttcaacttaaaaagagcaaactacaagagcttatttataacgaccaaaagaagtctgcatacacagaccgattgcctgatatccaagtaggtgccagcgccggaatcataggccaacctgtcatctttcagcgaggactttcacatcccgtgcgccccgaaacgccggactggtcacaaaactataacatcaacctgacgcaacccctctaccagggaggaaggatacaggccaaaatacatcaagccgaacttaaagagcaaatagccgccctgaccagtgccgacaacgaagccgaaatcaagctggtactgctgcaacagtacatgacgcttttcagttactacaagcagcgggaagtgctggcacgcaacatcgaagagtccgaacaccgactgaaagatatccgtcggatgaaaaaagaaggcatagtcacccgcaatgatgaaattcgcagtgaactgcaactgaccaacgaccgtctggcctatcaggaagccgacaacagcatctccatagcttcgcagcaactcgatattctgctgggactggacgaatcacagctgatagcaccggacaccactttactgtataccgccgtcagtgtgtctgattatgatacgtatgtacaattagcctacaacaactatccgggcatgcagattgtccgccaacaaaccctgctggcagaaaacgatatccggctgactaaagcaaactaccttcccagcctgtcactgcatgcgggcaacacccttgcacgcccactcagcactacgctggctgacatgtacaacaacaactggaacatcggcctcagcctctcatacaacctgtcgtctctttatcagaataagcacaagatgcacgaagcccggcagacggtacaacttcaaaagtatgccgaagaactcctgatgcagaacgtccgtattcagatccgaactgcctacacccgccataaagaggccctgaaccgcatagaagccctgaagctctctgtcagccaggcagaagaaaactaccggattgtgcaaaaccgctacttgaaccagctttccattctcaccgacctgctggatgcaagcagcgtgcggctggatgctgaactgcaactgaccgttgcccgtacgcaggccatttacacttactatgaattacagcgaacctgtggcatgctttaatttttaattattaatttttaatttacaattgtaatctatgtccgaattacaaaagaaacataagcaactgaagagattaagaataaggaatatcaccctcaatacggtatgtatcctccttgcattggcgggaatttcatggacaatcaattatttctggaaatacgtccattacgaaatcaccaatgatgccgtagtagaccagtatatagctccgctcaatatccgcgcttcgggttatatcaaggaagtccgcttcacggagcaccagcctgtgcatgccggagacacccttctcattcttgacaaccgggaatacctcatcaaagtaaaggatgcggaagctgccctgatggatgcgaaaggtgcaaaagacgtattaagttccggcattcagacctcgcaagtaaatgtagccattcaggaagccaacattgcagaaaccaaggccaagctctggcaacaggaacaggactatcgccgctatgccaacctgcttgccgaagaatccgtcagccagcaacaatatgaacaggtaaaaaccgcctacgaagcaacccaagcacgctatcaggccctgctgcaacaaaaggaagcggcaaaatcccaatactccgaaacgagcaagaaatccaccggcatcgaagcgaatatccttcgcaaagaagcggatctggatatggcaaaattgaatctctcttatacgatagtcaccgctccttacgacggatatatggggcgccgcaccctcgaaccgggacaattcgtacaagccgggcaaaccatctcctatcttgtacggggcaacgacaaatggatcaccgccaactacaaagaaacgcagatttcccacatttacatcgggcagaaagtacgcatcaaggtcgatgctttccgcgggcatatctttcacggcactgttaccgccatatccgaagcaaccggttccaagtacgccctggttccaactgataactccgccggcaacttcgtcaaagtgcagcaacgcattcccgttcgcatcgagctggacgacgccactcccgaagagatgaaaagcctccgtgcaggcatgatggtagaaaccgaagcactaagaaaataaggaagtccactgatggtaaaactgaacctcccactccgcccctgggtaccgcaatggctgggtatcgtcactatgttcgtggtgatgttccctatcattatgctcaacggaacctatacgggaagcatgctggaagtcagcagtaccctcggaatactcagcgaagacatcacaatggggtattatgcggcagcggcaggtatggcagtagcttatcccatcattcctaaaattcgtgcgatcgccactccaaaaacgatgctgcttaccgacctgatcctgcaaatctttctcagttacatctgcgcccaggttggcaatatggacatcaccattatatgcagcttcttcatcggcttcctgaaagctttcattatgttggagtttattattcaggtacgcccgttcttcagtccgaagaatgtacgtagcgagttctacgcctacttctaccccatcgtattctccggcggacaaatatccatggcgctgacggcacaattggcctattactatcagtggcagtacatgtattactttacaatcttgttgatgctgattgccattatctttatcctgttgtttttccggtatgccaagcgccccatgcgcatcccttacaaagaaatcgacggaagaagcatgtttatcatagctgctgcattgcttttcagcatttacatatttacctacggaaagacattagattggttctcctctcccaaaatacggatttatgcgattgccatccccatactgatttaccttttcgtccaccggcaacggacacaggagaagccatatgtcagcctgaaaccactccatcaccataaatccatcatcggatacactttcatggtactggtcatgtttttcagtgccagcagttccctgattaccaattatctgaacagcattatccgcgtagacagcgtacatgccaattcgctcagcctgatgcttataccgggattcattatgggagccatcatctgtttctggtggttcagatggcagcgatggcgtttccgctatctcatctccggaggaatgttctgctacgtcatctatctggtcatcctctacttcggcatcacgccctactccacttacgagatgctttactttccggttttcctccgcggactggggatgatgactcttttcatagccttcggtgtatatgtagtagaagatttggaccctaagctcatgctgtctaacgctttctttctgatatccctccgctctgtgctggctccggcaatatccgcttcgtttttcagtaatctgctctatcacttacaaattaaggggatgaataccctttcggagcacatgacgctcactaatccactggcttcctcccgctatgcgcaagccatgaacagtgccttggcgcagggacacggatacgatgaagccagccagttagccgccaataacttttattccacgcttcagcaacagagcctgctactgggcatcaagactgtaatcagctatctgctgattgccgcattggttatcgcagtggtttccgctttcatccctttccataagactctgaaagtggctgtggtgaagacgggagacgatatggtataaagattataaatgccaactaattccgcatgccatctccagatagtgcacacgtacacgtttcgagtagctatcctcaatctcgccagtcaacaggttcctcttttcaaaagtctgtgtagcccgttcagggaggaagagatatttggcctccaccgaaaaatggagtttgcgccagatacgcctcgacaacatagccgaagtctgaatagcactcataaagccgccgggttctgtagagaatgactgatcataattaatccaacgtactacattggaattcttttctttcacataaaaatgagaagaatgttcctctgcatcaaccaggtaatatcccaagcgcaactgtacatcccataccggtttattcagccgataggcaatgccaaaggccatagacaaacccatttcatcatcaaaatcatacgcatcctttacaaaatggtcatttttataaggtcttctcaacttatccccatttccttctctgatgaggggggccacactcatagaagaaaagattccccagtgtggaaatacatagaaagtataagcaaagctcatgacgggaacaggagaagaagaaatccaggattctccactctgaaaatgacaagatactccggtggttaagtcaagctgatgacgtgaatttctattttgtgcctgtccgcccataatgctcagcagtcccactgccagcaaagtgataaatagctttctcattgactcttcatttattgcatggtgatctcatccgtttctttggtaaactcttcccctttgcgggtcgtcactacgactttaaaccgatgcactccggcttgaggaagtgtacggggtatcttataaaaaacagtcccatacatataaccgtatttataatctgtcaactggtcctcctgacgcaaaggatagtccatgaaaagttcgttcacatccgtaccggcaggatgggattcatcataagcggtaagtgagataatctgtatattggcgatggtatcagtcaggatgtattcataatatgttccctctacagtctctttctcatattcaaagtccaaaggtatccgcaacatatatgcctggcgagataccactccacccaccggagcaacaggcacgcttccggcattatccaagtgttccaccttacctattccggttaaggtcacctgacagggaatgtattcttcaaattcctcgcagcacattgccgtacaaagcaaaaaaagtagtgccagtaaaacggataacttgtttttcatattttagttttttagtgtgtaagcagtctcaccttttaagaaatgcaagaaattgtaaaatactgcataaagacactaatagttttgtgatatataaaaaatactgattcaacaattgaatcagtatttcaatgaccacaaatcttattatcaatatagagttccagtcagaataaaactaaaacaggtcggtataaccattacatacgctgtctttcttcctcagaagccgacttccctttatacttgctctttgatgcattaaatttatatcgcacggagaactgccatgaacgagtatccaagttcttatctatcaaggaaactattggattaacctccatcaacctcttctgtttgtacgtacccagtatatcatatccccttaagttcagaataagattacctttcatgaaagttttcgtcacccgtacatccatccggaactggtcatacaagtaagtcaggttcgagtgcccctttgatgtgccctgaaaatccagcatcaccacaaacccggcaggcaggcggaacgtgttctgcaaactataacgtaaaaagggcttttcatacttctgtcctgtatctccatatttgaagtagtctttcgatacgcctaagcctgcaaccggttcccaaaagcctaaacggggagaatagtaaaccatagccatcagattttgtgtatgatccatattctccggaatatacataacgatatcttgtttttcaccataaggatgtggtatcaatagtgacatattatcatacatcttatacgaaaccatcaacttaattttcttccacagcaacgaatatgagatatcatctattcgggtaggtttcagatacggattaccggtttcataagtgtaagggtcatcatattgaatgctgttccgaagttgataataacttggccgctgaatcgtagcacgatatcccaacatcatctgtaccttatcagaccggtaactcaccgaagcctgtggaaagaaatctttatatgtacggctttgttcatccactttattaccattctcaaaataatcgaaaccgacattttcaaaacgcagtcctaaattaaacatccacttgtctatactttttgaataactgagaaaagccgcaaacaacttctgtttcgacatattctcattagacgcaagcgaaggagctccctcattttcatctacccaataagtctgctcattggtcgtatggctatattccataccataattaaaattacttcccaatagaggtgtagataaagtgagtttacctgcatataaatcatagtcctgtaaagagcgcgtacccacttccacttcatcttctttttcggaaacagaggaatcatgactttcactgcttcccttagcatagtccatatccaactgtactttaagccaagaggctacattaccagtataataagcattcaaaaggtgagatttatcattcatatccattctggtgttcgtagggaactcctctattgacacacgatccttcgttacagccgatactatatccactccacctttataataaggagtacgcgtataaacatacttggcacctatagaatgtcgttcgtctaattcatagttgagtcctccctccagataatgaaacttattatggaccttttgcatagcaatctgttgtacagccgttatgttttcttccgcttccaaagtctgcatcgaattaatatcaatttcacgttgtttctcactatacccgtaataagcaaacaggtccaatttattcttacggtaattcagatccaccgctccatcggcagaaattttgctcctgacatccattcttccgaaaatctcaccgcctatcccctctccgggtgaacgtatggcttcaatcagaaccactgcactaacagaagcatcatactccggtccgggattagtaatcacagtaactttctttatatgtgtagaactcaacctctccaattcattatcatttcttaccagacgattattgatataaatcagtggagtacctttacccaatacactgatagcatctccatttttcacgataaaaggttgcttttccagaacatcgttggccgtacccacattcttcagcgggctgtttgccacatccatagcaatgccaccattctccatcttaaaatgctgacgagtccccctaacaactacttcacccaacaagttggtatcttcttcaagttttattgtattcagaacattctgctttaccgccacagatgtagtcacatatcccagatagctgaccttaacaaccggattttcttttgtagtttcgagcataaagtttccttccatgtctgtaaccgttccggcaaatgtcatagagtccttatcctgtacgataacgatatttgcaaatgctaaaggttcagaattacttttatcaacaactttacccttaatctgagcataagaagaaaagattgtagaaatagaaaatagaaaatatagtatcgctatttttttcataatatccagttattagttaacaattaatatattaattcaaagcggcttcgagcaattacactgattcaacgtatcaccactgatcataaaaaagaatcataataactttccaaatatttatccaacataccaggagccttctgtgtacaagtacataaatcatatttaccattttcatatttattccgtaaagtataccatgcacatgcaccactacatatcggtaggaaaaaacattttttgcaaacaggatcattataccatttagtgtccacaatatatctattcaacaatgtcttattggtcattttattagtgaatatatttcctacaatttttttgggatcactcacatcattccaacatttataaacttctccttcaggacctacaatatatgcacattgacgattagcagcacaactttttgaacaaaagctttggggatataacggaatttccaacaagtttctttgtcttgcatcccatagtaactcctctatttctttatggtttaaagtttcagaagcatattctgttttctgttcattatcaattcgcagaaatccaggatatactctcacatttttttgtttccatttttcttgtagctcttctgcaacctggtaataatcattcttattatttctttctatatttacgcgaatatccaccaaagtattaggaaactcttcaataaaacgactcgtattttctataatcttatcataagtatataaatcagtctttgtctttcgaatagagttatgccgctctctgctaccatccaatgttacttgcatcttagtcaacggatatcgcttaaatagagctaacactctattattaataaaatacccattagtaataagagaatgcttagtcatttcgagagttgttttttgagagatcttatccaataaacgttctattgtattaatagccatcaatggctctcctccataccaattaagagctaattgacgggattcatgatgtgaatttataaatgcaatcacagcatcttcagtctcttcattcattgttaccatccgtttatgttcttcaaagcaataataacaagaaaaattacatccaagtgttggcacaagagtcaaacccagtacatattttgaataactgcgacgatctgtttcatattgatgctccaataaaaaatcatcatcttccatagcctccactataatttttctttttaagagagaggataaaacatctatatcaattttcctgatattgcgtttatcatctttacatttcaatagctctttatacaaatcgtcactgacttcaagaaaagtattagtccgcgaattgtataccaaattcttctttttcgaagacacaaataaataagtatatcttgatatgcttaaattttcagccatagaatcacaagttgatttattattaataacatagaatgcttagttagtaatagctaagcattctaaatctgttttctatagaaaactacagtactttgtcgtcggatgtactaggtttaagcgtctcctgcttatctttgtcactgttagtatttctattccaacaatcacaaacacattctgttccaccaccttcaacgttttccagttgatcatttcctaaagtttcatcttgatccttgattactttgatctgttctttactttttttgtcattctcttccataagtaattatttcttaagttagtaattggggtaattatctcacattgtaaaactaaccgatatcagtccattctaacaggactggataaaatattaagaaaataaatatattttcgcattaatcctattatcagactccttgtgaggcatctgcatcccctgcttggaggctctagtgaagaattaccttggtcatactgaagttaaagaacagatcaaatccgcacgatttcctatatataaggtaagccctataaatcagaataaaggttttaagagataattggagttgtttctcaaagatttagtatttttggcagctataataagctgttaagctatcaaagcctacatgttttaatatcgtagaaaatggtagctgcgctacatacagtaattgttgaggcaaaattaaattgcgaaatgcgtcattaccacgaaagtaaagcagtaaaatgattagtttgaataacttgctatgactacagaagataaaataaagtattttgagaatcgagaagattggagaaagtggttaatggacaactttgaaacctccagtgaaatatggtttgtatttccctataagtcgtccggtaaaaaaagcattttatacaatgatgccgttgaagaagccctttgcttcgattggattgacagtacaaccaaaccacttgacaaagatcataaaattcagcgtttcacacccagaaaccctaaaagcacttactcgcaagccaacaaagaaaggcttaaatggctattggaaaataaaatgatacacccgaaatttgaggagaaaacgcgaagtattttatctgaacctttcatttttcccaatgatataattgataaattgaaagaaaatgaaacggtatggaaaaactatcaatcattttccgaagcatataagcgaatccgaatagcgtacatcgaagctgcgagaaaacgtcctgaagaatttgagaagcggttaaacaacttcatcagcaaaacaaaagaaaacaaaataatagtaggatttggcggaattgaaaaatactattaatcaaaagattagcatcataaatagaaaaacgttttaaaatgaggactgaaatacttgacttcacctttctgatgtagtatatttgtagaagtttaagaacagaactctaatataaacctaaaactttagcaaatggaaaaatccaaagaacaccgtaatattcttacagccaagcatcataaagcgaataaatctgacaatattttcaacaaaacagatatcaaatatataattactgatagcttactcccaagctattcaggctgattatagctaattcgagtgaatttcaccctaaatagtaacgagtataaaagaagtaaaggcagtatttcctcacaaggactactgccttttttgttgaaatatatccaaatcaggtgtaattaccattttttatgctgttaataaacgcggagaatattcttaaaaaacgtagctattattctttaaaaacgctgattacggttattaatagggtacttgttattgacttgaattattacttatttatttatgcccaaaattctctatccttctcttcaccagagatgaaattgagtacattgattatcttgtcataactctccaacaaaagatactcagagcaaataccctcaagatttctatcaagctatcatcaaaccgatatattgacatcaatcaaaccaatagataagaagtatccacctttcaatactccactgtactaacaatacttaaaaacaataatatgacttaaaagtggacttcaaattgcctaaatagaatcctcaaatacctgtttatatccctttagatcaataatgattatatcatttatactacttaagatttcaaattacaaacaaaacataaaacagcaatatcatgttatgccacaacaatctgtttcataaaatcttccatatccgttcatattctaactttcccaaatagtcttcttttatatatattttcatcttatttcttaagacctcatccttcaaaagttgctttaaaatattatcttcacaataacataaccatgtcggttctataatttgtttattttcaaaatgcaatggatctataaaaaatttaaaacattcatttttcacactcaatttatctaatattggatgtaattcttgatgttcagtatcctttctaatacgagctaatacagcacacacggtctcttcaactcgtacatatttagaaacgcctttaaatggattttttattaactctgataatgttttgacatccaaaacaggtattccgtaatttaaatgtatagaagctgcgtaatatagtccttttatgttttctctaaaccacaacacagcctcttctttaagattggcagataatgctggatataacgacgccaaataaaaataatcattatttactttaatatcatttaacgtttttatattatctattatttgattttgtgagctcaaatagtcacataaaagaaataaggcaccattcaaactatcatcatcatgaatacttataatattattaactagagcaatagcatcttttatttcaggtttgcatttatgtattaattccgtcagctcctttccaaactctatcaagtaaatattactccaaatataatttatgatcggatataaatcggagcaattaatattcttacaatttgttttattaataatacaaataacattctgcataatattacaaaaagaattcctatcaataatcaaatagttcatgcaattagaatttccaatactttcttttgcattcttaataattagatttataaaagaacaaccttcatcacttaatattatgctttttatattataatgtttatatattttcagcaaatttttatttttaatatgaaaaacaagaataacaagatgttcttttcctaattcatctattttagtttggctaaaaagattactaccatttgattttgttacattactgataagtatgcctgatactacattataatatatatcttcagaataattattattgtcacaaataatataattatcattactaaaatcaaactcttgatatgatttgtgttctaaaagaaatacttttctatttgaagagaagccacctttctcagcagaaattctttgcccagacaagtcttcttttaagatatcactttcaactaaatttacactatgaaagcgatatgatagtaaatcttcaagaacatgtttaatagatttatctattggaagttttattaaaagatctcgtaaatcaatcttttcaatatcctttataattttctcataatcaatatcatttctagacatcaactgaatttgaattccgtatcttattgcatgaatgttatacatacaaataaagtataaaatatatcttttctttttccaggtttcatttgctaaatctttataaatcagataagattgataataatcgcctaatttatatagtaaataaggaaattctaaatcttcaatattatacttctttacttgatgtcttaccctttttaggtagttagataaatttatatagtcaagttcgtaaaaaaactcgacacctcttgttacaggaaacagctttttcaattttctataaaatgttttatttacaatactgagattgtctattttaaatattctattcaaataagcttgtttcctcaattccaatattttatcattatatttattgacaaactctcttcttcctgtatatgtttgcaattgctttgtcaacttctttacatatggggaacaaatttgaagtcctgttgaatgataattccaaaaagatatttcattttctgggaaaatatattttagtccattccctaaaactttaatttcatcaacatatgatttaatccgttcatacaaataatcgattaagtcactttcttgcctataatgttttattaaaaccagttgtctatacaatttctttccatatattgaagctattccaccgtcatctacatttattgattgttgttttattgtttcatctacaaattcagaagttaattcaataatattaattccttttttttcataatatttttttttgtattgaatctatatttttattagtc

SEQ ID NO: 6326 - DNA, 20672 bp, Unknown
  gut microbiota DNA sequence
aatctgtgtaatctgtggtgagtcttattcattccttttcagaaatgcatgcgcctattcatacatataaatagtatatagactctcaaaagataaatatagagaatgaaaaatataatgtattgataattagtgttatatgtacttctaatatagaacttttatatcccgatatagagtgtttgagacatgtttcacccctaactttgcatcaggtaaaaacgaaaagtgaaacatttaaatcaatcaaacgatgaaagcaaattcaatgaagactatcgggaaaagactaacattcttaatccttatcatgtgtgtggcagtttctatttctgctcaaagttatcaactctccggttgcgtacaggacgaaaacaatcagccggtggaggtagcaaacattctgttgaaacaggctaaagacagtacttatcttacgggtatgctgacggatgcacaagggtgttttacctttactcaacctaaaggggaatatctgttacatattactctgataggttgtgaagatatctatttgcccgtctccttacagggaaataagaatgtaggtatgctcaccctgaaatcctcttctacctttttgaatgaagtaaccgttacggcagctcgtccggtaatcaagcgtctggtagacagagttgtttttgatacacataatgccatcgctactgccggaggaaatgcactcgaccttttgcgtgaagtgcccggtctgcgcgttggtcagaacagtattgatattataggtaaaggaggcgtgaagatatatatcaatgatcgtgaaacgaaactttccggtgacgagttgattgactatctccgttcttatgacgcttctcagatacagaaagtggaagtaattactactccgccatccaaatatgatgcggctggtaatgcaggtattatcaatatacgtctgaagtcacgtcctaaagattatctgggaggtacggtatctgcttcttataatgcaggtgaaaaggagaattacggttatggtggtgtaaacctgaacatcagcaaaggtcgtgtatcttctttcatcaatgcaggtactacgcaaggcaactatgagaaccgtgaggcgaatcgtcgctattttgctcagaatacttgggatgggcgtacggattataagaaatatatgcagagttattatggtcaggcaggtgtggactttgcgctggaacgcaactggacgttaggtttgcaagctgtttacaaccacaataacccaaaagattccaaagcagtttctattacggaagtttatgacgtggctactgcccgtctggactctcttttattctctgacagtgaggaaggaactaaagccgaccgcgttaacttgaatttccatactgacaaatcctggggtgataagggtaaaaagatgacctgggatgtggattacctgtatgataaaagagatagtcacatggggttcctgtctgacactcagactcctgacggtgtaactatacccggaaccaattttgattacagttatttgcaaaaccgcaaagtagatgtattctcttctgcacttgactttacacttcccttcgagaagtataaggtgaccgcaggtgccaaggtttctttcacaaatacccgtaaccgtatcaattatgatacttcggacccgacactggtgcaggacgattatttccactataaagaacaaatctatgctctttacgctgactataaccgcgcgtttggcaagcagttctctatgcagctgggcttgcgtatggaacacacccgtactaccggtatttctgagtcggagaatacgacggacaagcacgattatacccgtctgttccctacactctatttcctatattcacccaatgagcagaatgcgttgaaccttagtttgtccaatcgcatttcccgcccttcacagaatatggtgaaccctttcccgttctatcagaacaagtatacttatgctcgtggaaaggaagacctgaagccgagttatacgtataatgccgaattgggatatacattcaagaataatctcaatatctctgccttttattcttattcggacgatgtattctttcaggttgtaggtttagatccggaaacgaatatcagttctttcctgtgggataactttatggagacacactctttcgggttgaataactcctatacattccgtacaaaatggatgcaggcttatgttcagcatggtgtaaactatagccgcacaacttccagtgccgcttccacatcagccgaagagaaaggatgggcttataatgccagtttgcgcaatacattcttccttaatccgaagaagacatttatcggaacgctttcaggttggtttacttcacgtcagtatagtggagtatatctgataaaacctacttatggtgtcagtgcgggtttgctctatcgcatgctggataataagctcagtcttagcctgaacgtcaataatattctaatcagccattcgaagcttgaaactgtttccaatggagtccggatgacgacggacaatcagtttgcctttaccggtttccgcatcggtgtttcctacacgtttggtggagatatccgcagcaagggacaacgtaatagtaactcagatattcagaacagattataaaaattgctttcatcgtttttacctagctgaaagcactcccgtggtgggagacgaacggcttgtcagagtgaaacagtggtttcaccggacaggccgttcactttgtttccataaagtatatgaatcattcctccttttctaccagtttttaccccttactttcttcatgattgctcacttttgcataccaacaaacaaatctataagaggaagtatatgaaaaacaaaatgaaaaaccgagtaatagagatgaaggacttatgccttttatggctcttcttgttcttattaggtggaataccggcaggagcgactactatatccgatgatgaattagcatccggtacggaagaattaatcgcttttcccggcgctgaaggttttggccggaatactaccggtggtcgcggtggtaaagtttatcacgtcactacattggaagatggaatgcaagcaggaacgttacgttatgcgcttgcgcaaacaggtgcacgtacggtggtttttgatgtagccgggactatcttcctgaacagacctttaagaatcactaacggagatttgactattgccgggcaaacggcgccggggcaaggtatttgtattgccagacgtccggtaactattaacgccaacaatgttattgttcgttatgtacggtttcgtgtcggcaatgaaggcggtggagaacccgacggacttggaagtaccgattgcaagaatgttattgtagaccattgttctatcagttggtcggtagacgagtgttgttcggtgtacggtggtgaaaacctgactgtccagtggtgtcttgtttccgaaagccttcggacggccggtcatgccaaaggaaaacacggatatggagccatctggggaggagcgaaagcatcttttcatcataatctgctagcacatcatgaaagtcgtgtcccacgtcttggtccccgtcctttcactcaggaacgcgaacatgtggatatgcgtaataatgttttttataattgggcgggaaatggctgttacggtggagagggaatgcatgtaaacattgtgaacaattattataaaccaggtccggctactcccaaaaacagtcctgtacgctatcgtattgccgctcttggagtgcgtactacgaaatattgtaccaaagcagatggtaagcccaatgtttggcaacctatggaacatgtatgggggaaattctatgtggacggtaatgtaatcgaaggtaataaggaagtaaccaaggataactggacaaagggtatttacgaacaaatcaagaattcatcctgcgataatactttcactaaacaagtgaagaaagagatgcgcctggccaaacctttggatgcaggtattatcactacacatactgctgaacaggcgtataatcttgtattggctcacgccggttgttccaaacaacgtgatattatagatatacgtattatagaggaaacccaaaacggtacggctacttatattggcagcgtgacaaaaggcgctgaaaatgctcccggattgatcgacttaccggcagatgtgaaaccggagggatccaccggtgcttggccggaattatcgaatggcggtgttacagatgatgagctaagagatactgatggcgatggtattccggatacatgggaaacggctcatgggctgaacccgaaggatgcttctgatggtgttactactacattgagtaaggaaggttataccaatttggaagtctatatgaacagtctggtaaagtagaagttgaaccaattattaatatattaagtatgaagaagataatttttacagtactatttatgggcattctatcgggaggatatgctcaagatagttcatcgccgtatcaggccgtagtagctttggatggtagcggcgactacacgagtattcaggatgctgttaatgctgcaccggacaatcggcaggagccttggctgatttttctgaaaaacgggtcttatcgggagcaagtaattattcccgctactaaaacttatattcatcttatcggacaggataaaaataagacgattatccatcactgtctgaatgtcggtggaaaaccggaagagggaactgaacctgctaaaacagcttattggaaacattctgttcataacccttcttctgaagttcataaattggaaggtagtgttgtttatataaagggagatcatttttatacggagaatatctcttatcttaatgactggggggtagatagccaaaatggtcctcaagctttggctatgagtagccaggctgattgtgctgcatacaataattgcatttttcgatctttccaagatacctggatgacttccagaactgactctcaccgtctttatgcgaaagattgctggattgagggagcggtagattacttttatggcagtggagatgctttgcttgaaaattgtacgttatataatttgcgcagtggttcggtaatagttgctccttcccataaaaatgtgaggttcggatatgtatttcgcaattgtatagtggatggtaataccgctgctgccgatggtaaacaaaagttaggacgtccgtggcataattctcctcgtgctgtttatatacataccactatgcgcattcctcttgctcccgaggggtggacaaacatgggggctattccggggttatttgcagagtatgacagccgcgatgccgagggtaatgtactcgaccttagccaacgtaagactgaatatgacggacgtggcccggataatccgccgaaaggttcctgtcgtgcaacaatcaccaaggaagaagcggatggctatgtatacgaacgtataattccgggagatgacggatggaatccccgtgcgatgatggaaaaattgccatctcccgcaaagttgaaaaaaaagggggataaagttagctggaaagcagtaccagctgctgccggatatgttattttcaataatgatcgtgtcataggctttgccaaagagccgatctatactttgccatctgaagtaaaaggaaatttaaaagtatgtgctgtcaatcgttatggttcattaggaacagagagtgttctttagttaatgaattgtaatggcgctataacatattgacattttttgcatatggaatcccgggcttgtgaaagtctgggatttttttgttaaaactactcagttatagcttcaaactgaattattactccctttctggatgattttactctttaaatactcttctaattctgaattttgcaaaagaattaataacacaggttaagttaagaaatgaaaagctttacgaaaaacactgtacttattgtttaactaaataatactatcatgaaacaagaaatcgaaaagatgaagagcaggttgcttctgctggcattcattttaatggtgcctattggagtgtttgctcaaaacattacggtaaaaggtaatgtgactgattcggaaggagaaccgattattggtgccactgttatggaaaaaggcaaaagccagaatggtgtcatcactgacttagatggtaattttactctgaatgtgtcaggtaaaggaaaaaagatcgttattacctatataggtatgaaaacggaagaagtggatgcagtaaccggaaagactttgaaggttgtcttaaaggatgattcgcaaacactggacgaagtagtagtagttgccgtaggttatggtaacgcacgcaagaaagatttgactggcgctatttcttccgtaggtgagaaaacattgaaaaacatcccaactacttcagcttcaagtgccattacgggacgtctggcgggtgtaagtgttgttacaactgaaggttcaccggatgcagccgttaatattcgcgtacgtggtggtggttctatcacgcagagcaatgagccgctgttcattgtagatggattccaggtgagtaatattaatgatattcctccgacggatattgaaagcattgatgtgttgaaggatgcttcttctactgccatttatggtgctaagggagctaatggcgtaattttggttactacaaaaggtggtcgtgccggtaagacagaagtgacattcaatgcatcattgggtttgaaccgtttctataatgaaactgaggttctttctccctatgaatatgtttactatcagcgtgaattggatccggctaagaatgcaggcttttttgatcgctatggacagtgggaagatgtcgatatttataaaggtaaagaaggactcaactggcaacgtaaattgtttgatcgtaccggattgaagcagagctacaacgtaaacattaatggtggtagtgagtctttgatttatagtataagttacacacgtgatgatgaaacttatattatgcaaacatccaaatatcgtcgtgataatctgaacttgaagttaagcaagaattttaataaaaagttgagattggatcttaatgctaaaatgagtaataatgttattgacggccccagtgtatccagtggttccaaactacgtgactgcgtgaagtatcctcctattggtacgcttactgacctaacggaagacgacctggctggtgataatgaattgatccctgaaaacatcagtaacttgaacgaccccttctacaatattaccaacgagtataagaagcagtccaagttcaataatacctataatgttgctttaatatgggacgttattaaaggattacagtggcgtgcagaaggcacttatggctttacttttgatcgtactgataatatttatctgaagaatacaggtgaagcgaatggtaaggccggacagcctgttgcctatcgccaatattggaatggttcaaaatggacatttcgtactttgctgacttataaattcaagttgaaaaagcatcattttgacgttatgggcggtatagaagctaataactctgaaaaggatgatatgaaagtcaattcagactattatccgggtgattatttggctaatgacattctggctatgtggaacaatggtactgcagaacccacttatacaacgattaatgaacccgaccgcagcatgtcctatttcggtcgtgccaattacattctgaatgatcgttactatctgacttttacgttgcgtgcagacggtactaatgtatttgcacctgggaataagtggggtattttccccgctgcatctgctgcatggcgtatttcggatgaaagtttcatggaatggtctaaagactggttgtccactttgaagatgcgtgccagttatggtaagtccggtaatgcccgtgtcggttcctattggcgccagacttatagtccggtaacttctactaagaatctctattatcagaatgagattggacagagtagcttgcaacctgccaaacgtctgcgtaatgaaaatctgacttgggagtctaagttctcaacgaacgtaggttttgacttaggtttcttcagtaatcgtataaatctgacatttgattattataatgatgttactaaggatttgattatggaagtgcagctgccctctaatgcaggttatagtagccaataccaaaatcttggtcagaccactaatcgcggtgtagagttgtcgttgaatgcaaatctcgttcagacgaaagatttctatcttgactttaattttaatattgctttcaataagaataaggtagatgcattgtatggtgccaatggtgacgaaatgattctttctggtggtggcacagagactggtagcgataactatcgtgtttttgtaggccaggaagttggtttgatgtacggttatgtgtctgatggtatgtattcttttgatgatttcactttcaatcctaccactaaaaagtgggatattgtgacgactaaagatgaaaatggtgtaccaatcgttacagattgttcgggtgtactttctcgtgcaggaggttatttcggacctggtcacatgaaattgaaggacttgaatggtgatggagttattgatgctgataatgaccgtaaagtgatcggtcatgcgttgccgaaacacactggtggttttagttttaatgccggttggaaaggtttcgatgttacagcgatgttcaactggtcttatggtaatgatattctgaatatcaataaagtggactacacttcttatacaggttctaaacgttatcagaatctgagtaatgatatgagattggcaaatcgttttacaacgatagatcctgtaacaggacttaatatctattatggtgaatatgccaaccctgaacgtttgcaggaaattaattccaatgcttccatttggcatccgttaatgaacaatacgattaccacagactggttggtagaagacggttcgttcttacgcttaggcgttctgacgctgggatatactcttccgaaatattggactcaaaagttcggtgtgaagagcctgcgtgtctatgctactggaaataatttattctgtctgacaggatatagcggtcaggatccggaagtaaatacaagttccagcaatatgactcctggttatgaccgttcggcttatccgaagtccagatcctatatttttggattaaatgttacattctaaactaataaacttatgaaattacagaatatagtatatgtattgacggtgggaggtgcgctgttaacctcttgcagcgattttcttgatacggaatctccctcggtacaaagtagtactgttacttttgagaatgaaggtatgacgcgttcggctattatgggagtttactccgaattagcaggtacgtatgtttatggacagaaaatgtcggttaactggcaaggtgtttctgatattgaattggctagtggttatgctactgacccatctaaagacctgacaagtgatacaggggcggccaattattattgtgactggtacaacaagaccctgcaatggggatacatttttaaaatggcagaattggccagtacggctgtggatggcattcgtgcttcagcgctttataaaagtggtaatgcggcgatgaagcgttatttgggtgaggctttaacattgcgttcattgtcttattttgaattggttaggcgttggggagatattccttttaaggaaggtatgtctaactcggatctttccaatgtatatatgggaaagattaatcgtgatagtatttattcaagtattgttcgtgacatgcaggaggcagttaactatttgccttgggtaggagaaaattctgattataattgcgaacgcgtgaataaaggatttgccaagggattattggctcgtattgctctttttgcaggaggatggtctgttcgtgacggtaatcagtttcctgatgattctaatgtagaacactatcctaatgttgaaggaaatcccggtatggaggaagtaggaggttattatgttggtagacctaagaattggcgtgattattatgaaatagccgagcagcaatgtgctgaaattattggtgctccggagaatcctcatcaattggatcctgattatggacatatctggaaaacagtttgtggcttgaattataacgaatataatgagaatctttttgaagtagctaatggagtagggtatagtggtgacatcggtacattgatgggacgtgcaatggacggtggaatcgggtatggcagccgtggtttcggtggttcttatgtatgttcaaatgcttattatttctattcattttctccgactgatactcgtcgtgattatgcttgttactggcctcagtataagaaagattcagatgcgaagagaaatcgtgaggtgatgcagactgatataatgaacgtgaaattgggtaaatggggcttcttctggacttctaatgcatatcgttctatagcacaaacagctacggctcgtactccgaccggtattaactggattgtgatgcgttattcagacgtcttactgatgtttgctgaagctcgttatatgttgggtaaaggaattgattcaaatagtgaaatagctaatatcagtgcccgcaacgcattggaacaagttcgtacgagagctttcggtgccggttctgaagaagtgaataaatatgatgctgatttctttgaggctattgttaacgaacgtgcctgggaactgggtggtgaaggtatccgtaaattggatttagtccgttggggattactagattctaaaatagaggatatgaaaaaggcgatgctttatttgctggacggtactcataccatacaaatcttcgataaaacgtatgaaccaactgatttcccggtgaaagtgtactatagatatgataaggaaggtgaattcatcgatttgtcttcagccaatttctatcgtaacctggccgataatcccgatacggaagtttattcagaagcgaattggttcccccgttcttattggaatttggccgaaggtaaagaaagttctttagttgataattcagtaaagatattgtcttgtgccactggtttgcgtaaatcttatgattatacggaattgctgggtactttgaagtatggcgagttgattcaggctaagttgaatctgatagatataggtaatgagatctgtaattatcgtcatttccattctatctattatgatgatatctataagtcaaaagggtatttgaagaactcttatggatatgataagcaaaaataaaaagttaacttattaaagaatgaatatatgaaacttagaaatatatattatatcttattgggagttctggcattttctgccgttgcttgccaggaggatgccaatgactgggggatagaaccagggcatgaccggttattccgtactactgaatttaaagtggctgataatacatctcctacttctataatgttaagttacagaggtataacggatgcttcaaagtatatctttgaatttagtaaaggagatagtctggaatttacaaatattgtgaagactgtggaaattctggcagacaccttgacaccgtatcgtcaggaaactactgcggttaaaacggaatatcgtacattgttcacagacttggatggaaccagccgttattcggtacgtgtaaaagcggtagatggaaaaacaggtaaagagtccggttatgtgggacttttctttgaaactccggatgagcagatatttacggaggttgttccttctacttccggtgctgtcttgaagtggaaagccgataagaccgctactcatattcgccatgccgaattgaagtttacggtggaaggagaaggggaagaacagactgttttgattgatacagtatgggtagaacccgctcacgagttaactgcaactgaaaaacaggcaggaacttattccattaaagacttgaaggcaggaactaattatctggcatatatcctgaatggcgatgtgcttagaggtaaatatagatttttgacactgggctcttctgtaggagaaacaatagacatacaatcaggagatgatattaatgctttgttagcttctgccccggtaggaccggtaactctggctttcaaaggtggagaaagctatacgtttggtgagatcactgtgccgacaaatgtgaaggctctttatttggcaggtaatgtgattaacggtcagctgcctcaattgacggctaccaaaatgacatttactgctccgctgggaactgtgaaatggcagaatatcgatttgataagtgacggacaatctcaattcttcattgaaataggtaatacgaattgcttcagtactatagcctttgagggatgtcatatcagtgaaattccacgtagccttgtgcgtttgaacaatggtgatgtagagataagtggtattacaatcagtaattgtattgtgaagaatgtagcattgagcggctatggtctgttcaatttcggtaaagctaaatccctgaagaaactcgttattgaaaactctacgctttgtgagattggtgatcagttgatggatgttcgttttgttattgatgaaataaaaatgaataaatgtatcttctgtaattatacaattggtatgccgaaggtattccgtttggataagcaaccgaagtctattgctgtgacaagtactgtctttaccggaacgaatggtggcagcaagattaattccggaaatggagattattctggctacctggatttctccggttgctatttgacctctgacttccaagtggactctaggccgttcacgaatgccaagtctttgtctatgacatctctggaattgttcgtagatccgatgaatggggatttccattacaaaccggaattgaaatttgagggtgaaggcaaagccggtgacccgagatggtggatacaataggtaagattccatataggaaagattgttaatgatggagggaggttgttcatatgaacaacctccttttgtgtttaatctgctctgagaaacttttcgaattttgagatagtgcacttatagtacctgaatttcccccataatacctaattttcccgggtatatttgcataaaatgattaacaataactctataaaagtaacagactatgaaacgatggattttgattggtatggttgtagcttccggtatgactatacaggcacaaaacaaattgcccgaaaagtttccttaccaggatacaagtttaactgcagaagaacgggcggatgatttgctcaaaagattgactttggaggaaaaggcttcattgatgatgaacggttctccggctattccccgattatcgatcaaagcgtatggttggtggaatgaagcacttcacggtctcgcgcgtacaggattggctacagtgtttccacaggctatcggtatgggagcatcatttgatgatagtttgttgtatgaagtctttacggcagtatctgatgaagcaagagcaaagagccggagattggatagtaaaggaaatctaacacgttatcaggcacttacagtgtggactcctaatgtgaatattttccgtgatccgcgttgggggcgtggacaggagacgtatggagaagatccctatttgaccagccgtttgggagttgcagtagtcaatggtttgcagggacccgatacagcacgatacaataaacttcacgcttgtgcaaaacattatgctgtacactcgggaccggagtggaatcggcatagttttaatgctgagaatatttctccacgagatttatgggaaacttatcttcccgcctttaaaaccttagttcaggaagctaaagtgaaagaagtgatgtgtgcttataaccgttttgaaggtgaaccatgttgtggaagtaatcgtttgctgactcagattttgcgtgatgaatggggcttcgacggagtcgttgtttcagattgtggggcagtatcggatttctggcaaaaaagaaagcatgagacgcatcctgatgctgccagtgcttcggcagatgctgttttaaatggcacggatgttgagtgtggaaatagctataaatccttaccggatgcagtaaaggctggatttattactgaaaatcagatagatatttcagtaaaacgtttgttgaaagctcgttttgagttgggagaaatggatgagaatgtctggacagggatttcttcggatgttgtggactcacccaaacatcgtcagttggcattgcagatggcgcgtgaaaccatgacattgttgcaaaataataataatatacttccattgagtaaacaggcaaaaatagcattaataggtcctaatgcaaatgattcggttatgcaatggggaaattataatgggctaccttcgcataccattactttgcttgaaggtatgcagcgttatctgccaacttctaatcttatttatgagccggtttgcggacacacggatagtactttgttcattagcttattcaacaaatgttctacttcggaaggaaacggttttcattcaacatattggaataataatacctttacaggggaggctgttacggaagttcagcaatccaccccattcttatttaatactaatggggctgctccttttgcaccgggagttattttaagaggattttctgctgaatatcgttctgtatttcatccggaaaaaacagaagacgttgtttttcgtattcagatgcgaggcgcctatgaactttatattaatggtaaactggttaaggaagacgaaggagccgtgaagcaaatgacttccatttatacgttgaaggcagaatcgggaaagtcttatgatattttattaaagtatcgtcattttgacaaaacggcaaatcttagctttgatatgggagtaaatgctcagatagatgtgaaaggattgttggagcgtatcaaagatgtagatgtagttatctttgcgggtggtatctctccggcactggaaggagaagaaatgcctgttgatgcagctggtttcaggggaggagatcgcaccgaaatcgagttgccggctgtacagcgacgtgttgttgaggctttgaaaactgcaggaaaacggattgtgtttgttaatttctccggtgcagctatagctttggagccggaaagtctgaattgtgaggctatcctgcaagcatggtatcctgggcaagctggtggccaggctgttgccgaagttttgttcggcgattacaatccggctggaaaattaccattgacattctatcgtaacctggctcaaattccggattttgaggattataatatgaccggaaggacctacaggtacatgaaagagactcctttgttcccatttggtcatggacttagttatactacattcaaatatggaaagttaaaaatgaatgatgataaaattgctgccggtcaaaatctgaacctggtgattcctgtaactaatacagggagtcgggatggagatgaagtggtacaggtctatctcaaaaaaatggatgatacagagggaccggttaaaacgttgcgtgcttttaagcgtgtgcgtattccggcaggaaagacggttgaggttaaattttctttggatgatacccagttggaatggtgggatgaacagagcaatacaatgagagtttgcccgggaaattatactgttatgataggaggtacttcctgtgagaagagcttattatcacggacatttaccattcggtaaaattatgaggagatgatagctgaaatattcaactatcatctcttttattttctttgtattccgaaggcgtcattcccatttgtcttttgaaacactttccgaaatatttaggatcgttgaagcctgtcatgtaagccacttgtgaaaagttatattctccgctgtctattaattgtacggcacgtttaatcctaatttcgcgtatgaagtccacgggagacagaccgatgatggattttagtttctgatagaagacagaacgtcctaaattcagtaactgggcaaattcgtcgactgtaagttccgagttttccatttgctcttccattacttgcatcacttgctgcatgaactgctcatcgtatgaaatgatctgaggttgcgagggggtcagtttctcttccagagtggtttcctgggtattgtttaatttttccgaccatgctttccagtagatttcctgcaattctttacgctggtgaagcaaagacttgatacgaatttttagatacgttgcactgaagggcttggtgatataatcgtctatcccttgttccagtcctgatatgcgatcatccagcgatgatttggcagaaagcagaatgataggtatgtgacatatttctctgttctccttaatattctttaccatatcaaggccatccatagcaggcatcataatgtcactgataatcagatcgggaatatattcccgggcttggtccaatccttcttgtccattggtggcggtgagtacccgataactttctgacaagatatctgataagaagtttcttagctctacgttatcttcgacaattaagatggatacagggtcttcttcattcgatatctgatttggttctttggctgtctctgaaggagtaatgtcggccattgaagctatttcaaccatgggtcttatttcatttttcttttcagcggggactgaatttccgtcattcaatataaactctgtattttctcttccctcataaactttttgattcattggtaatataacggtaaactcgctgcctacaccgggttgactttttacttcaatgttgccacaatgtagttctatcagttctttgacaagtgatagtcctatgcctgacgagggctgcaatatgttgaattttaccaatgtttcaaagcgttggaaaagtgtttgctgtttttgaagatcgataccaatgccttcgtcttttatggaaacaattaatctgctactttccacattggcaatgacggtaatagacttattggccggagtgtatttgaatgcattggatagcaaattaaaaatgattttttcaaacttatcctgatcgatccaggtttctatagcttcctggtttgtttccaattggtaattgatattcttttcttcagcaataaggcggaagttatccattactttttgtaataggctgaggacatctgtcttttccagcagcactttcatttttttattctctattttccggaaatccaatatctggtttactaagtgcaacatacgctccgtattcttgtgcaccagggttaaatgtttacgggcattggttgtgagagtttcgtgttccagaatttcgctaaccggactggctatgagtgttaacggagtacgtaattcatgcgaaatatcggtgaaaaagcgcaatttgatatttgccagttgttgttcaatatttatctgatgacgtaaccggtatatgtagagaatgatatagacgatagttgctgtggataacacgaataatacgacatacagaatccatgcccagtatgtctcccaaaaggttggaagtacagttataggcaggatacgtgctttttccatccatactccgtcgctgttggtagaacgtatttgcaattcatattctcccggaggaaggttgatatagctggctgaacggctgttatccacttcattccatttttcttccaatcctttcagacggtaagcatagctgattgattcaggcgctacataatccaaagctgcaaattggaaagtaacattgcgttcggatggtttcagccttagttcttccagatcattgatatctaaatcctgggaggttccttgtattttaaacccggtgaatacaatgggaggggcataattacttttctgaagatgttcaggactaattttgagtattccgatatctgttcctaatagcaattgattattttccagcacaggagccgcttctgtaaagtaaagctcttgttgcatgtactttttatcataatattcaaatgtttccttttccggattgaaacgggtaagtgcattttccgaaattacccataaacttccttctttatcttctatcatagactggacgaggtcggatggtaagccatcttttgtcgtataaggtttaaattcgatgtgttcacttaaaagattttcagaaaggactttattgattcctccggtaaatgtaaggatgtaagttgtatttctgctatctgtgtaaacataggtcacattattactgctaagactggaaactgtattgggactgcggagattacggtagaaattgatttcttccggttgtttaaattcattggagaaggttagtaacccttctgtggtacagacaagaatcgcctgattgacctcggtgatatagcggactttggagaaatgttctttgggatatcctttcagttggttatcgctatgtatgaagcggatttccccttcaggtgtcttttccagtaaattcagtcctccaccatgacaacctatccagatacgtttttgatgatcctgatagatgctatagatactattatggctcaggctatacgggttgtcttcctgatgagtaaattgacgtatttgaaaatgatcattaccggttctttctaattggaaaagcccatccaacttacttcccatccaaatgactccattttcatcttccataaaacagtagatgtttttttggaaagaaataggttgtgaactgatggttcctgcgggagtcagatatccttttaaacttccatccggctgataaattcgtacatacccttttttgctggctgtccaaagctcatctttttcatctatcaagaaagcgcgtgtttcaaagctggcatctatggcttgtagtgaacatgcgtaggtagaaaatgagatttttgtaacgtcccagtgattacatatccagagatttccctgctgatctaaaaaagaattcagaatgacgggattgaattttgtatcaggattattataatcagtataatagggcttcagttgtttgttctttcgatcataataggagaagccacctctatgtggaaccatccacaatgttccttgcttatcttcgaatatcaggtcgcgacttaatcgttcggcttttggcagatcctctttgggagtaatataatgttgtttctcttctgtctctaagttataacgcactactccgggcatttcggagtataaccataattcgccgaaactgtctctgaatacggataaaacttcggtagagggattggtaggagtgcggggatctattaatctgtatctttgattttccgcaaagtaaatatagagtccattatttgtgcacagtcctatgctatcttttcccagtctactgatagaattgatagcattggaggttgaaaagggcatttcatgaaactgaagttgctgtgtctggggtagatatatcactaactggttgttggcagatactagatatatattgccattatcttctttgatattcttgaatggaatatcagattctattttctttttgccaatgattgaaattcctttgttggttaatatccattcgtccccatcgctatcttgaaaaatagtgattatttgatcccctttcagcttcttctcttcgatattatataaggttattccttctccttcctgagccttgtacgcttgttcgtcaatacggaatgctccacgatcacatacgatccaactgacgcctttgggtaatgtatagacgttctgtacagcgtaggtctgctgtttttcgttttcataagggcgtaagatatctatgaatttttcccggcggctgtcgaatagatagattcgtaagtcataagtctgacaccagatgtcacaggtttgtgtctgtgtgattttggctaaacgattactggttaaagtacatccgtctcccggaaatgctttatagtttttgaaagtgtatccatcgaatttatttaagccattccaagtggaaaaccagataaacccttttgaatcttgcaggatattggtgacagacctttgtgccaatccgttgtaagcggagaaacgttgaatttggcaaatcggttgtgcaatggctacacaggggataaaaagacaaatcaatattaaataattgatttgtagtataatgcactttttcatagtattgactaatttgtaactgctttgcaaagatataaattatctgttttactactatgtattctgatagtaaatgtaggtggatttttcagcacttcggtaaaggaagcatggatgtgtaattattatatagctatgtggaatatttgtttccttaggtgtattatcgggcttgtgactacccagaaagctgtttttaaacattgtgaacattcgtttccacctattgcgataaattttccccccttaactaaataccttttcggacttttgcatcagaaaatctaagtgatatttttatttgaaaataaaagctatactatggatatgaaaaatacatcggttaatgctggggaagatttttactattatataaaaagagaatatgcctat

SEQ ID NO: 6327 - DNA, 7817 bp, Unknown
  gut microbiota DNA sequence
actataaattatagaaaaaggttgtgccaacgttttgacacaacctcgtttttttattagcgcctgcacaggtctctgaaatcacagaactcacatttccttttatcttcagtttgtgtgaagggttcttccggattgtatatttcttgtaataggttttgcaggcgttcgcgaaactcatcttcataaaaagcgaagttgttgaccggtatttttggttggcgggcttcccccatttcaattacaggagaataagtttctgatgctgcacggtgaatgtagagcaaggaaggggcaaccttcaacgattgtttgcggcacatgatggaagcgtacaggaaagtctggaaaatataattcggacgtccgtcggcaggagtgaacagttgctctatattctcgggagttttggggctgccaccggttttatagtctacaatacgcaaggtatcgcccttactgtccatacggtcgatggtaccaccgatattcagtgccagttttccttgcggagtttctatttccatgatctcgtttacaggttcttccataccttccatggtgaaaggagcatattgcaggtcgttgcgcaacaattggcggagataggatgcaatcactttggcattgataagttgcgtaccattatattcaggcctttctgtggggagaacgtggaagaactcttctttgaaagctgtatctacataattctgtagcttcacgtcattgcgtaacagttgctccaggtcttcttttcgtatttcttttccatttgcagtcagatccttatatgccaattcggctgaacggtggaagatagtaccgaacagtgcggagtctatttcagcactcacttcatcgggagcttttaatccggccacataacgatagtagaatttcaaacggcaatccagataagcattgagtgcggaaggagagaacagtgctttgggatggcggacgagattgtatttctcatacattctcgcaatgatttccggtgttttctctatacggatttctctgccgctttgaggagattgtccggcttccaggtattcgcgtgaaatatcgtgcggcgattcaacaagaaattgcagcatgaaacgggacatttctccacggttcagtccatcagaagatgtattatataataaggtgatattttcagcgcgttgtatcagtcggtaaaagtagtatgcatagaccgcattcttatgttcgatggtggtcatgccgaaagctttccgcagattgtaagggatgaaggatgattctccaccggctttgggcaactgaccttcgttgagggagagcatgatgaggtttcggaaatcgaggttacgtgtttccagcactcccattacttgcataccgatggctggttcaccgtggaacggaatatttgaggttgcaagcaagcggcaaagaagacgtttcaaagtgtcagtttgcagattaagttcgccactgtcaataagactgagcagacggttgatgagggtatagctcttgaataaggactcccggtaaagctgattgaaaatatcatctgtttcctgttcttgccggtagaggatggagacttcgcgaagtgtatccgtcaggtattggcagagggctgaaatgccggtctgcggagtgaatacctgttccagaaactcatcttgctttaattcggaaggcagagggtagaagcgattgtctttcgtcagctgtttctccagtttttctgcagagggggacaattggcgtgtatagggatgtttcaatacagcctggacggcttcgtatgaataacgtcctgtatctctgcgatagccattggtttgcagttctatgagtacgctgatgaaactgtatacaggggtctgtgccagcggaaatcccatcgtgatattgacattctttacttctgatggtatggagtggagtacgggtaataaaagagattcattacaaagtaccacagcattctctttttcctgggttggtgtacctgatggatcatttttcattacggagtgtatccattccggcaaatagcgtgcctgtgcattttcggtaggggcggagatgaaacgtacatttttaggatgtcttaatacatcgaatgcggtttcgggtagttcgttggggaagattttcaggttgcggagaatgaattcgccggcttcatgcgtgtaaggcggagtcttttcacgaggcagacgggtgtaaaacaagtcataatcccaatagaacaatgctctgccggcatcacgcagacgctcaaaaaaacgggtttccactttattcaatacattgaaaccaacgaaaacataccggtcatatttcagcttttccggttgcagttcttccatgacgtagcgatacatcataccctcataagcaatgccgagttctgcgagattgtcgcggtagccgtgataaatatcgcctaatttatcccacaaggagatgaacttctctttcagttgcgtgcgtcgctcgatggagaagttttgaaagaactgacggatggcttcttcctgttcggagtcaaggaagtcgtaatcatccatgatatttttcaggtcttgcagattagagaatagacggtcggcatcaacaagatttttatcgacatcatcgaaatcgctgataagaagttctccccagaaatagaaatcatcaagtgtttcttcactatgggtttcttcacgaaatactttatagagctcacaaaccaagcggatggggtcacccaacttccatggagaaagctgtcggaacagttcactgatgctgacgtaagcgggagaccataaagggcggtcactttgtgccgccaaatgctcgttgaagaaaaggctggcacgtttgttcggaaaaacaatggcgacccgtgaaagatcgtttcctatttttttgtataagtcttgggcaactaattgaagaaaagtttgcatcttaatcttttgtttttgataactattctgcactgaatattatgggtacggttactctgtatctaaagcttgtgtgcctctgggaaattccggtggtgttgtttctattgtttcgtaatcaacatctccttccagtatctctccggattctattgtttccgtcggacattctcccattgtcatgttactttcacgcagtgcaacctgaatgtaagttgctcccttcttatttatttcaatttcctgtgcttccattccaacgtattggatgattagcggatatttaccggaaacttttagtgtaaactcaccattcgcatctgttagagtaccgtttgtagtttctttttcagagacattggccccgacaattggtttttgagtcagactgtctgtaactgtacctttgattaaaaagagtgagtccttatccgtcggcacgctctgacactcaagtttgatctctgaggtgttctttgctgattggcctggtgagttggcgcaggcattcattgcgataatccctgcggacaatcctaatagggtgatcgcttttcccgccatgcgccgtcgttccagttgatgttctagatatcgtacttctgattcacatttgggacatgtgcctgtacaatctcctttgtattgacattcggaagtgatatattcgatatcatttgcttcggcaatttgccggcgaatgtcttttaatatcttgcatgtttgctttcctcgtaccatgattattctgatttataattgccttatatctactgcaatcgaaacatgaccgggacagtatattccacacgtacaggttgtcccgctaccgtaccgggtttccatttagggaattctctgactacgcgcagagcttctttatctaaatacggatcaacgcctctgaggattctggcatttgtgatactcccatccttttcgatgacaaatctgactgtggttcgtccttgggttccgttaccttgataaacggggagtttcagatctaattttttgcttatgaatttcatcagttcgatcatgcccccgggaaattcgggcattgtatccggtgcatcgtactgatttgtgccatatatggtagtatcttgcggaataacctcctgtacgagagagtccggcgggaggactcttattaccggtttttcctgtatttccggagttactatataataaccatgcggagcttcggaatggatcggctccgcacaggcaggttgtggcatcattgttgccaatcctgcggatactccaagtatggtaatcgcttttcctgccatgtgtttacgtgccagttgttgctccagatactgcacttctgcctcgcatttgggacatgtacccgtacaatcccctttgtattgacattcggaagtgatatattcgatatcatttgcttcggcaatttgccggcgaatgtcttttaagattttgcaagtttgctttcctcgtaccatgattctttatactttttctattaaatcttcttctacgtaccacaggtatccttttatgttctctttcgggtatcccatgcgtgtgagcagttgcatatatccctgcacttgcttattatattttttattctgttttccgaatttgaagtccacgacaacaatttcgttgtcgcgcatcatgacgcggtccggtcggcgggttcggagttcccctttttcttgccagatgatgtcgcactcgttgaacaattgccagtctcccgaataccagtcctgcacttgggggatggaaaaggcatgccgggtcagttcccggatttcatcttctgtttccggtttgccgatgatgccttcgaatataagttggtcgatggcattgtcgatgtccttttctgtttcaatggctgaaaaaagagtatgcagtaagcgtccccggtttatgaagcgattgtctgattcatcttcgtcaactccctgaatgaaatcggctgaacggtttgattgccggaattcgatttcatgcctcatgctctccatgtgtaccgggagcttgtcaggcttttgagcaaggcggttgactgaggtttgggcgggcgtcgtcggcttgctatcttccgatgggcagagtattccgctttcgtaaggtttttcctcgtcccagttttcattaccttcctgggcggctacatgtggcagtgcattggcaagcagttcggacattgttcctttctggccttttttactccaaaggatgagattctttccggcacgggtaaatgctacatagagcagattcaggttatccacccaaagttgcagacgctcgttaagatactcttgcctgtatactgattctgccatggtagaggaataattgaccggaacaatgtcgagcgcgctgaaaggtgattcggaaggtgaacaccatattaattgattattggtctcattctccaacttccagtcgcagaaggggattaagacggtatggaattccaatccttttgacttgtgaatggaaaggatacgaataccatccatttctccgctggggattgttttgttgcataaggtttcgtcccaatagcggataaatacatccagatccgatgagttgttttgcaggtactccgttacggcatcgaaaaaagaaaagagatacgcatcctgttctttgatccggttcatctcaaacagactgaacagttcttccaataattcgtatagcggcattagacgaagaggctctatgcggttgacaaatgcctcgggcaatacatcctccggtcgggaagttagtatatcatcccacttcgtttcaggcgcatttgctccttccttctccattcgcccttctttgttttcgtttgtaatttgtaatttgtaatttataattaatgaggctcttgctactttatcatcaggattggaaaggtaacgtaaagcatccatcaacatgcacaatgcttgtgaagcattcagtcggaaagcttcgtctgaaacaataggcagatgcattgttttgtcgaaataatcggcaatgggaggaatgtttttattcttgcgaacgaggatggtgatatcgtttagttttacaccggcagccagtagtctctgtacttcttcgcctaaagagatgatggtcagttccgtataatcgtgttcttcgtccggttccaggaaagtagccttgatgtatcctttggcttcggttcgtggagattcctgtgccacgtcggcataagcttgctgtaacgggcggcaatcttcctgtaattctttcagatggagcatattcaggtactccactgcggccgtgaacaaactgttgttaaaacggatgatatttgtttcgcttcgacggtttgtttttaaagtttctacacgtacagggtagggaataggcgtttctttggtacccagcgcattcaatattccccagtctccatttcgccaacggtaaatggattgtttcacgtcacctacaatcaagctgtcggctccttgtgaaagaccttcaagcaataagattttgaagttatcccattgcatacggctggtgtcctggaattcatcgatcattacgttccggatattggcaccgattttctcgaatacgaatgaagagtctccatcccgtaccaggttatggagcaaggcattggtgtctgacaacaggaaacggttgtgttcgcggttcagctcccgtacttcttcgtcaatgtgggcaagcaattgtaatttgttcaggtgttgcagtgataaccggcaactgtttactttcttgttattgcggggtctgaatgtttctgcatcctgcaataaaggaagcaggcttgtttctgccaggtggatgatatcgttctttcggggcgaagtcttggtggcccaattctttgcgtcatccaagctattcttcagagtggcgttcagcacatctttgtctgatagccgtccgtcacgcaatttacggaaataactgcctatgcctcgcgttccgcctttcaggtcttcggcggtaagtgcatgtgattccaattctccgatgaactggtcgtagaagcttttcatttgttccagagcctcggtctccatttcccgcaacacattacggtacagtttgattatatccggttctttcagttgttgccggagtccttcactgcgttctatgtaaccttcgtcgaagatgttccagccgaatcgcttgatctcatcggatacattccaacgtttgtcatcggcaatgcgttcgttgatataatccagcaaccaagccagaacaggggaggaaggtgtcagtttttcaatgaggctgtccacggcatcgctcaatacgtcggcattgttcagttctatattcaggttcggactcagttccagttcccgtgccagattgcgcattacggactggaagaaggagtcgatggtttctacacgaaaacggctgtaatcatgcagcatgtattgcaatgctgttcctgctgcccgacggatgtcagagtcagataagtttttctgtcgtaaatcttcacggatgcggttcaggtagggctctgatgccggatcacttaaccagataccgtaaagttgttgcagaatacgttctttcatttctgccgtagctttattggtaaaagttacggccagtatttgccgataggcccttggattcagtatcaggtgcttgatatactctacagcaagggtgaatgtctttcctgagccggctgaggctttatatactaataattccatgtagatttgctggattgaacttttgtacaaacatacgcaaaaatgtgaaattattgggattggtgggggaattaatttgtttctataaggttatgagttaaataataaataatcttttagacgcgga

SEQ ID NO: 6328 - DNA, 33420 bp, Unknown
  gut microbiota DNA sequence
aacaatgtatatcaagaaagtataattatattctaatagacaagaactatcaaataaatatagatgatataatatgaattatatcttcttcgtctccgtttttaaagaatacacttacttacatgtacatgttggcatcgtctacatacacatgttatccttatctacatgcacatgttaatattgttaacatgtacatgtaagcatctccattctttaaaaaactatcgtctttacattaaagatattgtgatttaagtgctatccgcatgggattctatcaaattttacttatttttgcatagaacttcttgtagaagtaacctttaaccaatcgaaactcagatgaagaaaatagtcacatccttatatctattatgttgtgtatgtgtgtgtcagctccatgccgccaacaatgttgtagactcccttttatcccaactggaccatgtaattcaaaaccgccctgtatacatcgagcaaaaagaaaagaagctgaacgacctgagacaagccttgagacaacgcatttctgacgaaaaccgctttaccctgttgggggaatatctggatgaataccgttcctacaacaccgactcttcgctctacatctcacgcgagagatatcaggtagccctgcgaatgaaaaacaaggaacatcaagacaacgccctcatgaatactgccgagattatgggcacagcaggcatgtataaagaagcagtcgacctgatgcacaacgtacaaatcaatcatctaccggatgacctgcacccgtattattaccatatttaccgtaccgtctatggcctcatggccgattatgccgttacggaacaggagaaaaaactctatgccgagataacggatagataccgtgattccctgttgttggtcaacaaagacaatcttctggtgtacacgctgattcagtccgaccagcacaatgtgcggggcgagttcgataaagccatccagctattgaccgactacctggcgggacagatagacaatgtgcacgatgtggcaatctgtgcctacactttatcagaatcataccgcctgaaagaagacacagaaaaagagaaggagtatttgattctttcctccattgcagatatgaagtccgcagtgcgcgaatatatttctttgaggaaactggctgtgttgctctatcaggaaggagatatagaccgcgcctattcatatctgaaattgtgtatggacgatgccgtattctgcaacgcccggttgcgtattctggaaatcctgcaaattttccccctcatcaacgacacttaccagcaaaaggccgaaaagcaacaggaacaaatgaaatgggcgttagtttctatcagcttgctgtccatcttcctactgattgccatcttctatgtgtataagcagatgaaacgcgtagcagccgcacgccacgaagtgatagatgccaacaagcgcctgaaagaattgaatgaagaactccaccgctacaatctgcaactgaaagaagccaaccacatcattgccgaaaactcctacctgaaagaggaatacataggccgctatatggaccagtgttccgtatatctggaaaagatggataactatcggcgttcactgggcaagatagccgctacgggcaaggtagatgagctatacaaaaacatcaaatcttccaagttcatagaagaggaactgaaagaattttatgccaattttgataataccttcttgcaactgtttcccacttttgtagaagacttcaacaccctgcttgccgaaggggagcagatttaccccaaggccaacgaacgaatgagtaccgaactgcgtatcttcgcccttatccgtttgggaattaccgacagtgtgaagattgcccaattcctgcgctattctgtgactaccatttataattaccgtaccaaagttcgcaataaagctgcgggcgaccgtgaccaactggaacaggaagtaatgaaaataggtaagtcgagagactaaaaccacacttttaaggcatataagtgtcttttttacgcttatatttttactacttttttggaacaatgcatcttcttgatagcattgattattagtgttttatgtcttataaaacgcctaaaactactactttttcactcttttcccccttattgcttcctcttatcagatacatttgcattgttccttcacagaggggacaaatgcatgtgaatctatattttattactaactttaaactcttatattatgcaaaagtacaaaatgccgatcaggcttcgaattatggtttgtctgataggaatgttacttccgatgtgcatgttcgcacagcaaatcacagtacaaggtgtagtgaaagaccagaccggagaaaccgttatcggtgccagtgtggtgcagaagaacacaacgaacggtacgataacgggtatcgatggcgatttctcgctgaatgtgccttcggatgccgttatagtagtttcattcgtgggctataagtctttggaagttcccgtgaaaggacagaaacagattatggtaacactctcggaagacagtgaaatgctggacgaagtggtggttatcggttatggaaccatgaagaaaagtgaccttaccggtgctgtttcctctttgggaagcaaggacatcaaaaatgcccccgtttctaatctgggacaagccattcagggccgcatctccggtgtgcaggtagtggatgccggaaagcccggtgacaatgtatctatcaagattcgtggtctgggctccattaacaactgcgatccgctggtggtgattgacggtgtgcctaccgacctgggactgtcttcactgaacatggcggatgtggaacgcctggacgtattgaaagacgcatcggctacagccatttacggttcgcgtggagccaatggggtagtgatgatcaccaccaagcgaggaacggaagggaaaggcaaattgtcggtatcggctaattgtgctttccagaatgccacgaacattccttctttgctgaacgcaagccagtatgccgatttgagtaatgatatgatggtgaacagcggtcgcaacccgaacccgaattgggcaaatccttcggaactgggtgcaggtaccgactggatggacgaattgctacgcacgggtgtgatgcagaactatacggtaagttattccggaggaaatgagaagtctcattattatgtatccggtggttttctcgatcagtcgggtacggtgcgcagtgtaaactatcgccgttttacgtttcagtccaacagcgatgcacaggtgctgaagtggttgaagttctccaataatatcactttcagcactgatacgaaggattcgggcagctataatatcggtgatgcactgaaagctcttcccgttcttccggtgaagaatgaagacggctcatggagtgggccggaaggtaattcggaatggtacggtagcatccgcaacccgatagggcctacgcaactgaacaagagccagacgaaaggttataacttccttgccaacctgacggcggaactgacttttaccaaatggctgaaattcaagagcactttcggttacgatgccaaattctggttcatcgataacttcacgccgaaatataactggaagcctattccgacggaagaaacttcacgttacaagagcgataataaatcattcacttacctgtgggataactatttcctgttcgaccatacctttgcagaaaagcatcgtgtgggagtgatggcgggatcatctgcacagtggaatgagaatgattacctgaatgcacagaagaatgtcttcatgttcgacaatgtgcatgaaatggataacggtcaggagatgtacgccattggcggcagttccaatgaatgggcattgctctcttacatggcacgtatcaactactcttacgaagaccgctatatgctgacggcaactgtccgccgtgatggttccagccgtttcggtaaaaagaaccgttggggtacttttccttctgtatctgccgcatggcgcatttcgcaggaaagctggttcccgaagaatgacgttgtgaacgacctgaaaatacgtgtaggatatggagtgacgggtagccaggcaagtgtcggcaattatagttacctggcatcttacaacaccagtgtatatccattcggaacaacgagcggcaatcagaccgcattggtttcctctacgcttgccaatccttacatccattgggaagaggtggcacagacgaatatcggttttgatgcttccctgttcaattcacggatcgtattctcactggatgcttatctgaaagagacaagggatatgttggtgaaggcatccatccccatcacatcgggatttgaagataccaccactacttatacgaatgccggtaaagtgcgaaaccagggcttggaaatgagtctgcacaccatcaatctgaccggagaactgggttgggaaacaaatgtaactgccacttataataagaataagattaaggatctgaacagcgcggttccttactatattaaccagatcaacaactcgtatgtcacgatgctggcaaaagactatccgattaatgctttctacggctatgtgacggatggcttgttccaaaaccaggcggaagtggatgcgcatgccgtgcagccgggagctgaaccgggtgatatccgtttcagggatttgaacaacgacggtgtcattaacgacagtgaccgcacagtgattggcaatcccaatcccagttggttcttctcaatgaacaataacttgtcttataaaggattcgagctttccgtattccttcagggagtggccggcaataagatttataatgccaacaatatcgacaatgtcggtatggctgccgcatacaaccagacgactgacgtactgaaccgttggcgcggggaggggacaagctactccatgccgcgtgccgtgttcggcgatcctaaccagaactgccgtgtatccgaccgctttgtagaagacggatcttacttgcgtgtaaagaatatcactctctcttataccttcccgaaacaatggttgcaaaagttgcagatagagaatgcacgcctttccctttcttgtgagaatgtggctaccattaccgggtattccggtttcgatccggaggtggatatcaacggtattgatttgtcccgttatcccatttcccgtacattcagtgtaggattaaactttaacttttaattgatttggatatgaaaaagataacaaacttactatacgtgctggctgtattgatgctggcatcatgtaacgactttctggataagtcgcccaaatatgccgttgaccctgaaacaaccgtgaccgatgatgtggccgtggcactgacaaatgcttgctacaaggcgcttcagtcttccaatctctacaaccagcgtatgtggtcgctggatatcgttgcgggcaacagcctggtaggtgcaggcggtggtacggacggtctggaaaccatacaggcatccaattttatcacgcagagcgataatggtatggccctgtatatgtggcgttctccgtgggtaggtatcgggcagtgtaacattgtgctgaccagtcttccgcaggccgaagccgtatcggaaagtataaagaatcgttgtatgggtgaagcatatttccttcgtgcccattactattatatcttagcccgtttgtatggcggcgttcctttgcgtctggaaccttataatccgggtgaatctactgcaatagcacgtactacgttggatcagacttatgagcagatcatttcggactgtaagaatgcggtcgatttgcttccggcgaaagcggaatataatgaagaagaaaaaggacgtgcctgtaaggatgccgcccttgccatgctggcggatatttacctgacactggctcccaaccatacgagttattatgaagacgtggtggaactgtgcaatgagattacgaacctgggttacgacctttccacctgcaagtatgaaaataacttcgatgctactatcaataacggtcccgaatctctgtttgaagtgcagtattccggaagtacggaatatgatttctggggaacggacggtcagtcttcctggctttccactttcatggggccccgcaactcggactttgttgcaggcagttacggctggaatcagccaacggaggaatttgtgagccagtatgaagaaggtgacaaacggaaagaactgacggttctttatgcaggttgtccggactttgacgggaagacttacaagagttcttattccaataccggatataacgtgcgtaaattcctggtgtccaagaccatttcgccagaatacaatacgaaccccaataactttgttgtgtaccgctatgcggatgtcttgctgaagaaagcggaagcgctgaatgaaatgggacaacccggccaagctgccgctcccctgaatatagttcgcaaacgtgccggactaccggaagtttcgggcctgtcgcaggaggcgatgcgtgagaagattattcacgaacggcgcatggaactggctttcgaaggacatcgctggttcgatatgatccgcgtcaataatggagagtatgccatccgtttcctgcaatccatcggcaagaacagtgtgaacaagaatcgcctgttgttccccattccgcagacggaaatggatgcgaatatactgatgacacagaatccgggttattaatcacttaaatcagaagaagaatatgaaaagatatatttcacatttagtatttgcattgctgggttgtatggcactgtctgcatgcgtggacaatgactatatggaactggacaaggggcacaatgaactggcgctttccaccagcagcacggaagtcgttttgaacgagcaggcgcatggcgatgatgccttggaactctcctggacaacgggcacgaattatggtacgggaaataagatttcctatacactggaacttgccaaggcgggcagtaattttgccactccttatgtggctttggagaacgtcgtgcaggaatatacctggaagaagaacgtggaggaattgaataacatccttcgtgagcatttcggtgcggaaactactgaaaacatctctctggaagcacgcctgacagccaaagtaacggatcgggaagagacacaagtggccaccacttcttttagtgtcactgcctacaaaccgttgacttccactctttacctgataggtgatgctactcccggcggttggagtgcggacgatgcaacggaaatgacccggaaagataatggtatctttacatggacgggaaaaatgactgcgggttcctttaagtttatcactacgctgggttctttcttgccgtcgtacaacaaaggaactgacggaaagctggtgcttcgtaccagtgtcgatcagccggacgaatcgtttacgattgaagaagagttcaactatattgttgaagcgaacctgtttaccggtgttatcaccttgactcagaccgagaacctcagaccggcttacgatcagctttatttcgttggaggtatgaacgactggggatttgtgccgatgaaaaaggatgtgctcgatccgttcctgttccgctatgctcgtttgttcgatgcaggccagggcggggaattcaagttcggaacttcggaaggaagctgggagagcatgtataaagcaaagaatgccaatgccgcttacaccgatacggaaatggtatttgtgaaagggttcgatcctgacaataaatgggtgctgaaagatgccgaatgtggtaaggcttataagatatgtgtcgatattcgtgcagggaaagagcgcatgatgatgagcgaatttgttccttatgagatgatttatatggtaggggatgctgcgcctgcgggatggagcattggagatgctacgccgatgcaggccacggataatccgtatgtatttacctggcaaggtgtactgaatgtgggtgagttgaagctgacctgtgataagaaagaggactggaacggtgcctggtttatgccgaccgtagctgataagcagccttcgggcgagacggaaccgatgttgttcctggataaggccagtgatgctttcaaagctcaatacctggatgtaatgattggaggtatcgacctgaaatggaagattacgacggctggttcttataagattactctgaatcaactggaagagactatttcgatagtaaaacagtgaaacgatgaaatatataatttatgcaatggctgccatgttctttttggcttcgtgcagcaaagacaatgatgaaaccggcggcggtaacggcggtggaggagaaaccggaggagtgactgatgtcactcccgttacctccgatttaaccgtgaacctgaccactgacaaggcttgttacaaaccgggtgaaaccgtttccttcacagccgatgccctgcctgcgggagcaaagatacgttaccgtactttgaacaaggtaatctccgaacaggcagtcgcaggcagttcctggacgtggactgcccctgcaacggatttcaccggatatctggcggatgtctatcgcactaaagaagacggtacggaagtcattctcggtactattgccgtcgatgtatccagcgactggacacgctttccgcgttatggctttgtcgccaccttcgatgcttctaaaacggaaagtaaaattcaggaggaaatggcttttctgaaccgctgccatatcaatggtgtgcagtttcaggattggcacaacaagcaccactggccattaggcggtacgcgtgaacatctcgatgcggtatataaggacattgccaaccgggatatttatacacagtcggtaaaggattatatccgcatccagcactcgtttggaatgaaggcgatgttctataatctttgtttcggtgcgctcgatgatgcagccgatgacggtgtgaaagaagagtggtacatctttaaaggcacagggcatacggataaggatgcgcatacactgcctgacagttggaagagcaatatctatttgctcgatccgggtaatgccgaatggcaggcatatattgcccagcgcaacgatgatgtttatgccaatcttgactttgacggctatcagatagaccaattgggaaaccgtggcgaccgctatgattacaaggggaataaggtgaatctgcctaagacttatgtttcgtttattgaagctatgaaggggaaacatcctgataagcgcttggtgatgaatgcagtaagtagctatggggcgtctcagattgcaggtacggggaaagtagatttcctgtataatgaagtttggggggatgaagctgatttcacggatttatatacgatcctgaaagcgaaccatcagtacggaaatcaggcattgaagacggtgtttgcggcttatatgaattatgaaaaggattccggcgagttcaatatgccgggaatcttgctgacggatgcggtgatgtttgctctgggaggttcgcatctggaattgggaggcgaccacatgttgtgcagtgaatattttccaaatacccgtttgcagatgagtgatgccttgaagacggctgtcgtacgctattatgactttatgactgcttatcagaatcttcttcgcgatggcggggaggaggagaaggtaactttggtatgtacggatgcaagcaagaatctgaatctgaacacttggccgccacagaaatcagccattacttctttcgccagaagggtgaatggcaaacaggtggttcatctgctgaacttccttagtgcaaacagtttaagttggagagacctgaacgggacaatgcccgaaccacggttggtaactaaaatgcccttgaagctgaatgttgcggggaaagtgagcaaagtgtgggtggctactcccgatgcacatgccggagcttcgcaggaattagcttttgaacagaaagacggagcgataacctttacgcttccttcgctgaaatattggagcatgattgtaatggaataaattataaaagatatagaaccatgagaaaatatatatatttatttttaatactgtgttgcctgtctccgcacttatatggcggaaatgtaacgggaaactgtacttcttattcgcaggaagggagagacgttacgtttcatttagacgataattcggctgtgcagttgcagctttgcagtccctccgttgtgcgcgtctggttttcgccggacggtaagttgcagcggggaaacccttcctttgcagtgattaatgaagaattggaagatgtaggcactgtccgggtggacgaacagaatgcctgttatgagatatttacgcctaaactgcgtatccgcgtcaacaaggctccgttcagcttgcagatattcgacaagtatcagaagctcttgttcagtgattatgccgacaaggggcatatcagcgacggagagcgtaaagtggagtataaaactctgcgccgggatgagcatttcttcggtttgggtgaaaagaccggcaagctggaccgtcgtggcgaatcttataagatgtggaacagtgataaaccttgttacagcgttgtggaagatcccctgtacaagagtatccctttttttatgagcagttatcgctatggtatatttctggataacacgtataagacagaattcaaattcggcactgagagccgtgattattacagctttgaagctcctggtggggagatgatttactattttatcttcggtaaagattacaaggaaatcatgaaacagtatgtcgcattgaccggacaacccatcatgcctccgaagtgggcactgggctttgcacaatgtcgcggcctgctgactaccgagaagctctcttatgaaatagccgaaggataccgtaagcgtggtattccttgcgatatcatctatcaggatataggctggacacaatacctacaggacttcaactggcggaaagaaaactatcagaatccgaagaagatgcttgccgacttgaaagggatgggcttcaaggtgattgtttcgcaagacccggttatctctcaggctaataaaaagcaatgggaagaagcggaccgcttgggttatctggtgaaagactccactacgggtaagagctatgatatgccttggccgtggggtggcaactgcggtgtggtggactttaccattcccgaagtggcggactggtggggagcttatcagcagaaaccgatagatgacggcattgccggcttctggacggatatgggtgaacctgcctggagcaatgaggaacaaacggaacgtcttgtaatgaaacaccacctgggtatgcacgatgaaattcataacgtgtatggtctgacttgggacaaggtggtaaaggaacaatttgagaaacggaatccggatcttcgtgtcttccagatgacgcgtgccgcctatgcaggattgcagcgttacaccttcggctggaccggagattgcggcaatggagatgatgtgctgcaaggctggggacagatggctaatcagatcccggtacttttatctgccggactgggtgtgattcctttcgtggcgtgtgacatttcaggttattgcggggatattgaagattatcccgctatggcggaactttatacccgttgggtacagttgggagcgttcaatcctctgagccgtattcaccatgaaggagatgtggcggtagaaccgtggctctttggggaggaagcggagaaaaacgttaaagctgccatagaaatgaaatatcgcttgctgccttatatttatacttatgcccgcgaagcgtatgaaacgggtttgccgattatgcgccccatgtttatggaatatccggcggatttggaaacagtctctacggatgcacaattcatgtttggcagcgaactgctggtagctccggtagtgaagaagggggcgactaataagaatgtttatctgcccgaaggtacttggattgattataatgacaagcgcacggaatatagcggcgaacagtggactacggcaaatgctccgctgaataccattcctatgtttgtgcggaaaggaagtatcatccctcagatgcctgtgatgaattatacggatgagaaagcggtttatccgattacatttgaggtatttccggctgcggcgggcgacgaaacgtctttctccctgtatgaagatgcaggaactgatctggggtatcagcgtggggaatttatacgcactcctgtatcttgccggacaacggaaaagggatatgtgctcgaaatcggggaaagggcgggagagaagtatgcccttccgggagaacgcaacctgatgttttgcatttataccgggcagatgccgaaggaagcgcttattgacggacagaaagtaaggaagatgaaagcggaaaaactgaatgaaggaatggaaacggagttcaaggttaccgcatggtgtccggataagaaacagaatctttgtatgttgagattgccggatgacggagtgaaacacacgattgaatttatttattaataccaaccataaaaagtatagttatgagaaagttaatgcttagtgcaatttgtcttctttttgccttagcggggaaagcagaaggagtgtcgtctccttcgggccaggtgaagctggattttgaattatcaaagaatggtgctccaacctatcaggtggagtataaagggaaatccgtgattaagcccagcaccttgggactggaattgaagaatgccaataatctgctggatggttttgaagtcctgaaagcttctacctctaccttcgacgaaacctggcaaccggtgtggggagagacgaaagatattcgtaatcactataatgaattgctgtttgaattgaaacagcccgccacggatcgttatatgaaccttcgttttcgtgtatatgatgatggtgtaggattccgttatgagtttccgcaacagaagaatttggtttacttcgtgattaaggacgaacatacccagtttgctatgacgggcgatcataccgcctggtggattcccggtgattacgatactcaggaatatgattatacggaatccaaactttcggaaattcgcggtttgatgcagggagccattactgataatgcgtcacaaaaccagttttcgccgacaggtgtacagacttccctccagatgaaaacagcagacggaatctatctcaatctccatgaagctgctttggtggattattcgtgcatgcatctgaatctggatgataagaatcttatctttgaatcctggctgacgccggatgcacagggcgataaagggtatatgcagtcaccttgtcacactccgtggcgtacggtgatagtcagtgatgatgcccgtgaaatgctggcttccaatctgatactgaatctgaatgatccttgcaagtatgaggatacttcctggattaagcctgtgaagtatgtaggcgtatggtgggaaatgattgcggcaggcaagccgtgggcttatacatttgatcttccttccgtaaaactggatgaaacggattatacgaaagtgaaaccgaatggtattcaccccgccaatacggagaatgtaaagaagtacattgattttgctgcggagcatggtttcgaccaggtattggtagaaggctggaataccggttgggaagactggttcggtaacagcaaggattatgttttcgactttctcactccatatcctgattttgacatcaaatacctgaatgagtatgcccactccaaaggtgtcaaactgatgatgcatcatgagacatcggcttccgcacgcaactacgaacgccacatggaggctgcctatgacttgatgaatcaatacggttacaattccgtgaaaagcggttatgtgggcaatatcattccgcgcggcgaatatcattatgggcagtggatgaacaaccattacctgtatgccgtgaccgaagctgccaagcataagattatggtgaatgcccacgaggctgtacgccccactggtttgtgccgtacgtatccgaatctgataggaaatgaatctgcccgtggcacggaatatgaagctttcggaggcagcaagcctttccacacgaccattcttccttttacccgtctacaaggcggaccgatggattatacgccgggtgtctttgaaatggatatgaataaactgaatccgaatagtcacgctcatgtaaactctacattagcgcgtcagttggcactctatgtcacgatgtatagccctctgcaaatggcagccgatctgcctgagaactatgaacactttatggatgctttccagttcattaaggatgtggctctggactgggatgacagccgatatctggaagcagaaccgggacgctatatcacggctgcccgcaaggcgaaaggtacgaataattggtttattggttgtaccagcagtgagcagggacatgcttctactttgaaactggattttctggatgctgataaacagtatatagctactgtttatgcggacgcaaaggatgctgattataaaacaaatccgcaggcttacgtaatccgcaaagggattgtttctcctaagaccgtgctgaatttgaaagcggctccgggtggtggttatgccatcagcattatggaggtgaaagataaggcggaattgaaaggattgaaaaagctatccggtaatatctgataaaccggaatatctgatagataaaaatccccttcctcagctctccaatcaccaagtacggtaattaggagtggaggaaggggatattttcatttgaataaatctttcatatagtccagtgagcggctgatatcgaagtaaatttgagtgccctcatagtatggactgctttcaaattccatcaggtcgcacttgttcaccaatgattgttgcttcaggccttctactttgaagacattgtttaatatctgatattcatcattgacgctgatgactttaaatgctgtatcttcgcttgtgccatctccactggagatgatggcagaggaaagttttatgtatttatctatataagcctgaacttcttcttttctttgcagctcactcgccagattcacggcataaatgagtaatttaagagatacaggattctttttccggcattcttttaattgggtataggcttcttcccatttcttttcttccattagcgtctcaagctctttccaaagctccatactccctttgtattttggggtgaaagaatgaccgtagtagattagcgcgtaatcgtttaaggataataagctgtcattagcttcaaagcgttcaatcagctgttggtaatcatccgactggttttccacatactttttaatagtagcatagtttacttcgatattctcttgcgggaatacacatacagagagtagaagaagattgatgagtaacagtgttcttttcatggcattatttattttaaagcattaccacaaagaaaagccttttgcgaggatattccaaacgtatgggcataaaaaaaggagtaccgctgtactccaacctttgttaaccttaaatctaatactatgaaaaacacagtgcaaaggtacggatattctgcgcatttccaaatgattagaccaatataagtgtttttataacactaattaaaagttaggcattgtttctttactttttttcaatgttttattcattgatacgctcttttatctttccccaggcatgtgtatcgaacaggcaactttcgcgcatggtgtgatacatctctttgaagcgggacatgggaatagtgaagctcaacagattggcctcaaagtggggacgcacggacggatcaaagaagccgaggaaacagcgcttaccatctttttggttttcgagaacagtgagggttacaacggaactgcaaccggaaccgaaaggagtagctacggtatcgaatgcattcgtatcataaaaagcccatgtggtaagtcctgacaggatatcaggtgtagcaaggaacagcaaaccctctacatgatcgaaagaagcaagtttatctattcgggcaaaatgcagataggccttttctgtacgcggtacctggatttgctttatgaaatctgttaccatttcaggagtctttttgtacttctctttcagggatacgaagttaggtacgtgtattggcatttccgtgaaaccggtgtagaactttccgccgccacatcctatgacgtcgctgttcaggctgatgggtttaccttcccttacctgttgcagccccttgaagaaacaaccgccaattttgtctgtttcgctttcctgtttatcggagtaccagaaggcgatgggaagttcggcacgttcaccaaatgcttcccgataattagtcataaaagtatgtatatccatgataatagagttttggtttggaagtaaagataacaattgattgccggattattgagtattttacttatttttgcatagaaaactataattccatattgattatgaaagcacgcatttcttgtttttttctacttgtttttttctttgtgcagatggtgaaaggagaagatgacactttgtggcaacttcatgcctctgatataaatgctccttatgtaggcgcccctatggcaaatggcggaatcggtattcttccctggaaagaacctttctcagtgcgacaggtgatactgaatcatgtgttcgatacggatggccctcagggggtaagccgcgtgttgaaaggaatcaatccttttctgatgtcgatggatgtagatggaaaagaggtgaatacggaatgtatcacaaactggaagcagtgtgttgatatgaaagaagcaactcataacagtagtttccgggcagccgggaaagttgatgtgggttatagcatttgcgctttaagaaatatgccttatgcggggcttatccgtgtggatgtgaaagctttgtccgatgtatccctgaaagttgctgcccggatggatattccccaagaatacagtcagccgacacagcgcttccggaaaatgagggcggatgatacacaaatgtatatgctgcaatcttatgctgtatctgctcatcggcaacaaaaagtttccgcttcttccgcttttatttttaataagggaacagcacaggaacctctttatgatgaagtgactaaagagatgtctttcgtactgaatctgaagaaaggagagcaaatctcttttgctttggtgggttctgtgtgctccgcccgtgactttagcgatccgtataatgaggctgaacggcaggtgatttatgctattcatgaaggtacaacttcgctgatggctgcacatcgtagtctttggaatgaattgtgggaaagcgatatcctgatagaaggggatgacgaagcacaacgggcggttcggtttgcacttttcaacctttattcttcttgcagggaaggaagcggattgagcatctcgcccatgggactttcttcgcaaggttacaatggacatatattctgggattcggaactttggatgtttcccccgatgctgttgctgaataagggaattgccgaatctatgatcgattatcgtattgaccgcttgatggctgcccgcaagaaagcaatggcatacggtttcaagggagctatgtttccttgggagagtgatgattacggggaagaatcgactcctacttttgctttgacaggtcctctggaacatcatatcactgcggacatcagcattgcctgctggaattattattgccttacccgtgacggacagtggctgcggacgaaagcatttccgctgatgaaagcggttgctgacttttgggtaagccgtgtgacgcgtaatgatgacggttcttactccatttgcaatgtagtgggagccgatgaatatgcaaatggggtggatgataatgctttcacgaacggtgcggctatccgggctttggaatatgcttgtgaggcggcaaggatatgtaatgagcctgttccggaaatatgggaagaagtgggcaagggcatccgtattcttcgttttaaagatggagtcactcgtgagcatgccacatacaacggtgagatgataaagcaggcggatgtgaatttattgggatatccattgtattttgtcggggatgctgaatcgcaaaagaaggatatggaatattatgtcgataagattgatccgcagaatggtccggccatgtcctattccgtattctgtgtgcagtatgcccggatgggggatgcgaagcgtgcctatgagatgttctgccgttgctatcagccgaacttgcgtgctcctttcggtgtattggcggaaacgcccaccagtgataatccttactttatgacgggagcaggcggattgctgcaagctgttataaatggcttctgtggattgcagataacggatggcggtgtggagcaattatcttccgtacttcctgcacattggaaaaaggttacggtgaaaggcgtaggaccggagaaaaagatgtatgtacgtgagaggtaggaaacgtacgggcataaaaaaaggagtaccgctgtactccaacctttgttaaccttaaatctaatactatgaaaaacacagtgcaaatatacgtactttcgggataactgcaaattatccaaataaaaaagtatgttctataacattaattaaaaatatagacttaatcttatatctttgttaacctttagcctcctgatacataaaccgtttaatagattttttggctgtcttttcaaactcctcaaaatgtatctttacctttgatatctggcaataagccggtaattgctggttaagttcgttacggttagcttccatcatacgctctacatccgtttgttgcagtccattggcaaatgcatcgtcaaagtccggataaatcagtgctaccagtttttctttttgcaacacaatgagcgactcggaaacataaggcatattattcagtttgctttcaatctcttccgggtagatgttttgtccgctggaagtgagcaacatattcttgctacgcccgcgcacagttacataaccttccgcatccattgtgcctaaatcgcctgtatgcagccagccatttacgtcaatgatttgtgaggttgcttcctggttcttataatatcccagcatcaggttggtaccccgacaaatgatttctcccgccaccttttccggatcagacgaatcgatcttcacttccatgcgtgtggttgccttaccgcatgatgccaacttcagggtttcccagcggctggaacagatgataggaccacattccgtcataccgtaagcgatggtgtaggggaagcctatctgtttgaggaagcgctcgacttctgcattgaacggggctccgccgatgattatttcatcgaagttaccaccgaatatttccattgcttcttttcgtgcaagagccctgatcttgtcattgatgataggaagacgaagcagcaacttacctattttattatctacacggggcagaatattcttcttgataatcttttctacaatcagaggcacgcatgagatgacgcgtggtttgatttcagcgaaagactgtgcgatgattttaggggtcggcatgcgagtgaggaagtagaggtgtgccccggctgaaaaaccgtagaggaaatcataagtcattccaaacacatgtcccataggaagcatggcaaccatattatcgcccggtttcaccggaagcatctcatggcagtaattcacgttggaccaaaggctgcgataggggagcataacacctttggaatatccggtagtaccggaggtatagttaatgatggcaagttcttccggttcatccttccgatagcagatgtgttcgggacggaagtttttaggatagcgttgtccgtagagagtattgcggtgctcgaaagcttccatcaatcgtttgtctcgacagactacaggggtgaattcagtcatcagaataacgcccagcaattgcggcatggcgtcctcattcagattttcccacacttggtctcccacaaaaagcagtctggcttctgagtgattgacgatattatgtatattatccgctttaaattcgtgaaggataggcacaataacagctccataagtgatggttgccaggaaagtaactgcccagtgtgcactgttacgaccgcagacggcaattttatcacccggctggataccggcactttccagtacaatatggaattttgcaatcttgcgagccacgtctttatattggagagtagcacctttatagtcagtcaaggcgtttaagttccagttccgaatgatgctttgttcaatgtaatcaatgaagtgttgttcctgttccatctgttaaatttgcacactttagttaaaactgcgcaaatatagagctaaatgtgatgtcgtgcaagtttatatatttattctttggcgggaggcgaaagaaaaagaaaaaataaccaattgtactttcttttgccttgatgcaaaagaaagataccaaagaaaaaatcaaggctgcacttccggggctactccgaaagtattttcagctaaagggcaggaactcgcttcgctcaaacagcctgcccttcttaacgccgaaaacactttctacgcttaacgcccctacagtgaggccgggagaccattcggtgtaaatgggggaatatcgcgcagcactctaccgcgcagccttcgggcataggcgtaggtgcgttaggcggagatattgtcaggcgcaggtaaggggcgatctgtttgagcgtagcgagttcgagccccgtctgcgcatggcagtatcggagtagcaccgtagacgtagcccgtgccctttctttttggtatctttttctttcgggcaaacgaaagaaaaagtacacacatattaatcactactcttcttatccgaaatcagcaacaacttatcccccaaatgtaatttcagcgatccgttcggtatcaggaactccgtgcctcgtttcacaatcattacgagtgctccattaggcagagtgatatccttcagggtatcgccttcttccagcatctccgtggtaacggtcatatcactgagatcactgtctatttcttcgggcaattccacaccgaattcattaccggtcttctccagtggagtagaaagtttcagtaagcgggcagctaaggaaacggtagtaccttggataacgagagaaacaatcgtgataaagaatacgatattgaagatcacgtcggcacccggtacttgcgctactaccggataagtggcgaagatgataggcactgctccgcgcaaacctacccaggaaacgaagagtcgcgaacggtttgtaatcttcttaccgaaaggcagcaagcagaggaagacactgagcggacgaccaataacaatcataaatacaccgataagcgttgctaccaaagcgatatcgagtaattcgtgaggatttaccaacaaaccgaggcaaaggaacatgatgatttggaacagccaagtcaatccatccatgaaggtataaatctctttgcgatgcattatcttgttgttacctaccataataccggcaatgtaaacggcgaggtaaccatttcctttcagaagatcggtaatggcgaaagtgaaaaatacaaatgcaagcagaaggatgggataaagggcctgattatcaatgttaagtttattcagcatgaggatggcaagtttgccgagaaggtatccggcagccgcacctactataaattggataacgaatgaaccgaagatacctgcaatacccattccaccggattgtatgaactgtatcagcacgatggtaagcatgtaagccatggggtcattactaccactttcgagctccagcatgggacgaaggttatgtttcagattcattttctgcgaacgcaagatggcaaatacagaagcggaatcagtagatgacatggtggaggcaagtagtagggatgtagtgataggaagataaatatttgaccaactcataccggagatccaccagatgaagaatcctgtaaagacggcagtaagcagtacgccgaatgtggaaaggacaatacccggaacaagaatcggtttaatttcgctgaatttagtatccataccgccggaaaacaaaataacgctaagagcaaccataccaataaattgtgcttctttagcgttatgaaactgtagtccgaaaccatcgctaccgaaaatcatgccgacgacaaggaacagtaacagggcagggactccgaatctatagccggtcttaccgacaataatactaatgaaaagtaagatagaaccaattaaaagaatgttttctgctgtaaaaatcataaattaggtattatttaagttgtttattcaaggatttagttatcgcaaagcgaagttacgtctatttttaaacaattgcaaggtgtaaaatgttcagattgaattttactttcttttcatataatccttcattacaaattttcttaattgaattttagcacaaacatggtttcctttccgggatgcagggaaaggctgccacctgacaggcgcataatttgacgggaaatactcaaaccgatgccgctgccaccttcttttgtggtgaagaaaggtatgaaaatgtgttctgctacttcaggaggaatggcaggaccgttattggacacttcgatgagcacggcttcattttcattgcaataagcgtttaaggtgatgatgccttctggaatttctgctgcttcgatggcctgaatggcatttttcaataagttgatgagtacctgtgagataaggttctcatctgcataaagaataagatcatccggagtgatgtgggagtggaaagtgatatgtgaatcaggatattgatgccgtgccagttccaccatgcgattgataaaacctttgacgtagaacaaggaaggttccggtttggggatacgggtgaaacggcggtaattttctacaaaagagagaagtcctttgcccgtggtgctgatggtatgcaggccattgcggatttcgtcagcagtttctttgttggaagagatggattcacttttcgcttttaattctttgcttccttgtatcagcgtcagcaatgtatcgctcagtgaagtgataggagtgacggaattcataatttcatgtgtcagtacacgggtcaggcgtatccaggagtcgatttccttttcatccagttcgttattaatatcgttcagggcaaggatacggaaatgctcctgacggatggttatgtcggagacacggatggagaggttgactgtgccgcgttcgttggacaggcgggtttgcaacttgtctccggggcggcaatgggcgaaaagtcccataagatttgcatcaatacggttaagttggctgacatgggtgaagacttccaggcctaacaggcggagggcttcgttatttttctggtaaacagcacctgcatcgttcagtaccaggataccggtattgatgcagtcgagaatgagttcgtaatacttttcctgttgtgccgtttcgctctttacattatataatatagaagcaacacggttcagggcctggtttacaatatggttgtccggaatatcttcgtgttcggagaaatggatggatgcatcgttgttttcaatggcatcgagcagaaacagaaccttctgtgtatgccggcgatacagtttccattgccagcgcagactcgtcaaaagcagtatggaagagatgacgatccatagaaggtctttataaataatggataccgtgacagctcccgccaacaggagagagatgacgatacggaaaaggtagcggtcggtgatgtatcggtagtaatgtttcataatccgaactttttcattttgttatagagagtctgccgggtgatgccgagttgtgcagcaacagcggatagattgccgttacaggtatccagagctttctgtatcattttccgttccatttcttcaagggtggctgcttctgtactggcatcgcttccggtgcgtgaggtttcgggacgcttaggcaactggaacagttccgccggtagttcgttaccatcgcagataattactgctttctctatggcatgctccagttcgcggatatttccgtaccaaggatgtgttttcaatttggtacaggcagcatcggaaagccgtaataatgctttgtcatattgcttgcagaagcgtgttataaagcgttcggcaagaggaagaatgtcttccggccgttcgcgcaaaggcggaatttcaagatggatagtattgatgcggtaaagcaaatcttcacggaattcattgcgttgtaccatctcgttcaagttgcggttggtggcacaaatcagacggatgtcgacagcgataggctggttgctgcctacacggacaatactgcggcgttgcaatacggtcagtagtttggcttgcaggtgatagggtaaattgccgatttcatcgagaaacaatgtgctatggtctgctgtttcgaacttaccgggacggtcagcgtatgcatctgtaaaagagccttttgtatgtccgaaaagctcactttcaaagaggctttcggcgatggctcccatgtctacggcaatcatttccttcgtacggcgggaagaaagtgcatgaatttcacgtgccagcatctcttttcccgtaccgttttctccggtgataaggatatttgcatcggttatggcgactttctccaccagcgagcgcagttgctgcatgatgggactttctccccaatacatggcaggggttacaggagaggcattttttccattattcttattatgaatggcttgggctgcattcagtaaggtttccaccagcttttgattatcccatggcttgacaataaagtctgtagccccttctttaatgccacgcacggcaagatcgacatctccataagcagtgaaaagaaccacaggcaaggagggacgaaggcgtttgatctcctgcaaccagaatagtccttcgtttccggtattgatgcctgatgtaaagttcatgtcaagtaacaccaccgatggagtttcttcacgcaacacagaggtaagtgtgacaggtgaagtgagcgtgatgatcttttcgaaatggggtttcaacagcagttgcacagcggtgagcacaccgcggttatcatcgacaatgaggatatttccgggctttttcatacgagagtttcttttgagggagtaaagataatgcaaatcgaaggtataactttcatgcttgcatgaaaaagttatgttgagatgcagcttatcttctgtaaagataaggaagttcagtgaaaaaaatgaaagatacttgtcatattttctacatatcggcgtaatacgaataactgacctttgcctgcaactaaaaatacagacactatgagattacgtactttttattctaccattctattatggctgaaccgtatttataatgtgtatcgtgcccggcatggacaaccttattattctttgtcacaagcgattaaacaaaaagtaaaatccgctgtttcttatatttccgattttgaggaggaactggtgaagtttgcccgtacacgtaaatgcgacggtatcatttgcgggcacattcatcatccggcaaatacttattatgatgatatacactaccttaactccggtgactgggtggaaactctttcagcactcgtagaggatgaggaggggaattgggaagtgttacggtatgaggatatgctgatgaatgaaaagtctgaagagcgcctctgtagttaaaatcgtgaattataaatcgtaaattactaaattataaatataaagatgaaagttctttttattgttcaaggagagggccgcggtcatctgacgcaagccatcacgctggaagaaattctacggcgcaacgggcacgaggtagtagaagtactggtgggaaagagtaatacccgtcgcctgccgggtttcttcaaccgcagcatacaggcacctgtgaaacgctttctcagtccgaactttctgcctacacctgccaataagcgggtcagtatgtctcgcagtatcgcatataatctgatgcaggttcctgcttatctgcgtagcatctgttatattcaccggcgtatccatgaagctgatgcggatctcgtaatcaacttttatgagttgttgacgggcttgacttatctctttttccgtccctcggtaccgcagatcagtgttggccatcaatatcttttcctgcatcatgactttgagtttccccaaaagaatcccgtgagcctgctgatgctccgtttttttacgcgactcacgtgtatcggagccaaagagaagctggctctctcattccgtccgatggaaacggacgaagaagcacatatacgtgtggtaccgcctttgctgcggcgcgaagtgctttgttgtgaagctgcttccggagagtatgtacacggctatatggttaatgccggatttggagaaagtatctcccagtggcatgagcagcaccctgaagtgcctttgcacttcttctgggacaaaccggatgaaccggaagtatgcaggatggatgaaacattgtcatttcatcagttggatgacgaaaaattccttcgctatatgtcgagttgccgggcgtatgccactacggcaggctttgaatccgtttgtgaggctatgtatctgggtaagcctttgttgatggtaccggcgcacatcgaacaggattgtaatgcttatgatgcagcacgcggcggagcaggtattatttccgataattttgaggtagaccgtttattggaattcgctcggagtgagtatcaacccgaagagaacttccgtagctgggtgcgcagttgtgagtggcggttgctgaactgtatagaaacagcggaaggaataggctttgtaaatgattataaattgatatatgaataagaaaatagcctgtatgaaaataaagaaggggaaaactaacttccccctctctttccttttgcttttgctgccgcttgggtagcgatggtttctgtttcttctgtttgctcttcggtgttcttttccgcttctttttgttccatttcccgtctcagtcttttcaacctccacttattccagaacataagctctttccatcggttgaagtccttcttgaaaatgataccgatgccttgcgttgtcagattggtccttgtataatatcggtcgttcgtctcattatacgctttcaggcgaatatctccgctacggttcacaagccattctgcttcaaagtctcctacaaagttcgtatttgccatcggattgtctcggtatccgaagttaccattgataagcagacgattgttcagtaattgccccgatagcattccttcgaattccatatccgtccagcctttttctccggtgctgaggttggtacctatattccagttgttactattaataatgttggaaagtgcattatttagttgtcccgaaagggtggatgaaagcacagaagtcatcatattcgagttttgtgtggcatctacattttcgggtgtatagaatttgccgatacctaacagatagaggatctgcatattcatttgttcgtccgttgaaatgtagttacggataagggcttgcacttcatcccgttcattaggcacttccagacttaatttgatgtccggagaagttagttgccccgtcaggttcatgatacagtttacacggatactcgttggaattccgtagttgcttacattcggtaccaagtcattcaaggatgcggaattcaccatataacttgcttggatatccatggtggcatccaacggaggaccgttgaaactgatagtacttccatctttgatggtaaagtccttgcgtattacctcttgcaggctgaatttataaactccctggctgatacgataattaccgaacatcttcacatcgtcagccttgttataaaattccgtacggatatttccggatcctcgtccactgatgtaatcaccggcgatggggtccatcactatcttcatgcttgcatccggtgtagcttctacgagcaggttcaggcggatatccgtgtcactttcttcctcctgctgtatctcttgttgtgccagttcatagtcggaaatcagattgatagaatccagcacagcccggcgcggtgtcttatccacgaatttgatgaattggttgctggcggctgaagatacattatcctttatatatacgaagttggtattccggttggtcgtcatggctacatcgatattgactccatcccttgcgttacctgctatcagggcattccccgttccgtataccgttccataaaaaggaaaatccagtgactccttcgtattcattaccagcatgttgttcactccaaactggaaacggtattccaggttcttgaaatgctcataatgcagataaccgtctacatgtccttgattgccttgtgtatcgaatatccggttatcttggaaagtcagtccattcggttctatgcgaatactgtcttttataaagaaagtggtattcagtacgtctaccttcatggaggcattgccaagtacgcgcccttccatggtgagccctttgaatttgccatagaaatgtacgtgaccgctggcacgtccgttaaattcaggtgtgatactactcatgtagtgttctatgaatttcagattggtgttgtcagcttcaatctgtaagtcaagcgcacttttaggttttatgggatatatgtagccatatacatgacttttagctgtatctttttcatggatatgggcatcgagatagataccttctacttcctgatgccattctccgtgaatgttggcatcgcccaataaaccgtcatttagtccaaggccccggatgaaaaggtcagtatacataacaggcttctccaatactccgctggcataggcaggaccagtagcttctcctttaaaattaactccaaggtcggcaatatcaaatacgtagcctatattgatatcttttaaatccaggcgtaccgtatcctgaggttgttttgagatagttccgttgatgcgcaggtatcggtctttatggctgaaataaaagtcgtctatatatatctttccggagtcgattaccacttttgacggatgtatttcccataaagtgtcattcaggataatatccgttttttgaacatcgacgacggttttcaaagccggaatactcttgtttgagtgggaacgctttttgttctgatcctcagcttgtgtgcggatgaaatgtgtagcagcagctaatttgccactatatgtgacagcgctactgtttccccaattcagagaggtctgaataaggtcatctttggcttgtgcgtctaacgatacgttgatggaaccttccggtttgcgattactgaatcgtacacgtgcatgaaatttatcaccgggattctcacacaagatcatacccgattcaaggaacttgtctccatagcgcagacgcgggaaatatccttctactcgcaggcgctgtgctttgtcattaaagtatccttttagggtagaatgtgtatagaccttaaccggaatattaaagatggtggagaataaatccgtattaaagatatttatgtcgaaatggaagttattctcactttctatgttttttttgtccggcaatattagagcaggaatatatcttcgcatgatgttcagtacactggcgggtagtgtgcgataggaataatctccttcaatacttgcattcaggaaattagaggttatttttaattgtttatgcgattcgtcttcctgagtggcggttatttttaagttgtccagaaaatagtttctatcgggtgctgtgaattgcaggctgtcaatattgatctctccattcatttcatcgatggaaccaccggtgaaatcagccgttaactgaacagagactgccgtatcttcatatttaggtgtcaggtgaagctcgtgggggcgtacattacggatattggcatggaaattaaaagtcggtacacgactggctgtattaatgctaccatttagcagaacagaaccgttttcgtcatccaatgctatctctccgttgaaaccgccttgtttatattctccgtcgagtgtgatgttttcatagttataatcgctatagtcgatggaagcgattaatcccttcattactatggaaggatattgcttttcgtagtgattgccttcgaccttgagattgaatgtgacctttcctaactggtcgtttgccagcatattgcctagctcaaactcttcagtctttactgcacccgaataagaaaaataacctttttctttatttgaacttaattttaagtcggtcttgatagaacctatatcggtacgcactaggccataagttacaatatctgtgaaatatcccgagacttccccattaaacgagatggtgcctaagcgttgcagtaccggaggaacaccttcgtagtttttacttaaattgcgaacgaaaaatgcaatgccttccggatcagcatataaactggaaaggttgccgaatacgaatgcatcctgaggatgcgacaggtcttgcaaggaaacatctccccttaaatgaaaatgttggtttcctgtaattgacagatgaggacaattcaactgattgatagtaccgttagcttccaaagccacttgcaaattttccttgaaaggggaaaaggccggaacaaagggggcgaggtcacaaagagtaatgtccgaaggaaatatccgcaaggaaaagcgtacatcattggtaaagtttctaaaagctcccaagctgtcatattccatatggatggtatccattgcaagcgaagtatttggtaaatcaatcgcgaagttctcaatgctcatcttctgattgtttgctacaatcttgaaacttagtttttttaactcaaaaccggaattttcttcttcaatgcttaggcgcttcacagctgcattgacagagtcattttggagcgctttcaacgagatattggcgatgatgtttcgtagctgtatatgttgtgcattgaattttccgggtgtctcttctgccgacaatacgttataagacatcttaccgcgtcgtatcagcaacgagttgatacgtatgtccagattactttcctttttgatggtatctttagaggcaaatgcattgagtacgaactggaagttaggaatgtcttctggtgtctttttttccaggttgatgttgaagccgaataactgtacgttactgatcgatactttgcccttgaacaagggaagtatatcgaattttgcagaaaggcgggatacttttagcatttctttgcctgactggtcgtttaacaataagtcgtcaataataatgcggttcagtagtcccatattgatccgcccaatggttagttgtgtacccagtacattagccagttcgttcgcaacgagcacagatatttgtcgctgaacgtaaggaatgttcaacaataatatagtcccgatatacaaactaagtataataccgagcacccagcgaactgtcttctttaactttctgataggcggtttgtttgaattagccaacaaaaatatgaaataatacgttatcaatcctacttttatcactacttttgcagcgtttaaacgtaaataacgatatgagtacaataattttaggaatagaaagctcttgtgacgacacctctgctgccgtcatcaaagatgggtatctgttatcgaatgtcgtttccagtcaggcggtgcatgaggcctatggcggtgtggttcccgaattagcttcacgtgcacatcagcaaaacatcgttccagtggttcatgaagcattaaaacgtgccggagtaactaaagaagaattgagtgcggtggcgtttacaaggggaccggggttgatgggttctttgttggtgggcgtgtcgtttgccaaaggttttgcccgttccttaggtgttccaatgattgatgttaatcacttgactggacatgtgttagctcattttattaaagcagaaggtgaggatactattcaacctgaatttcctttcctttgcttgcttgtatcagggggaaattcacagattatcctggtaaaggcatacaatgacatggagattttgggccagacaattgatgatgctgcaggggaagctattgataaatgttcgaaagtgatggggctgggatatcccggtggtccgattattgataaactggctcgccagggcaatccgaaggcttttactttcagtaaacctcatattcccggattagattatagtttcagtggtttgaaaacctcatttttgtattctttgcgtgattggatgaaggaagatcctgatttcatcgaacatcataaggttgatctggctgcttcacttgaagctactgttgtagatattctgatggacaaacttcgtaaggctgcaaaggaatataagattaagcaagtagccgtggctggtggggtttctgctaataacggcctgcgtaatgctttccgtgaacatgctgaaaagtatggatggaggatatttatccctaaattcagctatacaacggataatgctgccatgattgccattactggttattttaaatatcaggataaggatttctgttcgatagatgcgccggcttattcgcgtgtcacattgaagtgaaaggagttttagaacatttctttgtccgcatcgcacccggtccgtgtctgggccgtacctgctccgtatctgctccaaagctatagatacggagcaaatacggtccggacacggttcgggtaatatcagcaggaaaaatagaacaaaaatataaattatatataataaggtatatgaaactggaagaagaagtcggtgaattactaaaatcgaagaatttatccctttccaccgcagaaagttgtacaggaggaggtgttgctgctttagtgacttctgttccgggaagttcggaatacttcaatgggggaattgtggcttattccaatgaggtaaagatatctctgcttcatgtttctgctgaaacattggaaaggtatggagccgtcagtcaggaaacagtgattgaaatggtgaaaggtgcgatgaaagcgttgaaaacagattgtgctgttgccacatccgggattgccggtccgggaggaggtacatccgaaaaacctgtcggaacagtgtggattgcggctgcctataaaaatgaaattgtaactttcaaacaagagggggatgacggaagaaccaggaatgtgcaaaatgctattcagaatgctttaaagatgctc

SEQ ID NO: 6329 - DNA, 854 bp, Unknown
  gut microbiota DNA sequence
tttaatacttacttttcattcatcaatatattcccacggataaggattatctaccacattctgaaactcttcaatagcttcttgctgttcaacagtaagtgatgtggaatcccaggaagcaatgataatacggccttcatcagccaaaggctcatcaaacacctcgccatagcaggcagtgagcagacgaagtttcagtaacgaagcgggaagagtatcaagaatatcccaacaacgatctaagacctcctggatatgcttttgtttttcaccgtgatctacaaatgaggcactatagcccatcagaagagcgagacaaacattagcctgttcttcaactgtagaacctttgaaaccggaattatacaaagtcgtagtcaggcgataaacttcaccgttacgacgggaaaggtcgtcgctatagaccggattcccgtccatacctaaatacatcagatcgtgcgctgcacgctgaagagcaagtgtttcttcagaaagagacataatgatttatgatttataatttgtgatttatcagctgttcaatggcaacggctgatcgtcaattatttgattacttctataagatccggatgaatcgtagcaagcgcaacggcaataacaccttgtatctcgataaccacacgacggtcacgagcacctttcactttcagaaagataccttcctgtccttcgaagtcaccgcccgtgatacgtacttttgtacctttggacaaattcaactcatcaggttggaagtacataagatggtcattgtaagtaccagctactgcaataaagcgttgcatctcactgtcggagataatgattttctgaccgctacgggtatccgt

SEQ ID NO: 6330 - DNA, 36313 bp, Unknown
  gut microbiota DNA sequence
acaattaaatcattaaataatttacttatatacaacattttaatcttttctataagaatgattatttcagaatcggtcgtaaagaaatggtgtacacctttgatagtagtaccatcaagctttgtttgaacctatcttcaaagaaaagattgtaatatttttttacagcattaattattatagaacaatgtcattgagcaatcatatttttaagtccatttaaagattacatagttgacaaaactcgcaatattttgcatagtccaatttttcgttcaaaaacagagggaagttttacacagcaagaaattaagagtttgtctacaaggagttaacttcttgcaggtttgaaaaatactgtttataaaatcctgaatatcaaatagtacaaatctactaagaattctgcctattttactacgatttttcttaaatgctgatgcataaataatagacaattcaacaataaaccggaaaaactaacgtttattggcataagagagttatttttgcaaccaatcaaactataaaaatattaaagtatacgatgaagattaaaacgctgatacctgccctttcacttctaatattagtgtcgtgcaaaacaacgaacgactcaattgcatatttccaagatctagataatttggctgcatattccggagatagcattaattatgcccctaaaatagtgcctgatgacgaattgtctattactatatcaggagtggatcctaatgctgtggctgtattcaatatgcctttgtccagctatatgacacccggtgagaccaatgtaaccatgacacctgtactacatacatacttggtagattctcatggtaaaattgacttccctgtgcttggcaaaatctctgtagcaggaatgactcgtagtgagttgacggatctgatgactgataaactggctacttatgtaaaagatccgattgtaacagttcaaatacgcaattttaaagtttcggttctgggcgaagtaactaaacctggtacggtcagtgtccccaatgaacgtctatctattcttgatgctattggtatggcaggagatctaaccatttatggtaatcgtaaaaatgtattacttatacgtgataacggaggtaaaaaggaatatcatcgttttgacctcacttctatagaatctctgaattcaccttattactatttacaacaaaacgatgtgctttatgtagaacctaacaaggcccgaaaaggtaatgccaaatatagccaaaaccaacaattcaatatatcattagcttctactataatcagcgccatttctgtcttggcatcattaggaatcgcattattggtaaaataaaatcactgttatgtctcaacaaaaccaattgaatgatatcgggaaactaaaagaaattttagtattctatttgagaagatggaaaatattcctagtcagtctcatcgtatgtatcagcattgctatattgtatatatatataaccaaacctgtttatttggtaacagcaaacatccttgtggaagaaaaagaaagtagcccaatgaatcagatgcagtcgatgatgaaaggattttctttaaccgacgttttcggaggaaattccagcatacataatgaaatagaactgattcgttccttctctatgtttcgccgtgtagttaagagtttaaatctgaatgaaaagtatagttccggtgaatggatatttccaatatcttattataagaacagtcctgtggttattactcctataaatgatattgcggacaccctcactgcgactttaaaattcaaaatcaaaagttcaggaaaaaatgtaaaagtaaaaatgtccaagggatttaaaaccttacatgaggagactttttcgttacctttcattatgcaaacttcttatggagattttaagatagagacaacccagttttataaccctaacaaagaaatcaatgtaaaagtcagtttttccggatatgattatgccaccgaaatgctacaaaaagaagtagaggtggattttgcgactaaaaaggccaacatcatcaatatgcaacttaaagaaaaaaacatcaagaaaggaaaagatgtcctgaacgaattgattgcttcttataatacctccagcaaagaacgccgaaatgctctggcaggcaatatggtactctttctggatgagcgtattaatcttatatcaaaagaactggtagaaatagaaaaacaaatagaaagctataagaaagaaaattctctgactgacattgaggcggaagctaaaattatactagataaaagtactaatttcaaagaacggttgattgaagcagaaactcaatataccgttattgagttagtggaggaatttttgctgaaaccagaaaaccgtttctcactggttcctttaaatatcggactgaatgaccgtaccgttttagagggacttcaaaaatacaacgaagcgctattggaacgtttaagattattaaaaacaacccagggaaatactccaaccctcgatatcatgaacgaacagatagatgcaatgcatgacaatatgttggcaactatccggagtttgaagtccggtttcagccatgctaaggaaaacttgcaagaacaaggagattatttcatggctcgtattaaaggcatgcctacacaagaaagggagtttattgatatcaagcgccaacagatgatcaagcaggaattatttgtattcctgttgcagaaaaaagaagaaaatgcattgtctatggctgtaactactcctaaagctgaaattgtagataaagcctatactttacagacgcctgtcagcccacgccccatgagactgttggcttttgctatgagtattgcaattataggagcaggttgttacatcaaagttagatattagaagagcttggaaatgttgcaaaaagaacagttaggattatgtccggaggattttgttcttccggtctctttcttattatccatgtccttgttaggtctggagtttccttttgcatatatattagtcttcatcgtcctgtatctctcactgatagtaaacaagtatgatttcctgttacaaagtacgatcttatttggagtatttggtttctatgatgagaatgtgacttttcccattaagatgcacgatttgctattcatcgtatatatagccggattctttatttattggaagaagaaaaacatcagtaaactgctgatattgatttcagcatatatattgttcttgatttttgttgcaatgctgagtgacgaaaccttgattgtacaaataagaaggctaagattatatatgcatattctttattttctctttcctttgttggttttcagaaatcatgatttcgaaatcgataagttcttcaaaaagctgttcatttatgtgctaattatcagtagcttctacattctggattctttagtattcagtagtaatatcctagtaccgcgtacaacatggggagatctgacctatacgactttagagatgaatctgtttggtgaatttctcagaatatatcctccgggaatgtattttgtggcactacttttatttcctatgctttatctctataaaactcccttaaaatatatattgatcatagcactgggattaatttgtacgaaaacattcagtgtcataggaggagtcttgattaccatcttctgcttttatggtacatggaagaagaaaatcatatatttggtaatcggatctgtgatgttggccgccggatatgtattagacggacaaatgaatggagcattgcgtgttcaacatctggtaggtcagtttacctcctttgcatcttatcgttctgtagaagatgctatgagtgacatggacaatctggctgaattcggttctgacagaggtgcacagatcattcctaaaatagaattgctcacttctacacaaaagctcatgcttgggtttgggtttctccataacgagttaacaaccaatgatgattacatcatccataatgaatattactctgatcaatcggcagccgaagaggtagcctctttagtagaggttacacaagtccagactatacttgatacaggactcattggtttttgtgtgcaacatttattctatattgccatttactttttccttcgaaaatataagtatagcaatttgtatcttgtaactcttgtttgcatctctatttttggtgtcggaggattcgccggtctgaatattccacatggacttttattattaggactggctttgggatgtgttttacttgcgaataaagaaatctggaatgttaagtcgtctgtttctatatgaaagccaagatagagtcatataaaagtggagctatatattctgcgggattaagcgttgtagtaaaattcatcgcttttttccagaacttcctgatcgcttattatctgggagccggaacggggacggatatttatttttatatgttcggaggcatgatagctgcttgtgaaattcttcaaagcatcacttcttccatactgattccccgctccatgttattaaggaatcaagactcatttcatactgaaaacgcatatttgaatgcttttttatataccattctctcgatagcaattatcattataggcattatactgataaatgggaaagaatgcctgttattgctttccaatttttcggcacaggatattgatatacatttgccgttattatatattttactacctgcctccataccttatataatcaatgttgtatatgtagaagttttggcatcttataagtattttatttttccacaaatcattactgtaatcaataacatattcattattcttttcatagttttatttcatgcttcactcggcgttttttcattggcggtcggttttggtattgcaactataataaactttttatggctggtcatttttatcaaacgtaatctatcatggagttattcatgtttttcatttacacatctgaaagatagtttcagtgatatatgtgtcaagcttgtaaatgattctacaatggcattcacgactatgtttccgatgtacctcctttccatgttctatccgggaactattacagtgataacttatgccaacaaactattacaagcaccaatgattttgttagttcagctttttgctgttttacaaataaaactgagtgagttgtattccaaacatctcggacgggaaatgaagcgtacttatatggaaatcggagggaagtcaatacttttaagtttgattggcgctattttcttttttattcttcgcagacctattgtagaaatatgctttggcaatggagccatgacacctgaaaatattgaagtatttattgaagtactgggcatacttattatcagtatcccattttctattatcactgctgtatcaacacgcatgttattcgttatgcgtaaaataaaaacatatacacttctgatgatcccctgcagcataattacgtgcgttttgtactattggttaattgagcaaaaaggtgtgaatggttatgctgtggcagatgtttcaatggaagttgttaaatcagtaatgctgttgggatgtactctcctgctactgagaaaaataaaatgcaaatatgaaaattagtattattacaccggtatataacagggaagactgcattagtagatgtatagagagtgtagcaattcaggctgaaggagtagaacactggattgtgaacgatggttccaccgatgctacattatctatagtacgacagtttgccgataagtatccgcatattcatttattaacatacgaatgtaatgccggagtaggagcagcacgaaatgccgccatacaaaaatgtgccggagactatatcctttttgtggatagcgatgactatcttgctgaaaatgcgattgcttttatccgaacaactataaaagaatctccctcttatcttcattatttatttgcgacaaatggacgtatgcctttttatgagacctatcacctattagagcaaaaacaaactgtactaacctattttgactggttaagaggcaaggttggtggtgattttgtacatgttatgaatcgtggtatgttgcaaaaattcccttttaatgaagaattacgaatttatgaagaaactaattttctaaaactgcaccgctattcaaaagagcagttattcactaaccaaattatagtctatacggaactgaacagacaagattctgtatctttacagtataggttaaacaattcacgcgctatacgtttggaatacatagcattgcaaaacattatatatgatttttatgatgattatgtagctgccggagcattagcgcaaatacatgaacgcatcaggaaatatcgttttctggcaatagctgtcaatgattatagagatgacgagttaatgccaaagaaccagttattacaggttttcaaaatattaaagctgggatatttgatgcgtatgtttattattattcattctcatataaaatatatgtttaagaaatgagaatcttacatctgatatactcattaaatgtaggcggtgctgaacgcatggtgattactctcgctaattatcaagtgcaaagtaatcaagtaggattatgcattatcaataatctatattctcaaaagttattgaacgaattagatagtagaatacaagtgttccgtatcaatcgtaaaaaagcaagtcgtaatattctggacgtatttcaattgaacagatatgtctttaagttccgtccggatatacttcatatccatgattcggatgctatcctttatatacccattcgctctttttaccatacgatattgactattcatgcaatgaatttgccattaaaagggtacaagctttataatcagacagtggcaatttccaaagctgtggccgataatactgaaaatcgaggactttgtagaccggaagtaatatacaatggaatttcaacttctgcaatccagcgaacaaagaagaatatccccaatgctgaacaaaattttcgcattgtgcaagtaggcagattggaacatggtattaaaggacaagatttaatattaaaagctttacatagattatcttcttcccatattagtatagattttattggggatggcagttcttataactatctgaaagaagtaacccgacagctcaaactggagaaacaggtaaactttctaggtaattgtgatatagaatggatatatcatcatttatgtgattatcacttattggttcaaccatcaataagcgaaggatttggacttactattgctgaaggtatggctgcgggagtccctgtacttgtatctgacctgcccgctcctttagaaataatagacaaaggtaaacaaggttattatttcaggcacaacgatgtggatgatctctgtcggatgttacgttatataattaaacattatgaagaagctctgcaactttctgataaagcacagacatttgtaacagttaattttgattccaagctgatagcccaacaatatatcaatttatacaatgaatatatctataaaacacatacgaaataaacactcggaacattgcttcttcctactggctatagcagtcatcttatttcattttttcgtgctacgccatgaaacgatattgaaatatgacagcgataacaagattcttacgtatggattacgctcccttgctgatgcaataatactgttgttaccatattggattttgccagcaaaatatcgtcgttgtatctggataataattattttgttcacgatttggacactatcacaattatggtactttcgtacttacaatgatcttatgcctttctcttcattcactctgttctctaatatttctcctctactgattaaaagtataaaagcatctatacatacgattgactggagtataatcatatcaataatcctcttattgatcagtgactatatacttttccgcaggaatgaaaataagtgggtaaaaggtaaaacaaaatatctatatatagtatctctcattacatttgtcatattggttcatatcgcaaatggttcggccttttatatgaaaggaaaaggcaaagtagataacatttgggaaagatacactaactccaatggttatgcttattatttcagtataaacggtttagttgccttagggatatattctattgttgaaaccacatgggaagcccaagagttaacggagcaggaaattactaaaatagaaaattacattgaaagccatggaaatcattatactgataactcttattcagttcctgaaagaaaaaatttaatccttattattatagagtcgctaaattcatgggtgataaatttcaaaatagacaatatagaaataacaccttatttaaatcaactttgttgtcagaataatagtatcatagctttaaaagtacaacctcaagtaaaagacggacgctcaagtgatgcacactttatgtataacacaggaatacttccattgagaaaaggggcagttgctatgcgatacggaaaaacatcctacccttcacttgcaaaagcattaagaaactatgtgactatagagtttatttgtgatgatgctaaattttggaatcaaactgtaactgcttccagttatggttttgaaaatctttatgatcggaattacatacctcataatggtgctgatgtagctaaagatggagaaatgtttcaattggcaactacagttttaaagacaacaaagcaacccttttacgctcaattggtaacactatctatgcaccaaccttatgataaacctattgttcctgctactgccatatcccagtcaaatcaatattctgccgaaataaagaattatttggaagccgttcattattgcgattctgaattagaaaaattcattagaaatttaaaggaagccgacttgtacgataattctgtcatagccattgtatctgatcacgatgaagtggataaaaatgtcatcgaacacagaaagagagtgcttcctgaagacaaggaagttgcattgattgtattgaataccccatatacaataaagtatcaagggaagttaggacaaattgatgtatatcctactttattagatataatgggggctaatcattatctttggaaagggataggacaaagtatatttcgtaagaatgaaaatgggcaaacgaactttgatgagatgtgggatatatcttctttattaattactaaaggatatttcaaagacaacaacatcaatgagatccctaattaatagtaaactaattcatttgcagttgataatagcttattgcataaaaatatgaaaagattaaagatacttatagtcagtaaattcttatatgcacgtggaggagcggaagtttatgccatgaatttgggagaaatgctgcaaaagcaaggacatgaagtctgtttcttttcaatgcatcatccgcagaatatccatgtaaatgaggataaatatttcgcaaaagaggtatctttctttcagccatcaatcagtggaaaaatcaatgcagctttacgtatcttcggaactggaataagacgaaattacgagaaaatattagatgattttcagccggatattgttcacctaaataatatacattcttatctttcacctatagttgccagattggcacataaaaaaggtattaaggtaatatggaccgttcatgattataagttgatatgtcctgcatattcttgcctctgtaatgggatgccttgtgaggcatgtttcacagacaaatccaaggttgtatcccgccgatgcatgaaaaatagttttcttgccagtcttctcgcctggagtgaagctgtatattggaataaagaaagactatctgaatggacagatgcttttatctgtcccagtaattttatagcacagaagatgatgaaaggaggttattcggcggataaacttcacgttatctgcaattttattaacgacgagaaagttaaattcatcatcgaatcaacgtcacaagaaagagaaagtgcttatgcatatatagggcgcctttcagaagaaaagggagttatagaattgctaaaagtcgcagatcgtttaccatataaactatatatagcgggaaacgggcctttagaaaatgaactgaaacgagtctattcatctaatcatatcaagttcctcggacatttatctgctatggaaattattggattattgaagagagtacaattttctatggttccttctatttgctatgaaaataatccactcagcgctatcgaatcattatgttgtggcactcccgtatgcggtaggcgtattggtggtattcctgaattattagaaaaagatgctgataatcgcctgttttctaatgaagtagagcttataacatctctttcggatatgtttatttcttcttcggaggtagatagacaaaaactatctttaacctcatgtgaacgcttttctgccgaactatattatcgaaaatggttggaagttgttcaaagcatttaaaatttagatatatttgtctttaagataaagaaatatgaaaattgtagtaacagggaccagaggcattcccggtatacaaggaggagtagaaacgcattgcgaagagctctatccattaattgcagataaacagcatgaaattattgttgttcgccgtccctattatgcagtggatcattctgtaaaagtatataaacaagttattataaaagatataagagtgctgcgtaacaagcatttggaagctttcatacatacttttttagccgtgttgtatgcacgcaaagtaaaagcgaatattgtacatattcacgcagtaggtccggcattaatgacccctttagtacgattattaggtatgaaagcggtaatcacccatcatggtccagattatgatcgtgataaatgggggaagtttgccaaatggatacttcgtatgggagaaaaaacaggaatgtactatgctaatcatatcatagttatttctgaacatatcagacgaatgattcaacagaaatatccagataagaaaaatataacactgatctacaatggaataaatccagtatttcctgcacgtagcactgaacatcttcaaagtctggatttgacagaatatggttatattttagcagtagggcgtcttgtgaaagagaaaggctttgataaactaattgaagccttcaaacaactatctccagtatctataaaattagtaatagccggggatgctgattatcaggatgaatatactcaaaagttaaaagaaatgtgtaaagggcagaagaacatacgcctggtaggctttatcaaaggagaaaaacttgcacaattatatacatacgcacggatatttgtattaccttccacgcatgaaggattgcctatcgcactacttgaagctatgagttataattgtccggtactggcaagtgatattcctgctaataaggaaataggattaccggaggaatgttacttcaaaagtggagatttatcctgtttgcaacaggctctgaagaaacaattggaaaatgctcagacagaacgagtttcttacaacttgtctgcatataactggaccaatatagccggacaaaccaaagaaatatataattctctaatattataaaacaatatagataacaatttaacgttctatatactaaagaattctgtattttaagaatgaatatacaatcttcaatatatacttttccgttgaaacggaaaagtaaccgtatactcaaacgaacacttgacatagtgttatcattgatagtcttgactacgatatatccagtggcatatatcatcatcgggtgttgcatcaaaataaagatgccgggtaagattatatttactcaaaagcgcaacggcttatatgggaaggtatttacatgttataagtttcgctccatgctgcccaatgttgaagccgatacgcaacaagcctacaatgaggatccacgtattactccattaggacatttcctgcgtgtcaccagtcttgatgagttaccacaattctggaatgtgcttaaaggagacatgtccgtagtggggccacgtcctcatatgctgatacatactgagcaatattgtgatatcattcctgaatacaataaaagacttattgtgaagccgggtatcacgggatgggcccagatacacaacctgcgcggtgaaacggagaagttggataaaatgaaaaaaagagtagaatatgatatatggtatatcgaacattggtcgttctcattagacctgaaaatcatgttcaacacaatgaaaattatattccgataaactcatgcgtataacctgtcacatacttacaatcctgttttgcttttctgcttcgtcagtaatgacagcgcaaagcggactgaagcatcagaacatttcatctttcgttgaatatggagcatctgtccataccggtgacaacactcctttgtggcaggtcagcaatcaacatggattatcctctattgacaataatacttatttaagaggtggagctttttatacagatacaatccgccagtggaggttggaaggaggactggatatggcggttgcatccggttttacatccacttttatattgcaacaggcttatgctgacatacgatataaatggttggggatactcattggtagtaaagaaattgactcacctttattaaatcagcaattaagtagtggcggactaacctggtcgggtaatgcaagacctattccacaagtatggataggacttcctgaatatgtgcaagtattaccacgcctcgctttaaaagcagaaatgtcgtacggatggtttactgataataaatatcagagaaagcaggtaggagaggattattggtatactaaaagcatcaaatatcaccataaaagcggattcctacgcattggagttccacagggtaagtggcaactagacctgggtatgagcttggatgtacagtttggtggatataaaagcgccggaatggatgcaggagatttgggaaatagttggaaagattatttcaaggtatttattcccagtcgtggagatgacagtagtcctgaaggagaacaaattgcctatcaaggtaattttatgggtagcgaacatatacggatgacttatcgtcatgaagatttttccatcagcgcttatctggagaattattacgatgatttcagtggaatgggaaaactcaacggatttgatggtttatgggggatcgaatacaaatctaaccataaacaggccatcaacggttttgtactggaatactatcagactactaaccagagcggtccaatgcatggagtggatttcaccgtagtagagaaaacgggaggtgccgacgattattataacaacgagtggtatcccggctgggtacactggggaatgactatggctaacccattgatagcttctcccatttataacaaagacggtgacatgagtttcaaatacaaccgtatccgagccttgcatttaggttggagcggagacatcagcaatgaatggacatacctcgcaaaactatcatataataaaacttggggaactcctttcaaacctatacctaatatattagaaaatttttctacttttgcatcagttttctatactccccataaatggaaaggatggcggttcaatgcatccattgctttcgatataggagagatatatggtgacaatttaggttgccagttgaaagtacaaaaaacattctgaaaaagatgaattacatacaaacggaaattgatggtgtatggctgatcgaaccgaaagttcttcgtgacgagcgtggctattttatggaagcctttaaagaagaggaattcaaaatgcatatcggtgatgtgcactttattcaggacaatgagtcgaagtcttccttcggtgtattacgtggattacattatcagaaaggagaatattgtcagtccaaactggtacgtgttataaaaggaaaagtactggatgtggcagtggatttgcgccaatcatcaccaactttcggtaaatatgtctctgcagaactgagtgaggaaaatcaacggcaatttttcattccccgtggattcgcacatggtttccttgttctgagtgaggaagctatctttatttataaagtagataatgcttatgttccacaagcagaagcatccattcgtttcaatgatgaaaccataggaattgagtggcctatagcagaagaacaacttttattatctcctaaagataaaacagctccatccttccgggatgcgacatattttgaataaagagtatgaagatagccatcgtcggtacaggatatgtcggtttagtgaccggaacctgttttgcagaaatcggtgtcagcgtcatttgcgtagacacgaacagtgaaaaaattgaagcgctcaagaaaggtgttattcctatctatgaaagtggtctggaagaaatggtgaaccgaaatgtaaaagccggtcgcctacatttcacaacttcattggagagctgcctgaatgaggtagacgttgttttcagtgccgttggtacgcctcctgacgaagatggaagtgctgatctcagttatgtgctcgaagttgcccgtaccattggtagaaacatgcagaagtacatattggtagtcacaaagagtacggttcctgtaggtactgcaaagaaagtacgtgccgctatccaggaggaactggataaacggggtgttagtattcaatttgatgtagcctctaatcccgaattcctgaaagaaggaaatgctatcaatgattttatgagcccggaccgtgtagtagtgggagtggagtccgaacgtgcaaagaaattgatgagtaagctttataaaccattcttgctgaacaatttccgtgtaatatttatggatatcccgtctgctgaaatgacgaagtatgcggctaactcaatgctggctacccgtattagttttatgaatgatatcgctaatctttgcgaactggtaggggcagatgtcaatatggtacgtagtggcatcggttcggatacccgaatcggacgtaagttcctttatccgggtattggttatggtggttcgtgctttccaaaagatgtaaaagcactcatcaaaaccgctgaacaaaatggctatcagatgcgtgtgctccatgctgtagaagaagtcaatgaactacagaaaagcattcttttcgacaaactttgcaagcacttcaacaacgaactgaaaggtaagacaattgccttatggggactggctttcaaaccggagacggatgatatgcgtgaagccccttcattggtgttaatagacaaactgctgaaagccggatgcaaagtgcgggcttacgactccgctgcaatggacgaatgtcgccgtcggataggtgagagcatttattatgccaaagatatgtatgatgctgtacttgatgctgatgctttgatgctggttaccgaatggaaagaattccgtttaccatcctgggcagttatcaagaaaaccatggagaaacctgtggtgttggacgggcgtaatatctatgacaagaaagaaatggaagagcaaggatttacctatcattgcatcggacattaaaaatataaaacagagagagttatgataaagtggggtactatttctatggtgctcgtcgttgtgcttgtatcatcctgtagcagtactaaaaatggggaaaattccgacagggaagacttaaccgctaaagaattgctgcaaggtgtctggctggacgatgagacggatatgccgttaatgcgtattagcggtgatacgatctattatgctgacccacaaaatgcacctgtttacttcaaggtacttcgtgatacgatttatttacgcggaaatacccttacagcttataaaatagaccgtcaaacggaatatagcttttggtttcattctctatctgatgatatcgtaaagctatataagtccgataatccggaagacactctggcattctccactcaggaagtggaagttatccccagcacttcagaagtaatcaaaaaagatagtgtggttatgtataaaggaacgcgttatcggggctatgtctatatcaacccttctaagatgaaagtaataaaaacagtatattctgatgaaggtataggtgtggacaatgtatactatgacaacgtgatacatatctgtgtatatgaaggcaagaaattactgtatggcaaggatattactaaaaaagttttcgccactattttcccggaggaagtattaaatcagaccattctttccgacatgaattttataaatgtggatggaaaaggctatcactatgaagccatgctccgtattccggaaagttccgtttatcatctcgtaagcctgactatcggtactgataagcaattacatataaaaatggtggagtaaaactccaccatcaaacaatatctattaaagaaatccttctcttatttgttgctttttcctgaagggttagcactttttctcggagcattacctcttccttttgaagcatctcctttcttcggagcatttccactacctttactggtatttcgtcctttagcacggaagttacgtttgccccttccgtcataactacgtggcttgtattcgggtgactcacctaattcttcaggtacaggtattttataaatatctctttccaggaaattctcaatttgcttgaagttactttgttccttttcatttacaaaggttagagcaacaccatcgttattagcacgcgccgtacgaccaatacgatgaacatagtcttcactgtcatgcggaacatcatagttaatcacaagacgaatatcatcaatgtcaataccacgagccacgatgtcagtggcaaccagaatgtttatacgacctgccttaaactcatgcatcacttcttcacgctgtgcctgttccaggtcagaatgcatttcgcctacattcagcttcatcattttcaaggcctttgtcacttcctttactttcaacttggatgatgcgaagataatgacacgctccggtgtttgttcagcaaagagactgcgaattatacccaacttctgattttcatagcaaacataggcggcttgcacaattttatcagcagggcgtgaaacggcaagtttgacttcagcgggattattgagaatggtgttggcaagttgttgtatttttgcaggcatggtagcagagaacatgatggtttgccgttctttaggcaaatacttcacaatctgcatgatgtcatcgaagaaacccatatcgagcatgcggtcggcttcgtcaagaatgaaataggaaacacgggagagatctacatatcccaaactcagatgagctatcaaacgtcccggagtagctataacaacatcggctcccaacattagccccttcttttgctgttcaaagagtatcccatcgttaccaccataaactgccacactgctgacaggcatgaagtaggaaaaaccttccatctgctgatctatttgttgcgccaattctcgtgtgggagacataacaatacagtttatagcatcttcaggatgtccaccttcggaaagtttattcagtacaggcaacagataggcagccgtcttaccggttccggtctgtgccacggctattaaatctctgccttcaagtataacgggaatggatttctcttgtataggtgtgcactcatcgaagcgcatggcttccagtgcatcaagcacctgatcattcagttgtagttcggaaaacttcatgtttctttttatttagtcgcaaagataggaaataaagtgattatcacaaaagaatgaagctactttgcaatccattcctttaataccctggatgctgttcccattccggattcatttgtctgattttctcgggaatggggaagacaatagtatacccactttcttcgttgggaagttgcggacgactgttgtaagaacgggtaaactgtccaaaacgaattaagtcctgacgccgccagccttcccaggccaattctaattggcgctcagccagaagattgtccaaagtagcagtacgttccggtgctcctacacgggtacgcacctgattcagttcttcatctccattgcgtccgtcacggactttggcttcactcttcataagcaatacatcagcgtaacgaaacagaacaatatcattctccatcaattttccatctttcatggctttgtcatctatctcatattttttcatacgggcaccggcagtcttttcataaggttcatcagacagatccagtttaaccttccacggttcgtaaactaaagctgttccatcatccaatttcacgacattacctttcaaatcataaacagtacctgcataatagcaataatcaaaacgcgggtcctgctcgtttgtctcgtatccaaaagtctgtaaggcttcgatagtggcacttgatccattctcaccagacaaacctaacgctttggcatgattataatgacgcgaacggaaaagatattgcatctgattggtatatagcgtcttattcatcggaatagtgaagatgttttcaacagagccttcattatatacggcaaaattggcggcataatctgattcaagacgataacctaaagctgtaatttggtcacaatagaattctacggtctgccaggcattgaatgtattgccatccacatcaaagaagattgttttcccatccggatgggtatcatccacccagttattatccatataaatttctgcattcagtgccagttttgcaagcaggaagtaggctacgggacgtgtcaagcgaccatagtaattaccagaacggttactgaactgagcaggcaggagtggggctgtctcttgtagttccttgaatatgaaattaaagatattctcacgttcactcagtacaatatcttttgaggcaactttggaagatagaaccaacggaatactaccgaacaggtccgtcagataataatagtacattgcacgtaaggcacgtacttcggcacgataggctggaagttctgcatctgtatgtgtaagtgcataactttcaatttgttccaaagacttattactgagcataactactttatagagatattcccaagtggcttgtatcgcatcattatttattccccatttgtgcaagaacagtccttgccagaaaccaccgtcgtaccagtcaccaccacgagtaggcataatggcttcatcggttgtaaaagtattcagatcatatatgccgcgtcctgttccctgcaatccttgactatcggaatttcctccgatatagttatagagagaggcaaccgcattcagataaagttcagtaatgttacgatagccttcttcttcgggtaatgcatcgcggggactttcttttagaaaaccatcacatgagatcatgcaccaactgagggtgaccaaaacacaaaacgaacgaattatggaatatcttttcatgtctttaaggtttagaagtttacacttaatccgatggtatatgtgcggtataaaggataattgcgtttatcatctatacctaaagtagaattcaccgatgaactgtttatcatgggtgtcaatccggaataaccggaaatagtagccagattgttgaccgtcagtgacaggcgaagtgattgcaggtaacgggtatttttcaatggaacattccagcccactgtgatatagtcgaagttcacataatcaccatcttccaaccaataatctgtagctgtctgatcctttatattccgtgtaggcgctttcttcataacgttatagtcgggaaaactattcatattcatataagtaagcgaagtaccattatagactttatgtccgaatgcaccgtttatctgtaacgatacatcaaaatctttataacgaaaactgatattagagccaagaattgtttttggaactgcctgacctgctatgtaccggtcttcaccatcttccagactaataccaccaccattcaaatcagcaatctgataagtatagcctccgttaccatcggatactaatcctgtgcaatgggggaggtaaaatacccccagcggctgacctacaatctggtaaacgatatgattatatccgccatgaaatccggcaccatccaatccggcaagactcttgtattctgttgctgaaatatgttcaccctgatagttgccgtcgagggaaagcaatttgttttgttgaaaagtcaggttagcattgatattcagttccatatctttggttttcaatggagttatgccaatggatagctctgttccataattacgcatggaaccaatgtttgccagcaaagtgttgtaagtgaaaggcggtacacttacattatagagatagagcatatctttcgtcttggaattataatagttggcggtcagtaacaaccggttacccagcaaagccatttctataccggcattgaaggtctgtttcacttcccattttaagtccggattcatattcttcaattggtccattgtgaccacaggtgatgaacctaccggagcaactccgttcgggcgtatcagattcagcgaggtgtacgaatcaattccattttggttacctgccaaaccatagcctgcgcggactttcagattgtcaatgaaaggcagtttctccataaacttttccttgccgactacccatgcaacagatacagccggaaagaaaccccatttatgattactgccaaacttggaagaggcatctccacgggcattcactgtcagtatataacgatcatcgtatgtatagttcacacgtcccatgaaggaggctaggcgaggatcttcataataagaattagttccttcccacggacggagagcacctccctgaagattgttatagcccagaccatcaatactgaaattagtaactgtggtatagaatcccgaatattggtctttttgcacttccgccagccccaaaacatcaaagaaatgcttccgccattctttcttataagacaacatcagattccccaataacgattccattttcttagttcctttgtatgcctgcccttgcgcccagaccgcaaccggcagatactgtgaattttcaatcacattataggtgtaggaaccaaacagtgccagtttccatgcttcagacaaattaaatgtcaaccgtgcatgcgtactaatgtgcgaagtagcatctttatcattcacatccatccatgccagcggatgagacaactggctggcaagaacacttccatcccaacttccggtttccggattcttatgattagggaaagtgggattaaatgcagcagccgaataaaacactttatgtaaatttaccaagttacgctctttctgtatagaaccaaacattccgagatcacatttcagaaaattatcgaatacgtactgcgtcatattcatattcgatgtgaagttctgcaacttttcattgacaattactccttcacgattcatcaaagcaagtgaaacacgatagttggaggtgtttgttccaccggagaaggcaatgtgatgattatgttgtagccctgtttgttctatttccttctgaaaatcggtattgtttcccaaatcaagaatagaaacgccacgttctttagctactgcccggaattcatctccattgagcattcttaccgttttatagcttgaagcaataccgaagctaccattatagttcacacttgtacgcccactaacaccttttttagtggtaatttcaataacacccgatgctccgcgcgaaccatattgcgctgtttccgaagcatctttcaagataacaaaactttcaatatccgccggatagatagacataagcatactcaaatcaccaaaaacaccgtctacaataatcaacggatcattgccagtagtcaatgaagtggtaccacgcaagcggacagcatccaatgctgcaggtccgttggaacctttcagaatagtcaaacccggtacccgtccgcggattgcatccagtggattggttatctggtctttattcatctggttttcggtgattctttctacaagtcctgaaaggttcttgcgaaggcctgtggcatatccaacagtcgttatagagtcagggaggctaacgtgaagtttttcttgtgcaacggcttgaaggccagggacagtcaaaaacaaagagagatagaaaaggttccgtattctcttcatagtattaatatttaagaggttccgcaaatatagatgtcattatatgaaacaaatatatttgcggaatagttcagctcatttcggcaaatcgatatatgagtccttgaagcctaagaaatagagcactccatcgagcccgattgtattgatggactgtttggcattggcaaccactttgggtttagcatgaaaagcgatacccaaaccggcaacacccagcatcggaagatcattggctccatcacccacggcaatagtttgagcaatatccactttttccacctgcgcaatcagacgcaacagttcagctttccgcttaccgtctacaacatctcccaaataacgtccagtcaacttaccatccacaatttccagttcattggcatatacgtagtcaataccatatttttgttgcaagtattgtccgaaataggtgaaaccaccggaaagaatggcaatcttatagccgtactttttcaacacatacatcaatcggtctactccttctgttataggcaggtgttccgctatatcctgcattacagattcatccaaccctttcagtaaggctacgcgttcgcggaagctttcggtaaaatctatttccccacgcatggcccgttcggtgatggcttttacttcatctcctacaccggcacgtatggccaattcgtcaattacttccgtctcaatcagtgtggagtccatatcgaaacatatcagacggcgcatacgacgatacatattatcgagttgaaaagagaagtccatttcaagttcgctcgccaacttcatcagttgctcttgcatggcaatgcgatccttcggagttccacggacggagaattcgatacacgcacgagtacgtaaatcacattcatccaatgggatacgtcccgtcaggcgcttgatagcatcaatattcatcccctgttcggcaagaatgcgggtgactgcggagatctggcgggcagacaacttacgtcccagtaaagtaaggatatagcgattttttccctgcatgttaacccaatcttcatattctttcaccgaaataggatagaagcgaatcgtcactcccaaagaagatgccttgaaaagcaactctttcataatgaatcctgaatgttgttcctctgtcttgcataagatacccaatgacagtgtattatgaatgtccgcctgaccaatgtcaagaatagtagcgtcgtatttagctaaaatttctgtaacggatgcagttaatcccggacgatcttcgcccgtaacgcgaataagaataagttctgtgctcaacggttgcatataaaattgtttatctaaattaatgagtaacacggtgcaaaagtagataaaattcctgctatatacaccaattaacatagaaatatgtatttaacagtaatatccatgaaatgtttcctatttctcttgaggacatacttgatacaaatgataaaaacacataatatatattcgaaaatcaccggatcaatactgtgcagagaggtatccagagatgcaaaacatgttatataacatgaaaaagtcaaccgtttacttgattttcaataataaagttatacctttgtcgccgatttagaacgagtggttctataatcttagtaaacgttgattgtatatttgttagctaagacgttgtttttaccgtctgacaaacatctataaatcaaccagtattaaccaaaaccgccttacatgaagcatgtaaaatggatttttgttgtattactaattagttccttgacttctttcgtagaaaaagacaaacctaccggaggtttaaatgtgggtgacatagcccctgattttaaaatcaaaactatgtcgactgaacaacaacctattcaaaatctctccaagatgaagggaaaatatgtgttactcagtttctgggcaagttatgatgcgcaatcccggatgcaaaacgcaagtttgagcaatgcgcttcactcaacttctccaaacaataatgtggaaatggtttccgtatcatttgatgaatatcaatctatcttcgaggaaaccattcgtaaggaccaaatagttacgcccacctgtttcgtggaaactaaaggcgagtcgtccggcatctttaaaaagtaccgtttaggccggggatttactaactatttactggatgataatggtgtaattatagccaaaaacatctctgctgcagaactttcagcttacttgaattaagctttcactgcacattgccatgaaagatttaaagaacctgtaagacgaaagtggggttgcttctaaaacttatgtgatgaaaaaagcatcgttagagtcaaaagaagcaaagacaaaagaggaaatggatacaacaaaaaagcccctcctgcacttgtggtaacacaaggagcgggaggggcttcttatttttgttaagttgagttggctactctatttcggtgccttctgatacagataaaatgcaatgaacgcatagagtatattcggtatccatacagcaattaccggaggaacattaccattcactgcaaaagtggaagcaatcgtctggaacaaaatatatgaaaagctcaatgccaaacctatccccaagtgtaatcccattccccctttagtctttttcgaagaaagagaaacacctatcaatgtgaggataaatgatgcaaacgacatggcaatgcgtttgtgatattcaatttcgaactctttgatattggcaaagccgcgctgccgctgccggctaatatattcgcttaattgtggactggtcatcatttcctgttgatttttcataataagaaaatcggcaggttccataaaaagagtactatcgatgcggtctcccttaacaatattctctttcataccatccatttcacgtatcatgtaatcctttataatccatttatggacggaggctgtatcataagtgatagatcgtgccgtaagatgagaaaccaactgtttgtctttaaacttatccaatgaaaaacgatatcccgtcttgctataatcttcgaagcgttcaatataagcaatgacgcccgaatctacttccaactgaatgttacgagctgtattcgatttgcgctgcttataatatttatcttcaaagttaatacgcgtcacactaccttggggtatgatataagaacccaaaaagaatgttactattgcaattatagctgctgacaccatgtagggacgaagcatcctcttaaaactcattccagtagagaacatcgcaataatctcggagttctcagccagttttgaggtaaagaaaataaccgcaataaacacaaacaacggactgaacaggtttgcaaagtaaggaatgaaattcagataataatcgaagattatggctttccaaggagcttcgtgtgacataaatctgtccatcttctcattaaagtcgaataccactgcaatggagataatcaatgcaatggcaaacacataagttccaaggaacttcttaataatgtagaagtcgagccgcttcaaccatttccagttatccggcatctttatacctttcatgttccagttcagttttttcataaccttgtcgatacgcgtttcaccatcatcggtttccatgtggagaaatcaccggcaatgatgtgcttgcgagcttcacccaccagccacagataaaatgccaaattatgaatagatgcaatttgcatagccagtaactcctgtgcatggaacaaatgacgcagatacgccttactatataaggtatctaccgcagaagctccatctgcttcaataggcgagaagtctgtttcccatttcttattacgcatattgatgataccatctttggtgaacaacatgccattgcgtccgtttcgggttggcattacacaatcgaacatgtctacaccgcgctcgataccttccaaaatattgaccggtgtacctacacccatcagataccgtggcttatctttcggtaagatttcattcaccaactcaatcatctcatacattttatctacaggttcacctactgccagaccaccgatggcattgccatccgcacccttcgatgctacgtattctgccgactgcttgcgaagatcaggatatacacatccttgaacaataggaaagagagactgctggtatccatacttcggttccgtttcattgaaacggtgaatgcaacggtccaaccaacgatgtgtgagtcctaatgactttttggcatacgcataatccgaatctcctggaggacattcgtcaaacgccatcatgatatctgcaccaatcgtacgctcgatatccattaccttttctggagtgaagatatgtttactaccgtcgatatgtgaacggaattccgcaccctcctcacgtagtttacggatacctgataatgagaacacctgaaatccgccactatctgtcagcataggacggtcaaagccgttgaacttatgcagtcctccggctttttccagtacgtccaatcccggacgcagatatagatgataggtattccctaatatgatttgcgccttaatatcttctttcagttcggttacatgcacacctttcaccgttcctacggtacctaccggcataaagataggagtttctatctgcccgtgatcggtagttatcaatcctacacgcgcattacttttactgtctgtatattgtaagtcgaatgtcattctgctttcttttctttctttacggacaagtcgatggcatcggcaaccttctcattggtcagcgcaatggcaaacacctctttcacatctttcacgtaatggaaagttaaccctttgaggtatatttcctgtatctcgtcaatattcttacggttctcttcacttagaataatattcttgatgccggcacgtttcgcagccagaatcttctccttaataccacccacgggaagtaccttgccacgaagtgttatttctcctgtcatggcaagatttgccttcactttacgctgggtgagggcagaggcgagagaagtggccatggtgatacctgccgaggggccgtccttaggaatagcaccttccggcacatgtacgtggatattccaattatcaaaaatatcttcatccagattcagcaaagaagcgtgtgccttgatatattccaaggccagcattgcagactctttcatgacatcacccagatttccggtcaacgtcagacgcccaccttttccgcggctcaaactggtttctacaaacaggatttctccccccacggcggtccatgctaacccggtcactacaccagcgtattcattgccctgatatttatcacgggtatactcaggtgctccgaggaactcatacaaatctcccggtttgatttcctgtttggcaaagtagccatccgtagcatactggcgtgccgatttacgaagtattttacctatcttcttctctaattcgcgtacaccactttcacgggtatacgactcgataatagcctccagcgtattctttggtattttgatatcattcttcttcataccgttggcttccagttctttcggaaccagatggcgacgggctatttcaatcttctcttcagtgatataaccacttacctcaatcaactccatacgatcgagcaacggtccagggatagtattcagattatttgcagtagcaatgaacattactttagataaatcgtaatctacatccaggaaattatcatggaatgttgtattctgttccggatcaagcacctcaagcaaagcagaagaaggatctccctgacgatctgaactcaccttatctatttcatccaggataaacaccggattggatgagccagccttgatcagacttttgataatacgtcccggcatagcaccgatgtacgtcttacgatgtccacgtatctctgcttcatcatgcacgccacccaatgacatacggatatatttccgtttgagggcagcagcgatagaacgccccaaagaggttttacctactcccggagggccatacaaacagataataggtgacttcatatcacctttcagcttcaatacagccaagtgctccagaatacgttctttcaccttctccaagccataatgatctttattcagagtcttctcagcattgactaagttcagattatctgtagtgtatattccccacggcaaacttagcattgtttgcagataattgagttgcacactataatcaggagattgtggatgtgtacgttccagtttatccacctctttcatgaaagtgtctcttacttccgcactccacttagtagcgattgctttacggcgtaattcttctatttcctgttcctggccaccaccacccaattcatcttgaatggtcttaatctgctgttgcaggaaatattcacgttgttgctggtcaatgtcttcccgtgcacgcatctgtatggactccttgatttcggcaagttgcacttcccgattcagtatctccaacaaacgataagtacgtgcacgcaatgcatcaatacgcagcaattcaatcttctcatcttttttcagcggaagattcgtgcagataaaatccaccaagaacataggattcgtaatattcttgatggcaaatgcagaatcctgcggaaacatatcagatgatttgatatatcttatagtcagatccttgcaagcttccaccaatgcatggaattccttatcatttttgtcaggaatatcttcccccaatgcttttacgcgccctttcaaataaggagttgtatctacaatttcttccaattccatacgtttgacgccttgcagaataatagtggtagtctgatcaggcatttccaggatacggataatcttacctaccgtaccaatagtatgcaaatcttccaacgaaggcatctccgtttctgctaccttctggcaaaccactccgatatatgcaccttttttttcagcttcacgcactaatttcatggaagtctttctcccgacagataccggcataaatacacctggaaataaaaccatattccgtaaaggtaatatcggaagtatctcattcacttcaatatccatcaactgttcttcattcccctcaaaatcagcaatcactgaaaaagtgtttccttcttctcttgcttccgtatcttttaggtaaagtcttttcttcatttcgttctttttaagtttatgtcatactgacagggcttataaagcgcctgcaaagttaatctattcttcattaatataaagcaccttttctataaaaagacaaaaacggtgccaaatttgtcgtaatattcccgactttgtctatttttgctctctattaacaactacaatctatgtcaaatccttattttcagtttaaacaatttactatatggcacgataaatgtgccatgaaagtaggtacagacggagtgctgctaggcgcctgggcagagacagaaaactcgcaaaaaatcctcgacataggaactggcactggattgatagcgataatgttagcacagcgatatccattgtcgcaaatcacggctatagaaatagatgaagctgcggcagctcaggctaagatgaatgtagcccgttctccatggataaaacgaatacaagttatctgtaacgatttcagtctatttcagaccgaaagtaaatataatctgatagtttctaatccaccatattttgttgatgcattgaactgccctgacaagcaacgcaatatggcacgtcatacctgtgaactaaattatgagttactttttcgacgctcggcaaatctccttgaaaagcaggggagggtatgtgttatcattcctaccgaagcagaaaagttagtaattgacacagcctggaaatacaagttgtacccttcgcgttgtcttcatgtcttcaccaaaccggataaaccaagccgaagagtacttatttcattcagccacgaagaacatgagtgcatagaagagactttatgtattgaagtggaacaccatcaatttacaccggaatatattgcactgacaaaagatttttatttaaaaatgtaatttgatgctatcatacctttatctcaaaaatcagttataggcagttattttgttggatgtctctatatacaaaaataagctactaaaaaatcagcagcttattctttttataagatagttataataacgactcttttttagcacttctgacaggctgttttaacctctctaattcatgtgataaaagagcgttttcttccatgcgattatattttatattacataaataacaaggaaacaaccagccccccaatcactatgacagtaaaacaacctgttccttttatctttcttgccttgtcaaagtcttcttgcaaaaacttacggccacattttggacatgcataacacgccgtaccagaaagctttccacaattgggacacgtcacataaagacctttagtcctttcaagaggatgcaggcttaatctatcaggtatcggctgtttctttaatctgaattgatgaccgcattttaaacagctaatcaatatcttattactgagaaattgaccataagcaatcttttcagcgtgtatctgagtagaaccacatctcggacatgttaccggggtgtcatcatattcattaaagtctgtatgttgtcgctcacctttcattgcttcttaattagttgattctatctgtcctttctatattgaagagttttatgctagaacaacatcaaactctgaggatccactgcttagtagcctcttatataatccttgtagtttaccaccttgaactgattgttcatgcacagggacatacgcccagtatccatcacttccaccttcaattgtagatgcatacggatattcatctctggaaagccccggcgcatactttacatctttaaataattgattatcatctctagaaagcacctttacacgatttacttcatgaatgcttattggcgagtatggtattttttctttatcggcttgtactttagtaactatttcttcatttatcatattccttacataaactaccgattctttatttggaatataattcaaagtgtttggagctcctttatctattgcacaagctgtaaactcccatatattaggggtcttgctcttttctatgatatgattttctttaaattgggtgcaaagaggatctatagcagtagttctttggcagatactatttatattggccttttgcattttatgactaattcgattgtctttaaacataatgtttgaattataatccgagaaactcaacgttttcgaacatttattatcctctttaggggagtgttgactacaatagcatttcataatattagattttagttatataattaattaccatttcttcgatgaacttatgttttttcaaggaccttctcattacttgagtttaaaatcagttataagatagttataaaaaaatctcctttattagcatagaaagaatgtcaaataacacaatttttgctataaatgacgtagagccgatgcaaattgcatcagctctacgtcatcttaattaattagttttcagtcttttagactttagtcggggtagcgggattcgaacccacgaccccctgctcccaaagcaggtgcgctaaccggactgcgctacaccccgaatactttatttcttaaaagcgagtgcaaaggtagaaactattttgtaataaacaaaacaaatcgactctttttacaaaaaaaaatcagatgaggtcataaatacccatttagacagggccaacttcgtatttgctccgtaccaactccccataaaaacataaaataattcaagatcattcactacacttgcggaacttaagcaaaatgacaaaatgtaaatcgtgatatcctacgtttcatcctttcgtatcaatagttggcgtagtgcgaaaagacgcaaggatttcctgtttggtaaatgccgtatgatttataataatgagggaaagtgtattttggaaagtgagttctttgtatttcattcttatttgattacgtatttgatatatttcctaaaaagtgattattagatttcgttgcttatcttcttcaaaacagaaaaatatcacctgcttttcggaggggctacaccctttttccgtgatagtatcaccctttagtgatgaaggtgtagccctatgaggcaaagagtgtagccattttccaaattacatcatccgtttggatcaaatagatggtctgtttggttaaaacaaatcatgcaatagcgctgaatagaccatctgtagcataccaatagatgatatgataatgataaactaaggttttattcttccagaagggcctttttgacagaaaaccttattgctgataatggggaaatacaaacgtattgaagagaaatatcgtatttcactatcttattgccatattggactgattgcgtaaatcctgatatgctttggccaatcaagcttagggaaaagaacgttagcctgcgaaacttaaatatagaataatagctccggaacgatatttttcaattaactttatcccctgaaaacaattggtaggtttcaacgttacactataataaaaagacatcatgaaaaaacaaatcattagcatggcggtcatggcagttatatttgctgcctgtggtggttctaaagctcccgctaccgtagtaggatcatgggtaatgcccattaacgggcaacctggagaagtgcaaggaatcaaactggaagagaatggagaagcatcttccattaatatgcacactttgatatacaaagaatgggaacaacaaggtgaccagctttatctgacagtaaaaagtatcggtaatggaatagagattgaaggtgtggatacactgaagattgacaagctaacgccggattcgttagtgttaagttccaattatggatatactctggagtatgtaaggcagaaataatacaaactgcaatatataaatccctgacgactttaaagtattaaatatcgtcagggatttcttcctaacctaaccaatcaatttaccttgaacgtatttctctacgcataaatatgatataagagagtgcaaaacagagaattgtaactgcaatcaatcctgttagctgtggccatataaccagcaaactctgtcccaatgggagagggctgggtattgccccttgaacctgctccatcattaacggtcccaagcttcgaagtgatggcatcagcaatacagaagttgcctgattgaataattcgcacggattcaatgacattatgccccaaactattttttgataaccgacaacataataaggcggcatcatatcagaaggcatgaacatcttagcaacccaattgacaatcatcgtataaaatacactgaaaaacaaccatatcgccagagaagccaaagctgaagtagccgtctgccggaagcagagcgagaacagtatcgccatattcaaccaaagacctacatagaaaacacttaggatcaaaaaggaaatgatacgggcaaattcttccggtgtaggtggaataccgatggctatcagcccggctcccattaccaaaaaacctaatacaaacagcataattgtaatcacaatcagtgcagcaacaaatttggcattgattatacaatcacggtgtatcggctgtgataatatacggcataatgtccctttgttcagttccgaattcatggcatcaaatcctaaggcaatacctaacagcggccctaaaaagttgatgaacaaaacaaaagaaggcaatgtgccatcggatacagtaaacaatttcaagaagaaaaaagtatcttccacatcacctgatttgacagcctcatgcatactggtgagtgatgtatacaaggctcccaagcaagtgagcgtgataatggcaagtaaaataataaagcgccaactacgcacatgatcccggatttctttattcacaataacccagaaaggctgctcaattccgttcatacgtctcacctccttcctttatataattattgtagatatcaataagttctacttgtttaccttccatttctctaagatcaagctgtgccagtaattctccgtgattaaataagcccacacgatcacaagctttctgtacctgatccagattatgtgaggaaaataacacggtgaaggaatgaaccctactcaaattacgaatcaattctataaattcctgaattccggcaggatcgataccggatgtcggctcgtccaaaataatgatttccggattctttatcaatacatccgctaaacccaaacgttgcctcataccgcgggaatactttccggtctttttattcacctgttcggcaagtccaacccgacgcataagttcctttgctttctcttcagcctctttccttgaaaagccgttcagaagtgctgtatagatgaggttttccaacccggtcatatcatcgtaaaagcctaaatcttcaggaagataaccaattttcctcttgacttcaataggatttgtagtggagtctattccacaaatttccactttaccggaagttggttctgtcaaccccagcatcatcaggatagttgtggattttcccgcaccattcggacccaataatccaaaaatctctcctttgcagattgacaggctaatatggtctacagcagtgaaattaccgtattttttggttaaatcggtaagtacaatcacttgttcgcccataattacctccttccatattttcggaataggtaatagacacctcccacagctacaacgatgactaatattcctacccaaccccaaagcattggtgtttttactgcaattctgaattgtgcagttgcatttacttcgggagttctggcttccattgttgctacatagtcgcctggcaaagcttttttcgaagctttcattatagccgtaacagtagatgtttctccggcttttaatatttctattttggcaggttcaaaagatacttcccaatcttttggcttaccggatgagagttgaatatcctttaataaagaggaacctgtgtttctgacaactaattccagacgcttcacatctccggcagttatttcagtactcaacaatccccgtggagtagtcagttccatttgatatgtaccggtaaccaccacttccaaatccagatcagcagaagtattaccggctactgcacgtactgaaatcttataattcccagcttcaacattagccggcggagtgacgtctatcgacacattctggctggcattcgcttctacttgtgcggaagttgcctgcttataattaggtttaaaaattacattccatcctctgggcgcattagacatcaatgcatataactgctgatcagccgtctgattcttcagtacggcattaaaagtaaatgtcgattttgagttgccctgcatattgggttgatcagtggtaaattcagtctgataagtgccttgctgagctacggtgacagtcaaaggaagttgacagcctccagcagttacaacaaaattgtagctacccttgtttatttttaatggaacttccaatttcaagttaaagtccttcttttcactaggcaggacagctaatttgttaatattccaaccaccggatttcaattcacgtttccaacttgctggtaatcctgtaacagacagatctacattgaccggaatatccgaattattgattaaatcaattttgtaatcaatactcgttcccggagaaacagaaatctttgtataaggagaataaagaaacacgcttggaattgagtcagaggcgtgtgtgtaattcacgggtattaaacccaacaaaatagttaatagcagcaaataattagttcgcataatcatatagaattttatggttaattaaatatgagttatcgatttatgtggctgcaaaaataaataatggaaaaattagtagctgttaaaagcaat

SEQ ID NO: 6331 - DNA, 32265 bp, Unknown
  gut microbiota DNA sequence
ccgttataagcaaaacgataatcttgtatgataagtgccccatatacagatgaccaatatttacacaataagatatttgtgagatcagtatgatactgagaccacctcatcagtcgtatgttgaaatacgttcattataacattcctgataatcaaccatttacaaaagacatcttcatcattgataaattaaaacaaatgaactgtttaaaatgataaattattttctctcttttctgttatgaatcaaacaatagtcgatatacactacgccttataccaaagtcacaatggcacacgactctttcttctgttatcattctttttcaaagggataaagcaagcattcccgatataattgctacatttgcagggtaatcgataaaagaagtacaagaaaatggacttaaacaaagtatttgccaccgtgcaggaagccagccgggaattgttatcactgagcgatagagaaatcaatcagatactattggctgtagcggacgctgccttggcaaaatcggacttcattctcgctgagaacaagaaggacctggaaagaatggatccaaatgatccgaaatacgaccggctaaaactgaccgtagaacgcctgcaaggcatcgctgccgatacacgcaatgtagcaacccttccctcaccagtgggacgcacgctgaaagagcacacacatccccaggggatgaggctcagaaaggtaagtgtcccgtttggcgtcatcggcattatatacgaagcacgccccaacgtgagtttcgatgtattttctctctgcctgaaaagcggaaatgcctgcatactgaaaggcggtagtgatgccgactcctccaaccgagccattatcagcgtgatacacgaagtactggaacatttcaacatcaacccgcacatcgtagaattactgcccgccgaccgggaagctacagccgagatgctgaatgcccgggggtatgtagacttacttattccgcgtggcagcagtaacctcatcaactttgtgcgtcaaaatgccaccatacccgtcattgaaacaggcgcaggtatctgccatactttcttcgaccgctacggtgatgtagagaaaggtgcagctattatcaacaatgccaaaacgcgccgcgtcagcgtatgcaatgctctggactgtctgttgattgacggtgaccgcctcaacgatctgccggcactttgcgcaccgttgcaaaaaagcaatgtgataatctatgcggatatgtacgcatacaacgcactgaagggaagctatcctgcggagttactgaaggaggccacggaggaagacttcggtacggaattcctggactacaagatgtccattaaaaccgttcagtccattcgtgaagccatagcgcatattcaggaatacggttccaaacacagcgaatgtattgtaaccgaagacaagactcgtgccgagtggttctgtcgtgatgtggacgccgcctgcgtatacgtcaacgtaccgacttcctttacagacggagcgcagttcggtctgggtgccgaaatcggtatcagcacacagaagctgcatgcccgcggtcccatggctctggaagaactgaccacgtataagtggattgtcgaaggagaaggacaggtaaggaagcgataacttctttagctccttctttcccccctcttactcctaattcatattaatcataaatatataacatgaagaagtttacttgtgtgcaggacatcggaaatctgaaagctgcactggatgaagcatttgagattaagaaagaccgttttaaatacgtagaattgggacggaacaagacgttgatgatgattttcttcaactctagcttacgtacccgtctcagcacgcagaaagcggctacgaatctaggtatgaatgttatcgtgctagacatcaaccaaggagcatggaaactggagacggaacgcggcgtcatcatggatggagacaaacccgaacatctactggaggctattcctgtgatgggttgctactgcgacatcatcggtgtacgttcgttcgcccgctttgagaacaaagaggatgactataacgaggtaatcataaatcaattcatccaacattccggtcgcccggtgttctcaatggaagcagctacccgccatccgttgcaaagctttgccgacctcatcacaattgaagaatacaagaagactgcacgccctaaagtggtaatgacctgggcgccacatccacgcccattgccccaagccgtgcctaattcattcgccgaatggatgaacgccacggattatgatttcgtcatcacccaccccgaaggctacgaacttgctccgcaattcgtagggaatgcccgtgtggaatatgatcagatgaaagcgttcgaaggtgccgacttcgtctatgccaagaactgggcggcttatgccggagataattacggacaaattctgagcaaagatcgtgagtggaccgtaagcgaccgccagatggcagtaaccaacaatgcttatttcatgcactgcctgcccgtgcgccgcaatatgattgtaacagatgatgtcatcgaaagtccgcaatctattgtcatccccgaagcggctaatcgtgaaatatcagctacggtagtattaaagagactgcttgagtcactctgaacagaataaggagctatagtgaggagctaaaagagttatcagcccgcaagcgggcttaggagttaaagccgataaagttgtgaatcatcagcaggagtgttggctttaactccttctaacttctgtaactcccgaacgaagcgaaaacgtctttctcctttaaaaaagctcctcagcatcaaaaataagcaagcatattttgtactgctttcggtttgcattatctttgtccccaaacaacgccaaggattatgactataaaagagtttttttctttcaaacagaataagtttttctggataaacctgatcgcaatggtcattgtggttgcccttgtactgtttggagtgctgaagggactggatatatacacccgtcacggtgaagcggtagtagtgcccaacgtgaaaggtatgggagtggcagaagctgagaaaatgttccgcaaccaaggacttacctgcattgtttccgactccagctatgtaaagaacttaccagccggatgcatcctcgaacacaatcctgccgccgggcagaaagtgaaagaaggacgcaccatctatctgaccataaacaccctgagtacccctttgctagtcgttcccgatgtagcggacaacagctccatgcgccaagcacaggcacgtctgctggcggccggcttcaaactgtccgagaacgaacacatagccggagaaaaagactgggtatacggtgtgaaatataaaggccgtacactgaccaacggtgaaaaagtacctgtaggtgccacacttacactaattgtgggagacggtggagagctgcctcaggaaggggattctacagcagtagaagctacccctacctcctctaaagattccgcagcagacgagtcctggttttaaactcgatcatacggggaataataacaataacacatagaaagaacaaggaatgatagaagatttgccggacgacatagtgactgaggatgatctggacgacatagaacctgtcggtgatgaagcccaactctatgaacacttccgtgtggtagtggatagaggacaggaaatgatgcgcgtagacaaatacctgttcgaccgcctgacaaacgcttcgcgcaaccgcatacagaaatcagcggaagccggttttgtaatggctaacaacaaaccggtcaagagcagctacaaagtgaaaccgatggatgtcatcaccatcatgatggatcgtccgcgttatgaaaacgaagtcattcccgaagatattccacttaatatagtctacgaggataaatacctcatggtagtgaataaacctgccggactggtggtacaccccggacacggaaactaccaggggactttagtgaacgccatcgcctggcacatgaaagataatcccgactacgatgccaacgacccgcacgtcggtctggttcatcgcatcgataaagacacttccggactgctcgtcatagccaaaacaccagatgccaaaaccaaccttggtatgcagttcttcaacaaaaccaccaaacgacgctaccgtgccctggtgtggggaaccgttgaacaggacgagggaaccatcaccggaaacattggccggaatcccagagaccgcatgcagatgaccgttctgcccgatgatcagggaaagcatgccgtgacccattaccgggttctggagcgtctaggctatgtcactcttgtagaatgcattcttgaaacgggacgtacccatcaaatacgtgttcacatgaaacatatcggccatgtactcttcaatgatgagcgctacggcggtcacgagattctgaaaggtacccatttcagtaaatacaaacaatttgtaaataactgcttcgatacttgtccacggcaggcattacacgccatgacactgggttttgtacatcccgccaccggcgaagagatgtacttcacctccgaaatgcccgaagacatgaccttgctgatagacaaatggagaggctacatcagtaacagagatttagaatgaaacgcacgattgctattgtttgcggaggtgatacctccgaatttcaagtttccctgcgcagcgcacagggtatctactcctttatcgataaggaaaagtacacattatatattgtggagatgcacggactcgactggcacgtgcaactgcccgacggcggcaaagcgcccattgaccggaatgacttcagctttcagatgaatggcaggaaggtaacattcgactttgcctacatcaccattcacggcactccgggagaggacggacgcttgcaaggttatttcgatctccttcacatcccctactcatgttgtggtgtactggcagcagcacttacgtatgacaagtttgcctgcaaccaatatctcaaagtctttggagtacgcatagcagaatccttagtgcttcgccaaggacaatccatttccgatgaagatgtgattgaaaagataggtttgccctgtttcatcaaacccagtctgggaggttccagctttggcgtaacgaaagttaagacgaaagaacaaatacagcctgccattgttaaggcattcgatgaagcgcaagaagttctgatagaagcctacatggaaggcaccgaagtgacctgcggttgttataagactaaagagaagtcagtcgtattccccatcaccgaagtagtgaccgagaatgaattcttcgactacgacgccaagtacaacgggcaggtttccgaaatcaccccagcccgtctctccgatgacctgacacaccggatacagacactgacttccgccatttacgatatcttgggcgcttcaggtatcattcgtgtggactacatcatcactgccggagataaagtcaatctgctggaagtgaacaccacgcccggaatgacggctaccagcttcataccccagcaggtacgtgccgcaggattagacattaaggatgtaatgactgatataattgagaaccagttttagtgactaaactactaatcgctaatcactaaacgttaatcattatgaatatggaatttgatgaaatccgcccttatcatgacgaggaacttcctcagatttacgaggaactgattgccgatccggctttccagcaggtggcgtctgctgttttcccggaagttccctttgaggcacttgcgcagaaaatgcgtacatgcaagacgaagttggagtttcagaaagcattctgttacacaatcctgaaaagatttgccaaagacacgacccagggagtaactctggaccttacggcacagacggacaagacatccgcttatacttatatctctaaccaccgcgatatcattctcgactccggtttcctgtccgtagagttgatagacaaaggtatggatacagtagaaattgccatcggcgataacctgctgatctatccctggattaagaagttcgtgcgtgtcaacaaatcattcatagtacaacgtgccctgaccatgcgccaaatgctggaatcttccggacgcatgtcgcgctatatgcaccacactattaaggataagaaccagtctatctggatagcacaacgtgaagggcgtgccaaagactccaacgaccgtactcaggaaagcgttctcaagatgctggctatgggcggtgagggtgacattatcgaccgcctgattgaaatgaacatccttccattggccatttcgtacgaatacgatccttgtgattacctgaaagcacaggagttccaactgaaacgcgatataccggactacaagaagacgcaggaggacgacctgaagaatatgcagaccggcttgttcggacctaaaggacgcgtgcacttccaggtagcgtcgtgcatcaatgaagagctggaaaagctggaccgttctctttccaaacccgaactgttttcacagatctccgcccttatagatcggagaatccatgcaaactatcgtatgtatcccggcaattacattgctcacgattatttgtcgggcacccaagccttcgccggtcattataccgccgaagagaaaaaacacttcactgactacatcgaccagcaacttgcacgcattgaactgcccaataaagacatcccgttcctgcgcgaaaagatgttgttgatgtatgccaatccactgacgaattatttggctacaagaactgataatccgaaatagagtaatatatgaaaggtaagctacaatttccggtttctttatgctggtttcttcccgtactggtattcatgctggtttcctgcggcgatgacgatgattatcattatccgtccgtaaaactggacttcctgactgcacaggccggtgccgacggcagcctgcaatccgtgctgacggatgaaggcgaaacacttgcaatagtggaagatgcgtcgaaaacacgtatagacgctaatgcctctgcccgcattgtcagcaactatggcaaggcagaagctgccgatgggacatccggagtaaaattgtatgcagtattgagtgctatatcgcctgtgccgcagtctgcggataaatttaaggatggaatcaagcgtgatccggcagatatactgagtatctggatgggaattgattacctgaacataatgctggaaatcaagtcgcagaacggaaagcactcgttccatttcattgaggacgaagtcaccacggacaaagaagcaggaacccggacggtacgtctgtctctctatcatgatgatggcggagatgtgcaggcatacacgaaacgtgcgtatgcatccgttccgttacggcaatatgcagaggatggaattgataaagttacaatctatttcagcttaaacacgtattccggcaaagaagtaacttatgaatttgaatataccccccaataagatgaaaataaattctttgattgcaggcatctgcctattcttctcctctcttttctcctgtcagcagaaaggagatttcaagtctgtatccgtggaagatttctccacgctgatagccaatcctgagatacaacgtctggatgtacgcaccgtagccgaatactcggaatcacacattcccaaaagcatcaacatcaatgtacttgataagacttttgcggaaatagccgactccactctacagaaagataaacccgttgctttgtattgccgtagtggtaaacgcagtaaaaaggctgccgctatactcagcgaaaagggatatgtggtttacgacctcgacaaaggtttcgaagaatggaaaaaagccggaaaggaaatagaggaataataagggaaaaacgttggtgaaactaatacgtttcagattcataagggtataggaatgaataagactcaccacagattacactgattcacacagatttattaatctaataatcagtaaaatagaatctgtgtcaatctgtgtaatctgtggtgaattaattcataaccaaaaagaaattaattaattccgccaaagctttatcgtcacaataagaaaagccgcaaagcactgttatcagtcctttgcggctttcttattctttattacaaagagtttacttatgctttcactccgttgtattcgtcagaaacagtcagtttcttgcggcctttagcacgacgtgcagctaatactctgcgaccgttagcggaagccattctctcacggaaaccgtgtttgttttttctctttctgttagagggttgaaatgttcttttcattactgtatattgttttatgttattatttcacgtaatcgggctgcaaaaatagggacttttttcaaaataaccaagagttaagtctttttctctcaaaactttttgcgatttttactgatttccattacttttgcacccgcaaagctcagtggagacaattatataacatctaaaataaaaaatattagtatgattaatgcccaagacattaaaatcggaacttgcatccgtatggatggcaagctgtacttttgtattgacttcctgcatgtaaagccgggaaaaggtaataccttcatgcgtgtaaaactgaaagacgtagtaaacggttatgtactggaacgtcgctttaacatcggtgaaaaactggaagatgtacgtgtagaacgtcgtccgtatcagttcttatataaagaaggtgaagattacatcttcatgaatcaggaaactttcgaccaacaccctattgcccacgacctgatcaatggtgttgacttcctgttggaaggtgctgtactggaagtagtatctgatgcttctactgaaacagttctttatgctgatatgcctataaaggttcaaatgaagattacttataccgaaccgggtgtaaagggtgatacagctacaaacacgttgaaacctgctactgtagagtctggtgcaacagtgcgcgttccgctgttcatcaatgaaggtgaaacaattgaaatcgacactcgtgacggttcttatgtaagccgtgtgaaggcataagccgattccccgactacataattacgattatacaagctgcctgtcagaagaattaaacacttctggcaggcagtttttttctataggggagcaaaagaatatacgattgggaagattatcggaaaagaatgatttatctttgtaagcaataagcaatagaattgcaccatgagtaaactgataaagacagacaacgaatataaagagtggataggcgaactgaaacagcgtatccgccagagtcagattaaggcagcggtaaaagtaaatacggagttattgaaactatactggagtataggaggtgatatagtccggttgaaagcggaagcaaaatggggagatggcatcattgaacaattatcccaagatctaaagacgaattttccagatatgagtggcttttcttcgcgcaacctttggtatatgaagaaatggtattctttttattctcagcctgatacaaaactgccacaagttggggcggaaagtaaaagtgagaaactgccacaagttgtggcagaaatagaaaagctctttttcgcagttccatggggacatcaacgctgtatcattgataaaataaagaacataaaagaggctgtattctatattaataaaactgtagaaaatggctggagccgaaatatgttacttaatatgatagaaagtagtctctattacagagaaggtgcttctattaacaatttctcatcatgcctaccggcatcacaaagcagccttgcacaggaactaacaaaggacccttataatttcgacttcctcaccctgcgtgatggttatcttgaacgggagttggaagatgccctaactgacaatatcaccaaattcctcattgaattaggaaatggttttgcctatgtaggacggcaagtacgccttgaagtcggtggtgatgaattctttatcgatctgctattttatcatctcaaactacgcagttatgtagtgatagagttaaaaacgggagacttccagcccgaatatattggtaagttaggtttctatgtctctgccatcaatcatgagatgaaactgccacaagacaatccaactataggattgctaatttgtaaaagtaagaacaacatagtggcacgatatacactggacacagccaacctgcccatcggtatctctgaatatgaattaagtcagctttacccaaaagatttcaagagtaccctgcccagcattgaagaaatagaaaacgaactaaaagattaatacctatgagatactccgtcattattcctgtatacaaccgtcccgacgaagtagacgaactgttgcaaagtctgaccgaacagagtttcaaagactttgaagtcgtaattgtggaagatggttcctccattccctgcaagaaggtagtggacacatatcaggataaactggacatacactattacaacaaaccgaattccggtcccggacaaacccgtaactatggcgccgaacgaagcgcgggggaatacctgatcatcctggattccgactgcatcctacccgcaggttatctcgccgccattgaaaaagaactgcaagccagtcctgccgatgctttcggcggaccggaccgggctcacgagtcttttacagatatacaaaaggccatcaactactccatgacctctttcttcactaccggaggcatccggggaggaaaaaagaaaatggataagttctatccgcgcagtttcaacatgggtgttaagcgagacgtatatgctgcattgggcggtttttcaaagatgcgattcggagaagacatagacttcagcatccggatatttaaaggcggttaccgctgccggttattccccgatgcatgggtatatcataaacgccgcacggacttaaagaaattcttcaagcaagtgcataattcgggaattgcacgcatcaatctatataagaaatatccggaatcactgaaagtcgtccacctcctgcccgcagcattcacactaggagtagcggtactgctgcttggtgctcctttctgcctttacagtctgacgcccattgctttgtacgcactgctggtatgcatagactcttccatccagaaccgaagcctgcgcatcggcatctattccattgccgcctcctttatccaactcatcggatacggcacaggcttttggagagcatggtggaatcgctgtatactcggtaaagacgagtttgaggctttcaaaaagaacttttataagtgattagcgattagtgattaacatggagaaactgactatcaatcagtgggcggaagaagaccgtccgcgggaaaaaatgatgctgaagggagcggaagccttgagcgatgctgaattgcttgccatccttatcggttcgggaaacacagaagaaagcgcggtatcacttatgcaacgggtactttccacttgcggcaacgacctcaatcaattgggtaaatgggaagtgcaggacttttcccgcttcaaaggcttcggtcccgccaagagcatcaccatcatggcagcattggaactgggtaaacgccgcaagctacaggaacgtccggagcgtgccaccatccgctcttccaaagacatttacgaaatctttcacccgcttctttgcgacctggcacacgaagaattctgggttctactccttaaccaggcttcccgcgtcatcgacaaatcccgcatcagccgcggcggcatcgaccagactactgccgacgtacgcagcatcctgcgcgaagccttaatacaacgagccacgcaaatagctctgatacacaaccatccttccggcagcccacgccccagtacagacgaccaacgcctgacgcaacttgtccaaaaaggcgctcagacaatgaacatccgtctcatcgaccacgttattgtaacagacggaaagtattatagctttaacgatgaaggaatgatttaagagaaagcattaaaggaagtcacccggatcttccttaccgctcatgtaaaagatggcatcttttgctacgaaaggtggcatctttcacatcaaaagatggcatgttttgctacaaaagatggcatcttttgcatgggcggtaagaaagatacagatgaaagatagtaatgtttgatgtaaaaggtagtaatgtgcttaataaaaggtcttaatattcgagttgcagagtgcctgtgacaggctttttcaaaacccgttcctttgtagtttcaatttatttctttagctttgcttcacgaagatgagttgcattcagcataatgcaaataaatttgcttctgcttccggtttcaactatctttgcctaactaaaatgaaacgaatatgaccaagtttgaaatagaagaaaaaatagtagcgatgctcaaaaccgtattcgacccggaaatcccggtaaatgtatacgatctgggacttatctacaaaatagatgtctccgacagcggagaagtaaatattgatatgaccttgacagcccccaactgtccggcagccgacttcatcatggaagacgtgcgccagaaagtggaatcagttgacggtgtatctgccgccaccatcaatctggtgttcgaacctgaatgggacaaggacatgatgagcgaagaagccaagctggaactgggattcctgtaatttgcaattagtaatttgtaattcaacagaatagcacggttatgaagaatgtatatttcctttcggacgcacacctcggctcacgtgccatcgaacacgggcgtacacaagagcgacgcctcgttaatttcctcgacagtatcaagcacaaggcttctgccgtatacttactgggagatatgttcgacttctggtatgaattcaagaccgttgtgccgaaaggatatacccgttttctgggaaagctgtccgaactgacggacataggagtggaagtgcatttcttcacaggtaaccatgatatttggtgcggcgactatctgacccgcgagtgcggcgtcatcatgcaccgcgaaccgctcaccacggaaatatacggcaaagagttctaccttgcccacggcgatggtttgggcgaccccgacaagaagttcaaatttctgcgctccatgtttcacagcgaattcctgcaaacccttttctccgccatacacccgcgttggagtatggagctaggactgaactgggcaaaacatagccgtctgaaacgtgtggacggcaaggagcccgactatatgggtgaagacaaagaattcctggtgctctacaccaaggaatacctgaaaagtcacccgaatatcaactacttcatctacggacaccgccacatcgaactggacctgatgttgagcgccaccgcccgtgtcaccatattgggagactggattaattatttctcctacgccgtattcgacggtgagaatctcttccttgagaactttattgaaggagaaaccaaactataatccatcccaaaagccccccttaaagcgccaaccaaccgcccaatccgatatgaaccttttaagactgaaacacctttttaccggatgtttgcttgccgtaagtacccttccggtatgggggcaatccgcacctacccttgctatccgcatcgacgaccttggagctttccactccgtcaacgaggcttgtattcaaacttatcagtcgggcatcgcccgctcggtagaagtgatgcctgtagccgcctggtatccggaagccgttcgtctgctgaaagaaaatccgggattggatgccggactgcatttagtcattaccagcgaatgggaaaatgtaaaatggcgccccctgacgcattgtcccagcctgacggacgagaacggatatttttatccgatgatgggggctaatccggcctatccgggacagtcggttatggaaaacaaatgggatatcaaagaggtggagcaagaattccgtgcgcagatagaaatggcactgaagaacattccccaactcagtcatatgacagggcacatgctgtccaccggattcacgaaagaagtgaacgaattggtgttgcgactggcaaaggagtacaacctcccttccattgaccgcatggattcacccgaagattaccggttcacctatatcggatatgatggcccgagccggacatcggctgaaaaagaagagagcttcatccgttccctcaataaactggaagccggtaaacgatatctgttcctcgaccatccggcactggataacgaagaaatgagaaccatctttcatatcggctacgaacaagtagcactcgaccggcaaggagtgacagacctcctcaccagcccgcgcgtaaagcaagtcattgaagataaaggcatcaaactaatttccatcaaccagttgacaaaaggacttccacgtagcactgcctctaaaaaactggagaaagctatggaaaaatacctggatgcagtgcagaaagctaaccaggacctgcacagcatcatgatagtgcaacatggcaacgtgcttgccgaaaagtggataggtgaagggaaagaagatgagccgcacattctgaactctgtcagtaagacatttaccgcctcggctgtaggactcctcatttcagaaggaaggctaaaactgacggataaagtaatctctttcttcccggataagctacccgcaaacgtcagtgaaaacctaaaagccatgactatccgcgacttactggctatgacttgcggacatgatacagccccgagcgtcaatacccaggctactgaaactcccgccaaggattgggtggagcaattcctcgctcatcccgtagaacataagccgggcactttctttacttataacagtctcggaacctatatgctttccgccattgtgcagaaagtgaccggagaaaagctagtggattatttatatccacgactgttccgtccactgggcatcgtcaatgtgaagtggcaggaaagcccgcaaggaatcaattgcggcggctggggactatacctcaaaaccgaagaccttgccaagatgggacaactcttcctgcaaaaagggaagtggaatggccggcaagtactgtcggaagaatggattgccgaaacttccgcccgtgccaatggggccaacggacaatatatcctcgtaattcctgaaaaagacgccgttattgccgttacagcacatatcgaagacatgcaggttgaactggatctaatctggaaatacctgctcccggcactgtaaacagatgcttcgtctatttaatcttctgtaaatggtcacaagaaaagggaaatgtacaaaacctttttcaccgcaaccttgtagtatatccataaaccattaaaaatatacagttatggatgatttgatttacagaaacaatgcgattgccgaagagaatatcgacccgcatggtcgtccggcaaaggatgaatttgaagaattcagcgaggaggtttccgaacatacggaccttggatacaaagaacagaaagtaaagtccgcaaaggaccgtaagaaacgtctcaaggaaatggacgaaatagtcaaggaagaaataaagtagctacgagatacaagctacgagctacaagtggctgcgcaattataccgcatggcacttgtagctcgtcgctcgtaactggtagcttatttgtatcccgcaacttttgctatacgtttcgggatttccgtattatcatacttaccggcaaattccttagaacctgcacctactgcatataccggcacatactctgctgtgtggctgccacttgtccagcctatcatggcaatctggctcatcacttttcttgcggtagcagccagcggttcagttttcgaataaagagtttcttcgaacacaaccttattctttatgaaggattgctcaaattcatcacgcaacatcttctcctgttcccaagtcaaaggcaattctttccagaaacccatcttttctaccaacagagccttggcatcttcccaggttacattatgacctttggctttgcgcaaatccgtgatagcagtagaaagtaaatcctgagactgtttctggttcttcagagccttcaaatgtaattcatacttgcctgtacccaatcccaagccaccggtttcatggtcggcagttactacaatcagagtttctttcggatgttttttataaaactcataagccactttaatggcgttgtccatatcaatcacttcttcgaaaactgtggcagggtcgttgctatggcaagcccagtcgatctttccaccttccaccatcaggaagaagcccttgttcttgcctttggtcaggaaagaaacagcgctttctgtgatttcagcgagggtcatatcgccgtctttacggtcaatggaataaggcagacaagaaggattagcaccgtctttctggataagaatcatcttatcagcctgggtggacttaaccttaaagtcatcaatacctttcgcaatggtataaccggcttcctcaatgatcgggaaaatactcggagcttctttcttatcagcggtagtagtaggcttcagaaaaccaccacctgcatagaagtcaaagttagccttcggtaagtcaagggctatttcataatacatgctgcggttaggctgatgagcatagaaagcggcaggagtagcatggtccacactgacactggtagttacaccgactttcttcccggccttcttcgctttttcggcaactgattgaatcacattcttctggtcatccataccgatggcaccattatacgtcttcactccggtagccaatgcagttccggcagcggaagagtccgtaaccgaattagtggcagagaaagtagtggcaacacctacagccggaaactgagtgaacagcaacggcgtcacgccaatgcgtccttcctgttcagccaggtacatttccgtaccgttcacttggtttactcccattccatcaccgatgaaatagaatacatactttgcctgttgcgcatacgtcgcgcctgtcaacaggacaaagagcaatacatacatgaatcgtttcataagttggtatatttaaagtagtttgaataaatgtcgctttctcttaaatgacaaacaaagataaggaatttaccccagtgaccggagcagatattgttaaaaaaataaagccggaaggcaatccgcattgcttccggcattattgttacatcgcgattgcgacgctatctactttaaaaggattatttcttgttcaggatagccattgtatccgaagcaatcatcagttcttcatcagtcgggattactacaactttcaccttagaatcttcagcagaaatcactgcttcttcgccacgaatcttgttcttctccagatccagcttcacgcccatgtattccaaaccttcgcatgcaccggaacgacaagaagcctggttctcgcctacaccaccggtaaatacgatgatgtctacgccacccaaagcagcagcataagcaccgatatactttttgatacgatagaaatacatcttttcggtcaggtcagccattttattgttaccggcagcaacggcagcctccaattcacgcatgtcactggatacgccgaagataccctttacaccgctcttcttattcagcaagtcggatacaccggcagcagtcaggttctctttttccatgatgaaagtcacagcaccggcatcaatgtcaccactacgggtacccatcatcagaccttccagcggagtcaatcccatactggtatctatgctcttaccatccttaacagcagtgatagaaccaccgttaccaatgtggcaagtgataatcttctttccctccggactcactcccagatactcacacacgcgttgtgaaacataacggtgagaagttccgtggaaaccgtaacgacgcacaccatatttcttatacaattcgtaaggaatggcatagaggtaagcatagtccggcatagtttgatggaacgctgtatcgaatacaccgatctgcggtacattcggcaatatggcagagatggcgtttacgcctttcaggttagcaggattgtgaagcggagccaggtcgttgcaagccgtgaaagcatccaggacttcctgtgtcagcaacacagattcgctgaacttctcaccaccatgcaccatacggtgacctactgcgttgatttcattcaaagatttgatagcaccaaattcagggctggtcagtgtatccagaataaactccacacctacggtatgttcgggaatatctttctccagaactttcttctcaccgttaggcaaagtaaacttcaggaaagagccttgaaggcctattttttcgataccaccctgtgcgatcacttctttatgatccatatcaaacaacttgtatttgatggacgaactaccgcagttcaatactaagactttcattttatatattcagatttaatggttatttttgattctttgctgcaatagcctggttggcagtaattgcaatcatgcgataaacatcttcgatggagcaaccgcgtgacaggtcgttcaccggacgggcaataccctgcaaaataggacctaccgcatctgcatgacctaaacgctgtaccaatttataagagatattacctacttcaaggctcggaaccaccaatacattcgcatttcctgcaattgcagaacccggagctttgctggcacctacttccggaaccaatgcggcatcagcctgcaattcaccgtcgagagccaagtcgggatccatctcatgtgcaatctttacagcctcaatcactttatccacaacttcgtgcttagcagagcctttggttgagaagctgagcattgccactttcggttccatgcctactacagacttagccgtgcgagctgtacaaacagcaatctgagccaactgttctgcatcgggcaccggagtcacagctacatcccccattaccaaaataccattctttccatattcaggagcatgcgtcaacaacaacattgcaccggatacacaagtaatgcccggagttgtcttaatgatttgcaatgccggacgaagtacatcgcctgtggtgttgcgtgcacctgccaactgaccgtcagcatcgccattcttaataatcagacagcccagatagagcggattaactaccaacttacgagcttcttcgatagtcatgccttttttcttgcgaagttcacaaagcaattgcgcatactcctctttcttcggatgattctccggatcgatgattgtagccttgctgatgtttccaagtccccattctgttgcacaagcattaatttcatccggattacccagaagaatcaagtcagcaactccgtctgtcaaaatttgattggcagctttcaaggtgcgttcttccgttccttcaggaagaacaatacgttggcggtcggctttcgcacgctcaacgatttcattaattaatctctgcatatatataaattgtgtataaaaatccagtagacgtgttattcacgccgcaaaagtacacaattttgcaatatcaacattgcaattcggggcatttttatgccccgaactacaattattataatatttaacactaacggatgatttctggagccacttgtttgtactggtccatgcaggcaccgatgggtgctccgatataggtgggatcgcaaatcagatatttactgccgtcatccagtaccacatagtctcccggaatgtcctcggtaaagcggacagccgaagcaatatggttaggataatccagcaagatagtgtccagaccaagcaaatctctcactaaagtagagtaaagcattgcgcggtcttcgcagtcacaataaggataatagaatgtttcgtccgggaagtttggcttttcaaaaccgaattgttccccgtccgtcatgtactcaaaagcagtctgcacaaagttgagcagaatattggcagcctctttctgcgatttacccgcaatagcggttttcagttgcggataaagggaagcacgcaattcctcactcatcggtgttttgtagtgaatcacgacatcacactgggggtaatcgtagtaaaagtctatcagattcttattcacttgtgtctgtactttcacagcacctgtagaagaagtcagactcttttcaaattcattcatggagaaagcgggaacaccctctatattcaagcataccaaattcttagcattggcaaagtcctgacgataggtataaatccccatcgaacttcccggtgtcggttcaaacacataatacttattaccgcttatagtaagataaggtgtaccgtaaatagtaccggcaggtgcaaccatcaacttcaactggtcgtcaatcttggcaaggcgtaccttatacccggatttattcagaagaaacatctgcaagaatacaatattattcgtattttcggcaccatatagttgtgttccaatctgtttcgtaaacaacagataggcccagtcgctcaagttcttctccttcttgatggtcatacaatccttcaccatctgctcgtaatccctcttacaaatagctttccaggcatccgccacatcggactcacgattacctttcagagaaagatcgtccgcagcttccagagcaacttcaaaagaagtaccgtaaaattctacaggagtgcgatacaccgtactccccggttttacaggaggtacttcaaccaacacaggagtataaggcttacccggcacatatacgcccggagcaggtttatcctcaatggcaggcaggtcaggacgtttcacatccaccggaaccttctcccccatactgggcacaggagcatccggcaccttcggagcggcaggtttaatattcaccggcggcatcgtcggctttgtcttgtcaaactctaccggtttgggtggttcgggacgttcaggagccggaatcgcagcaaatgcttcatacttctgccacgtttcccgcaagaaggtttcaaactccgcgtccgccttattcttgaaatcttcaaactcttgttgttgctgctttgcgaaatcatcgaattctttctcaatgtcttgcgcacacaagtgtgtcgccgacaaaaagaaggcaactaaagcagcagaaaaacacttcatcttattcatctgtacaatagatttagagaagttaaaataaaaacatgtattacttgataagtatcatgtcgtagaaggcacaacgcttgtcattaggaatggagtatacccatttcaacacattctgataagtcacctcgtccgtaaaaggaatgttttccttggtagccaccatcatcatgttgattttctcactctcttttccttgcttttccatgcggtagtccaccgcattgctgaaaggaatactgtactccttttcggcctgcaacaaggtgttgggttcgtaagtattagggtagagcaatgcgccgccagtactgtcaaaccagaaaaacttcagataggagtccgtgccgtgcactttcaacgtacaggtaaatacatctccttctttatataaattcgctacgcccttcacttccagcgcatacgacttatccactttttcttctttctgcacaacggcatcgatagttaccactttatacaggctacgggtattcgtatcccacacttcctctactttcttgttggtaacattcaccattcccccaatcgcaagtacgttcatctgtgaatatgcctcgtgaaactccgtgccgctctcctgggaaatctgtccgaatacggaccacacattctccatgacaccggctttgcgcaaggcttctttcttcgcttccataaaggcgcgttcttccgcttctttcagcgtgatctcctcactcacttgccagcgcccctgcgcacccttcacctttacggaattctgggcgtgcagcggagcagctattgtacatatcacaaggaatatccacccaatcaggttgttcctattcattcaccatctgttttttttaagaaaatggaattaattaatagcccagtttatccaactgttttgccagttcttctgacttggcagccagttctttacggatagcctgaacagcagcctggttagcagattgcatgctgtaaccaatggtaaccattacttccacattcttgttaggtaaagttttgtatacttctaccaaaggaatcgtacgacctagtgtagcagaaattacactcttgctggaagcaactacgcttgacaagctggcagcttcttcctgtcccatgtcgtcattagcaactttcgcttcgatcaattgagatactttggtctgaatctggcctgccaggtctatttttgcagcattggtagcttgcaaagcagcagccgactgatttccacctaccgctctggaagaagcgatgtaccaatacggattaccttcagtatccaattccgcttgtttttcccaagctgtttccaattgcttggccagaggcagttttcctaccggagtcttaaaaccttctttttccagtttcttggcttctttgcgagcttctttgatagctttcttctgcaaatccttatccaatactttttcctgctttttcaggtctttataagccttacctgtagctttttcctgtgcattcacatttacacaaaacatcataacaaacgctactaaagcgctaatgaataaactctttttcatattcttcctgtttaaaagattaatatttctcttgaaactttatatacaatcgctatcgcaaaaataggcaaatatttctaataatatccatatcacgtctttttttttcattgccctgaaacaaatggaaataaatatcacgggaaacagtgacagccaaactacaaaatgcctaactttgcagcgttttcagtaaacaattcagcttctgattagttattaggagagtttcagcgaagtgacagttcctttaattcctttcagccaaaggaagttgagtttaataataataaataggtaatagtagtatgattcgtcaatgcgccatccttttcggatgcctggctttgggtgaattggttgtttttcttacggatatcaagcttccgtccagcatcgtaggtatgctgttgctcaccctttttctgaaattgggttggattaaactgcaatgggtgcagggattgtccgacttcctggttgctaatttgggatttttctttgttcctcccggtgtagccctcatgctttattttgacattatcgctgctcagttctggccgatagtcatagcttctttagttagcaccctgctggttttaatcgttacagggtgggttcatcaattagcacgcaaaatcaaatgagttacttagacaacgaattcttcttgttagccgtcaccttcggcgtgtttttcttttcaaaactgttgcaaaagaaaactggtattttattacttaatcccattttactcactatcgccatcctgattatctttctgaaaatggcgcatatcagttacgaaacctataacaaaggcggatatctcattgaattctggctgaaaccggcagtagtagctcttggagtacctctatatttacagttggaggccataaaaaagcaattggtccctatcctgctttcacaactggcgggttgcatcatcggagtagtttccgtagtggtgattgccaaactgatgggagcaccacaagagataatctattcattggccccaaaatccgtcactactcccattgctatggaagtggcagatacattaggcggtattccggcactgacggctgccgtagtggtttgcgttggattgctgggtagtatcatcggaataaagaccctaaaactaacgcgtattaagagccccattgcccaaggattatctctgggagctgccgcccatgctgtggggacttccacagctatggatatcagcagtaaatacggggcctacgccagtctcggacttacgctgaatggcatcttcaccgccctgcttacgccaactattttacgattattggggttgctataacaatttctctttatctttgttattctttatattgaaactaacgaaaacgacgatatgatatcatttaaagacattgaacttaaagacaaagaactcattacatcttatacacagcagagtccccgacgtaactgtgacctttcattctctaacctctgtagctggcgtttcctttacgacacccagtttgccgtgcaggacggcttcctgatactgaaattctgggcaggggagaaactggtatatatgatgcccgtcggaagtggagatttaaagaaagtactggaagacatgatagaagatgccaacctggaaggtgaacgtttctgtatgctcggagtatgtgccggcatgcgggcggacttggaagctattatgcctgacaaatttcatttcgaagcggacagggattatgccgactacctatatcttcggaccgaccttgccacattggccggtaagaaattccaagctaaacgaaaccacctcaataaattccgtcggacctataccaattatgaatatgttcctctcacttccgaccgtatacaggaatgtctcgatctggaagccgaatggtgcaaagtgaacaactgcgaccagcacgaaggtacgggtaacgaacgccgtgcccttatctatgcgctgcataacttcgatgcccttggtctgacgggaggtattcttcatgtagatggtaaaattgtagctttcactttcggtatgcccatcaaccaagatactttcggcgtgcatgtagaaaaagcagataccacaattgatggtgcctacaccatgataaattatgaatttgccaatcatattcccgaacaatatacttatatcaaccgggaagaagatttgggtatcgaaggactacgcaaagccaaactgtcctaccaaccggtgattattctggaaaaatatatggcttgcctgaaagatatccctgtagatccggtgaaatggtaagattctttagagcagttaatagcaagtaataaatagttaataaagatagcaagcatttgaataggagatagaaataatgcgcgaaaaggtaaaaaagctatggaagctttgttttaatgataatgacgagtttgtggatatgtactttaaccttcgttacaacagcgaagtgaatgttgccatcgaaagtggtgatgaagtcattgccgccttacagatgcttccctatccgatcacttttcatggcaatagcgtaccgactgcatatatttcgggcgcatgcactcaccccgactaccgtagccggggcgttatgcgagaattgctatctcaggcattcggacgtatgtatcgtaataatatcgcatttactacccttattcctgccgaaccttggctatttggctattacgcacgtgtaggttacgcaacggccttccgttacggtaaacgcacatttcatttaccaaccagtgaaacagatacttcttctctcacttcatctgccgaaacaggctggtgttttcaggcttacacagactatgatgaagatgtctatcaatatatgaatcgtaaaatgcaggaacgcccttgctgcctgcaacatacaaaagctgacttccacgtcatactggccgacctcaacctaaaccgtggatgtattttcactctttcggatgaatttggaatcgccgctcttgccattgtatatcccgataaagaagcttctaaactgtttataaatgaattatttgcagatactcccgaaacagaacgtttgctactcacccgcatttgccaagacatgcagactgaaagcctcgacatcatcatgccccctgttaaagatcaatctgctttcgatctgggcatgatacgcatcattcaagccaaacctgtactgcaactttatgcagccgcacatcctgaagaggaaatgaacattgacctcattgataatgaactttcagccaataacggttattattatctgaataaagggaaatgtatgtatagccacagacgacttccgggtgcacacgagcgactaaccatcgggcaattaacagaaaaaatctttgcttcggaacgagcatatatgagtttaatgctaaactaagcaaataccggcctaacttagttctatttagttaggctgcctgtattcgtcaggagtacaaccacttattcttttaaataacaaactgaaatatctggaagaagaaaatcccagcccatttgcaatctgaagaattgatttatcagtctttatcaaccagttcttcgcaatctctatacgtttaaactgcacatattcatgaaaggtctttcctgtatcatgtttcagcaaatccacgaaataagaagaagacattttaagttgttctgcacaatggctggctgtaggtagtcctttcagctgtacccgtccggcaaaaaaacagccatccgtaatttgtgtacagactatatctcccaccttgctcccggagttacaagtcaaggaaacttaaatcaccaaccactaaaccggcatctcttaagttcctgtctgaggaagattagcgagctttcctgtatctgtctattctttccacggtggaaagaataagcagatgcacgacttctccttaacggtagtagggaaaagaaataaaagtggcggcttggcagcttaactcctattcctttcttattctaaattaatcccactaaccggcaaaaacagtaattcagttacttttatctgtaatctgtatacaacgtttacggagtatcttcggtaattttgcattgtgaatgaagcgaatataaaatccaataaatattgatttaataaagaagtaatatgaaaaagctattcttatttccagtaatattattgtttgcccttacaataacggcatgcagcaattctcccaatggttttgaagaaccggaaactgaacaaccgaaaactcccggaaatgatggtgacgaagataataaaccagaagaaaatagtatgaagattaaaataaccgtaggtaaccgtgaagttaccgcaacgatgaaagacaatgttacagctcgtgatttcctgtcacgtctgcctatagaagttactatgaatgactatgccggagctgaaaagatattttatccggaacctgcattcaacacagaaggtgctcccaaaggacatactccatcccgtggagatattgatttatatgctccctggggaaacgtcgctctcttttataaaagtggaagtcatagcagcgaactgatacatttgggacgcatcgacggaaatggaatagaagcttttgacgtaacaggcaatgtagtcgtgaagattgaaagacaatagaatctaccatcataaaaacaagatattatgaatctgaaaagaataatcattgccatgacggttgttttaatcggtacaggcaatataaacgcacaagatatgaaaacagaagttccaaaaatcagtgacttcccggtaggggaagagaatactggctacgcgcagtatttcacaggtaaatcctggctggcacctttgactaccagcaaagaattaaatgtaccgatgtccaacgttacgtttgagcccggttgccgcaataactggcacagtcacacaggcggacaactactgattgccgtaggtggtgtgggctattatcaggaacgcggaaaggctgcacgccgcctgttgcccggcgatgtagtagaaatcgctcccaacgtagaacattggcacggtgccgcacccgacagttggttctcacaccttgccatagcgtgcaatccgcaaacgaatcagaacacctggcttgaggtggtgaatgatgaagaatacgcggaagctgtaaaagacagaaacagtaagaatggaaaggatgagaatagaattgaattatgcaaagagaactacacccaactattcggtggagaagctttgaccagaggaggaacagatccggaaatgatggatatacttcagaaatatatctttggagaagtgtttcgcacaggtgatctggatataaaaaaccgtgagatgattacttgcgtatcattagccgccatgcagcaactgccacagcttaaaagtcacgccggagctgcattaaacgtaggggtaactcctatagaactgcgcgaggctatctatcagtgcgctcccattatcggtttccccaaagtattgaatgcattgggtgcaataaactccacattcacggaaagaggtatcaagttacctttggaaaaacaggagacagtgacagaagaagatcgcttggagaaaggtcttgctattcaaaaaccgctttacggagaggctatgaaggaattactgaaagacgttccgggcggcatgggagccgacgtagcacgtttcctgactgaagttcatttcggagatttccaaacccgaagcggactgaatacccaaacgcgtgaattattgaccttctgcgtactgactgtaattggtgcagagccccaactacaatcacatctgcaagccaatctgaaagtaggtaacagtaaggaaacactgactgctgccgtcatacaatgtatgccttatatcggttttccggctgcaataaaggtactggatattataaaaaagcatgacactttcttccataaatcctttattgacacaaccgttttagcaaatcttcatgatccgggtaaagtttcgataaacgattgaacgtacccaactcaaaatcatcgaaggtaaaaccgggagcaacggcacaactgaccaatgcatatccgaaatgcgaaggcaattcagctgcaaaccaacatccgggttcaatggcaacctgctgttcgcccgaaaagtcagcagtcatcaagtgagtaactaatctaccatcgggatggatcacatgtagcatcaggggatatcccgcatggtagtaccatacttcgggagaagtcagtctatggaaagctgatttatcttcattttccaacaggtaataaatggaagtcatggctgatttatcgttatcaaccagcttttcggaacgaaatatttctttgtagtatccaccctcaggatggcgactcatattcagatggtttatccagtcaattgctttcatacctatattattattaatcaatcccgctcttccgtgataaacatcatagaaaagcgggatttcttttatttagaatctcttaaagtccactgaagtcaactccttcaaacactaatgaaggaaccagccagctacgatccgtgcgagcatcattaccgatagccaccaacgagttccatagcgtcaggaagtttccggtaacattcatttcattgacaggttgcgtcaacttaccgttctctataaggaacccttcgataccgtaagagaaatcacctgtgttgctattgctgttaccaccattcaaaccggtaacaaggataccattcgctacatcagcaattaaaccattaagatctttatcacccggagtaagtaccagacgtgacggaccgctaatagtaggagctacacccatcttcttggcattataagtatcaaagaagtaagtcttcaacacaccattctcaaagatcggacgatgttccgttgccacaccttcgttgtcgaaataacgcgaaccattggcacctatcacatgcggatcatccattacagtcagcttatcagagaatactttctgatccagtttatcaatcaggaaagagttcttttgctgcaaagaggaaccataaagagcactcaacacaggactcagcatacgtcccgaatttatcggatcaaccaccattgtgtatttaccagacttagctttcttctgtcccaatttacgcaatacacgttccaatgctactgaaccgatatctgttttaggcaatttatcatagaacagggagcttccataccaataatcagacgggcgggcttcaccctcacccttaatggctacactggcagaaactgaataccaggttgatttggattcaccctcaaagccgttactcatcaggcgataagaagcattttcaccatcactgtatgaggtctctactgagatgatacggtcattcttacccataacttctccggcggcagcacgggccaaagctactttatcatccggattgatgccaaagatcttatcatcgaacatctgcaaatcgggtttcccacctgtataatagcgggcaggatctgccaatacacggaactcatccggagccagataacgggtagactcaataccattcttaataaatgtttcaagttctttcttatccagacgattggtagaataattaccgtaacgtccgtctacatacacgttgattcccatgccactttcagaagcctgttgcagacgatccatcttagcatcgcgcaattcaaaagaagtgtttgaattggcatacaatacaactttggctgcctgacaaccattcttcagagcgaaatccatcgcccattgagccagttttttattattatctgttatcatcagttttctcctcctacagttaatttacttactaaggccgaaggcataccgcaagtcaccggacaagactgtccgtccttaccgcatgtccacgtaccgttatcgatctggtcattgcttgccaccatcgtgatgtctgccaatgctttgggtccattaccgataatgttgatatctttgataggctgtgtcagcttaccgtcttcaatcatataaccgaattttacgaagaatgtaaagtcacctgcaccaatctgcacctgtccattggtgaattgttgtgcataaataccattctttacagtagagatgatatcttcctccttcatatctccggcttccatatacgtggcacgcatacgaggaataggtacattacggaaagtatcgcgacgtccgtttccggtaggagccacaccgtaatgcttagaactgatacggtcgtgtagataactggtcaatacgccatctttcacgatataagtcttttgtccttctataccttcatcatcgaagtttacagaaccacgattgaaaggaatcgtaccgtcatctaccacactgatatgttcattacatactttcttgttcaactgatcggcaaagatagaaacatttttacggttgaaatcagcttcaaacgcatgtccgatagcttcgtgcaacaagatacccgaaccaccggatgccatcaccacagggagttcaccacctttaggtttaatggctttaaacatgattgctgtattatctacaacctcgcgagctatcacttcgatgatatcatccgtcataaactcaaatcctttacgataggaacgagtggcgtagttattttccatacgtccgttctcttccataatacagaaagccatataggataccatcggacggtaatcatagtaagtcacaccttctgaattacagaacagcacatgtgttgtgttgtcgctcaaagaagcctgcaccttacgtacacgattgtccaacgcaaagactttatcattcagcttttgcagataaggcattttctccttcaggcttacttcttcccaaggagtaactacagaataacggtctctttcaatcgtcttctccttaaatgcaacaggctttccagccttaccggaagaagcaatacgggcagccgtacgtgcggcacgcaacatttcttccaacgtcacaccttccacataagcataaccgctttggtcaccggctaatacacgtacccccataccgaagtcaatatttgaactgcaattgttcactttaccgtccatcagggctacagcattattaaaagagtgttcaaaataaaggtccgcataatccccacctttttcaagtgcagcagtcagcaccttcttcaggtctgcctccgttacaccgaaatgcttcatagccgcagctacagcagatttgttatccgtgcctcccaaagctccccgtaccgtatcaggtaaggcaagtgacggagcagccagcgaacctaataccgccagactccccatccgtaagaaattccgtctatccatctttttattctttaagattgctaataatcaagttatattctttgtataaaatatgttttcagt

SEQ ID NO: 6332 - DNA, 14342 bp, Unknown
  gut microbiota DNA sequence
aaatccataagggcagaaatgagttctttctttttcattcgcttgccggcttttttttctttgtttttggccataatatattgattattgaatggattgcatatgatagatacaaagaaaacaatttttttgcgaatttgctttgtttctgccttgaaaagaatggggatgtaggcaaaaaagatgtaattagcctgaataattcataggagttagaagatgtaaaggagttagaggagtcaattaataaccatgcaaataaacaaataatgatgaagaaatacaaaatggcttttattttatatctttgcgccattattattttaataatcagtatagaatgagcgtagaagttgcttctctgtctcgggagaaggaaatatacaaagtaacgattgttggtagtattgttaattttgtgctacttgcctttaagtttgtggcaggtattctaggccatagtgctgctatgttggcagatgcggttcattctttatctgattttgtgacggatgtcattgttctcgtgtttgtccgtatttccaataaacctcaggataaagatcatgattatggacatgggaagtatgaaacgttagccaccgctattattggaattctattattactggtgggattcggcattttgtggaatggtgctttttctatttgggcttttatgaaaggagaacaactggaggcacctggaatggtggcactgatagctgctcttatttctattttgctgaaggagatattatatcaatatacagttattaaggggaagaatttgaattcacaggcagtagtagccaatgcctggcaccatcggagcgacgctttttcatctataggaacggctataggtattggaggtgcaatcttgttgggcgaacattggcgggtactcgatccgatagctgctgtgattgtcagtttctttataatgaaggtagctattcaactgttgattccttgtgttgacgagttgcttgaaaagtctttgccggatgaagtggagaaagatattgagcaagcattgctctcttttcccggagttagtgagccgcatcatctccgtacgaggcgtatcggtagttattgtgcgattgaggtacatgtgcgcatggatggagggattacgttggaagaagctcatactacggctacggctattgaacataaattaaaaacaatgcttggcgaaggtacgctgattaatattcatgtagaacccaagaagtaatggaaagtatattaataacaggagccagtggatttatcggaagtttcatcgtggaagaggcgttgaagcggaagttcggcgtgtgggcgggtatccgttcgagcagcagccgggaatatctgcgaaaccgtaagatacacattctggaactggattttgcacaccccaatgaattgcgtgcgcagctttccggccataagggaacatataataagttcgattatatcatccattgtgccggtgtcaccaaatgtaccgacaaacgggagtttgaccgggtgaattatttgcagacgaaatactttgtcgatactcttcgtgaactgaatatgataccgaagcaatttatctatatcagtacgctgagcgtgtttggccctgttcatgagaaaacttatcagccgattacggaagaagactcccctatgcccaatactgcttacgggctgagtaaacttaaagcggagctttacttgcaaagtattcccgcttttccttatgtcatctatcgccccacgggagtgtacggtccgcgtgaaaaagattattacctgatggctaagtccatcaagcagcacacggactttgctgttggctttcgccggcaggatctgacatttgtttatgtgaaagatattgtgcaagctgtattcctcggtattgaaaaacaggcatgccgacgcgcctatttcctggcagacggacaggtgtaccgtagccgcgctttttccgacctgatccgaaaagaattgggtaatccgtttgtaattcgggtgatatgcccattaattatattgaaagttgtatctttgctcgctgaattctgggcggtgcgtagcaagaagcccagcactctcaattctgataagtataacataatgaaacaacgcaattggcaatgtgacatcggcccggctgtaagagagttgggatttgcacctcagtacaatctggaacaaggtgtaagggagactattgcctggtataagaacgagggatggctttagatttatttaaaaaggtagaaacccggaaggggttatttgcagttgagaagataacacttatatataatttgttgacttcgattttgatcttgtttctttttcaggaaatggatcatccggtgcagatgttgattgaccgcgcaatgattgcgggcatgacgtttttattgatgtatctttaccggctggcaccctgtaagttttccgcctttgtgcgtattgctatccagatgtccttgctttcctattggtatcccgatacgtttgagtttaaccggatatttccaaatctggaccatgtgtttgcttcagtagagcagtggatgttcaacgggcagccggcggtatggttctgcctccgtttcccgcatatgtgggtaagtgagccgttcaatatgggatatttcttctactatccgatgattttgattgtggtagtgtggtattttatttatcgttttgaacttttcgagaagttgtcgttcgtgctggtcacctctttctttatctattatctgatttatatttttgttccggtggcagggccgcagttctatttcccggctatcggcgatgataatgtggcgcagggtgtgtttccttccatcggagattacttcaatcataatcaggagttactgcccggaccgggatacgatcatggattcttttacaatctggtagagggttctcagcaaatcggtgaacgccctacagctgctttccccagttcgcatgtgggaatttccactatcctgatgattatggcgtggcgtggtagccgcaggttatttgcctgtctgtttcctttctatgtactgctttgttgtgccacggtgtacattcaggcgcactatttgattgattcgattgtaggatttgtttctgctttcggactgtatgtgatggtgacgtggatgttcaagagatggtttgcacagccgatgtttaagtaaggtagcatctatatatcctacgcatcccatctatatgacggacgtgcagcatctatatatcctacgccaccgatatatagatgctaaaggaacagtatgtatagcatagacagtggtactaagacaagaagcactcataccgtcggcaataaaccggatatagataatatgtaagattattcttataatagtgtgaactcgatataattaaaatagtgtaggttgcccgtccttgataaatttatatcaatgacgggtttcttatttaatacgagtccttctgtgaccgagtatgtttgttctaataaacagtcagcccttgctttgtttgtgctgacaaagcaagggctgagaaaacaatactaaggtccgtatcgttttatttcacactttttgtagttgttcccggtggaacattatcgtctcctcccggtgtagtgcgttcggtacggaaagtagtgtaataactatatcccactccattcttatttttggcataagcacgtacataatagtaagtatatgctttcaaaccggtaaggttgacggtgaaagtcttactctccttatccaaagtggctttcacatgactgtccttatctatggttggttctgaagtgttttcactccaacagaagcctacttcactgatttcaagttcttcgcttccgtcgccgccatcactggcaatcttgccttccatggtggcagtagtgctgcctatcgacccctcttttaccgatgcgttggtattcggggtagaagaggtggaagtaaagaagttggtggccgaactataagatgtacctttggcattggtggcataagcacagatatagtagcgtttctgataggttaatcctgtcaattcggcggtgaaggtgtcatcggtggatttggatattactttgaggactccctctgcgcctattgtaggactaactactgtggtggaatatacaaatcctttttcagtgatttcaaggccacctttatcagaaataacagcttgggcagtggaatgatcgtcgtggacggcagtcattgccatgttcactacttcaggagcttttgtcaaggcagtggtaaactcgaaggcaggactgtagccggtgccgtttacgtttttggcgtaggcacgtacgtaatatttctgtcctttggtcagcgaagtcagtttcaggctgaagttgtttcctgtaccttcggctttcataaacgcatcgttttcgagggtaggagtcgaggaggtactactccaacagattcctttttctgtgatatcacgtccgccatcagtcttaatagtggcatttacggttgcttccgtttcacctactccggtgacttcggagatggcaacagtaggctcatacgtgcgtcccagagtgaattgggtagcttcgctgtagaatgtaccgtcgcgtgttgtggcataagcggtggcatagtaagtagcgccctcgttcagatctttcaggtttacactgatagcgtttccttgactgctatccacggtgtgttgtccatctgttgccggtttggtagagaaaatactgtaacagatacctttctccgtaacttctacacccgaaggcactgtgatggtactgcttaaagtggcagaggttacttcgatcttgcttgcttcgggcttggtcagggtagccacctgtttttgttcagtcttgaaggtgaggatgttgctatatcccgtacccttctcattggtggcataagcgcgcagatagtaagttgtttcggggttcagatcctctatgacttcactgaagttggctgtttcactattgccggtcactgtcttcaggttttcgatggtaggtacttggctttcagtactccaacaaaaaccatattcggtcagcttgaagcctccgttggtgctgacggtggcagaaggcgtggcggcaaaagccgtaacggtgcccatgctgcatgtcagttgaggaatcttcaactcttcggttgtgaaagtgacggcctctccatatccggttcccgccttgttgatggcgaaagctctgacgatgtacttggttttggcttgcaggtcggaaatctggacactgaaagtttcggcttccaggctgacggaccgggttttgtcagacgtggttggctccggcataccttcctgataaactttgtaagcaaacccgcgttgtgtaacgttttgtcctccattatcggtgatgtcgctgcttagcaatgctccattttcattgatgttggtggcgatggttgctgccggtacgggggcagtacttgagagggtctcaaacttaattacttcgcctttagctatgctgcctccactgcgggcacaaatgctgtaacagtattcatttcccggagttaatccgtcaatggtacagacgtatctgccttccgtcgtattgtccggggtggctgtaaattcttccgcatcgactaaagtatttcctttggcaaaaaggaagaatacctctgctttcacaacgctgtttgcatgtggcacaacgctaccggagagaagggcctcgaaacgggtcagctctgcggcgctgttggtcaccagcgtgggcggatatgtctgcggctctttgtcctcactgcaacctatcaggcagaatagaagcaataaagggagaaccacgttctttatctgatttattttcattgtaattcgcttgtttagtaggttagaatacaaatcccagaccggcggttgcttcgtgatacttgaaatttacagtgtggaaacctgccgaaatacagaacttgccgaagcgcaggataccacccagttcaccggctacacctgtggctgagttatcgatatctttcacctgtgtgccttcagcatattctttgtcacctattgtcattggagctgccagttcgtaggtcagtgtgcgagtaccgtatccggcaccggcatagagatagaacttcttgcccagttgacggaagtaaccgcctgtgatagacatgcgtgatttgtttttcgttccttctttatagaaaggagcggtagtttcttcactacctgttatgatgccgttctcatcgcattccagttcaccgcttgccgaaccgaagtcgctacggaaacctacatagaaaccgttcttgcgtccgaatcccagcatggcaccaaaggtggttccattaggattgtatccggcctgaagcatgacgagagtattcatcggtactttaggcttgatagtagattccatgtggaaggtggggcgaactgtttcaccggcggtcacgttcagtagggtgtcgatggggaagtaagtttgcttctcgatgcgtactttgtattccttgatggccatacggtcgctgcggtaaggggttttacctaccagaacgctgtcgatataaacgtcggcatcctgttcgggcagtgagaagatttctacgtagccgaacttgggtttcagggtgacactcttgattacctgttcgctgcccaatgtaacgattccggcatccggttgatacatgggagcttctacacggtaagtatgttcgcctttgggcatggttgcagagaagagtccgttttcgataggcacttgttcatcatctacatacacgttggcgttggcaggttcgggacgcagtacgaagaactgcatgttattttctacaacgggcttgtcttcgctgtctccggtgttcagcaccatttcgtatacggtgcctttttcaatgatgtccgggtagaagtagtttcgcaggatacccagctggtcatgcaggatagagatacgacgtgcgccacggggaacgtaaagccagatttctccgattttgttctcacgtgccgtgatgccgagtgcgtccggttcaaacatcaggtccttcacgttggtcacgatgcggatcaaggcgcagacctcaccgttctggtctttctttggggcggttacgcgtgccgtgatgtccgtttccattcggttaaacgatgctacggctattttgctttgttgtgccagtgcggcggggcagcagatcactgctaccactaccgctgccagccagcattttagtttgtttgatttcattctattgttcgtttattcacgtttctatttcgttctcaattctcttggttatcgtccgataacgactttctgaccttccagcaagtagatgccactgtccagtccgtgcacctcgttcatgccttcgcgggcttcaatgatgcgtacggtacgtccggtaacgtcgtagatgttgatggtacggtcagcgtttgtgttgatgtagaggacgccgttacggctataagcttttgttgctttttccggagtggcgaatggaatgtcttcgatgccggtgatagtgccatcaccgccaccgatactgtagagcatgggggcgctggctactgaggtcttgccttcgttagtggctagataggcgcggaaaggataaacggcgggatagctggaataattctcattataattctttataaatacactaccggcaggataattcttttcatcgccataataccagttgttttcattcaagacatatacagtatcatgttgcattactccgtcatatgttggtaccagatcgaatttggttcctttactacgtttcaatactccttgggtggttccaagtgtgatgccattggctgcatcggaggcagcaaacttaacttcaccattgatattgttttcactgggatacttatcattattcggcatacagatcagataagcttgatgtgccttgatttcagtggcagctttatacttaccgtctgttcctaattcatagagccagaaaggcagtgttccggcagtttccagagctttgcttccgaagggggccagtgcaatggtttcttgttcttggctatatcgtttagagtaggtgatttccttcacattgaaaggcaacacaattgtttgccagccggcagcttctccgtaaccacttgtctggttgaagtttctggcataagttaccttctttgtcttcatagccttgctgacagagtagcggttgtttgagtaagcaatggcaatcgaatcagtaataccattgtagaagatatatccaatgttgtctttgctgctaattgttccgtccgtaggtaaatagagattatctatctggccgaatttatctttggggaactgggtggaagaattccaataaacgttggatagatgatagtagttactgtgtccgttctcataataactgccttcacaacggaaagctgaatttcccatttgtatattctcagaaggggtgatctccaaggagttcctaatattagcactatagaatgcactattacctatagaggttacattacttggtatcacgacttgatcgtaagttccattactgaaagcttcttctccaatgctcgtaactttagccggtattgttaagttattgattcgactgctatttaaagcatatctaccgatagaagtcaaagctgccggtagattgatttcttggatgatgcaattgcggaaggcataatcttctaatgaagttactgtttccggtaattttacagtgcgcaagctatctgtatacgcaaaccaatccttaatagaagttagtgaagtagctgaaaaatcgatgctctttatctttttgcagttattgaaagcattatccttaattgtgctgaaaccggcaggtaaggttaatgaagccaatgaaaaattctctgcaaaagcataattgctgatagttgttaaggtagtagggaacttaacactgcgtaggctatcgcaatcataaaaagcataatcaggtatttcctccagtttgcagccggataaatctatgcttcttaacttttggcatttatagaatgtacagaaaccgagtgctgttaaagcggcttttcccatatcaatgctttctagcttactacaattataaaatagtcctcttgctgcactttcataatacttttcttcgagatagaaactcttctgctcggtgttaattatttgggtcaaagagttaggtaatttgatacttactaaactattgcaattagcaaatgtaccataatagagttcctttagtccttcaggtaggctaattgaagtaatgccagtttcgcggaaactgttgtctccaatataagatagagtggtaggtagcgttacagtttttaaactggagcaacgagcaaaagctgcactttgaataccttttacgcctgaagggatggagatgcttttcaatgatcgacaaccatagaatgtagaagtaagaatggagtctatggcagtgggcagagtaatattttgcaaagtatcgcaactaaagaatgcctttttgccaatctttttgatagaattgggtagggttacagttaataaactgtcgcaattggcaaatgcaccttcactgatggcttccggtgctgctccttctgcaaaaagtatattcttaacaccggtattgctgaagccgccgattgttttcatactgggtgggaaagttacggtctttagcaggttacaaccagagaaagaattattattgaggctaacaacaccatcacttaagataacttctgtcaatccactgtttcgaaatgctccttcattgatagtctgtacgccaccagggattgttacctttcctaacgaactacatccatcgaatgcataatcttgtatggtcatgagaccgctgggaagaacaatatctttcaactttttgcagttctggaatgtataggagtagatatccgttacgttaggagggaagttgaggctttctaagtccttacagttttgaaacgcatacgccttgatttctgttagactttgaggtagttggactttctttaaagctgtattagcaaaagtataaatacttaataatacaagtttattgggtagagtgatttcgctcaatgcggtacagttttggaaggcacagtttccgattgttcctgtttctgtagaaagaatgaccttatttaatgcggtacatccataaaaagcgtatccattaatatctgtaacagtgtttggaattgtaatagatgctaatgcggtacaattcataaaacaacgtgtagggattttgtttaactgattaggtaaagtgacggatgttagtgaggtacatccggtaaagcatccatcttgatagtctgctccccaactaacttctctaccgtcaggtaatgatgtcaccccattaggtataactaaagattttaatccgctacatcctacaaaacttccagtttgtgtcaatccatcaggtagttttaaagcagttagtcctgaacaataactgagcgcactgttaagccgtaatatgctacttggcagattaattgtttttatccctgtacaaccataaaacatattgggagcaaggcgtctgattccatcgttcaaagtaacgttagttagttttgtacattcccaaaaagtaaaaccaaaggagctagaacttccgttatagttgttgtcattgttgaaatgttcatctctgagattatacaaagtcagtttctttgcagttcctaagcttgaaggaattgatactgtagccaattcctgacacttattaaatgtataagaccccatagcctctacaccttcaggaatactgattgaggttagtttgatgcaatagctgaatgctttaggacctatccataacaacgtagacggaagttctatttcttgcaggttgacgcaacgagcaaatgaagaacagccgggatactgggtatcatcatcactgctggcatcgctttttttagggtcaccacttacttgtgtcttttcctcattccacggattatccttactccatgtaccaatagaccatactgtctttggcaacactacttttgtcagtgccgtcatcccatagaacatataatctccgattacatcattctgtgtatagttagctgttgagcctgtgccacgatagctcgtcactttatcttctacaatattagcctccttcaggttcagtattttcagtgtacctgccagtgcgcgtattgttagtatatccgctccgttcagcgggccattgataatcagttcgtttattttagcccggtctgcttcgcttgccgggagtttgctggaaagcgttccagcttgtgtcaaagtcacgcttgtctgtgcattgatgctcaagatgcttaccagcaccatgcatacacttacatagaaatgtttcagcttcatagtcgtatattttttattattatttttcattggaagtttatttattactgcgggtgtctgttcccggtgtcgggttatcaccctctccaggattaggcttatccgcatcttcggtggtgaaagtagtgtatcctccatagctgatgcccttggcattgatggcgtatgcacgcacacgatagcgggtcttgcctgtcagaccggtcagtttgtggcgcatggacatacttccggaagtaacagtaatcttctttccgttttcggtagtgagttctgttccgtcatccaccatccaaaggaaccctttctcggtaatggtcagtttgccatcgctttcaatgttggcgctaagccaggctgttgttgcatatacttccgagacgtttatatagcctaccgaaggtttcttggttccgtcatcatctcccggagcgggattatcatcttcacccggaggcaatttagctgtattgaagttgttatgaccgacggtagtttctccgttcttattggtcacatacccatacacataatatccgctgttttccgtcaatccggtaattgtccctgttaccgtatttcctgtaagggtgcccggtgcattggtatattcgctttcaccagattttctccatttgaaaccttgtgccgtcaactctgcacctccggtattagtgacctcaaaggagaaactaaggctgtgcgcctcactcttagtacatattaactctcccaatgtggctctactactgctacccgtctcgaaggagagtgcctggctgtatcctgttcccacattattagtagcgtacgcgcgtatattatataaagtcttatagcttaatcctgttagttgcgcagtgaaagcctctttagtgtctttcgatacaaacttcagcgagtaaccgtcatctacacttggattgctgccggtagaaaccacgaatccacgttctttaatcgtttctccgtcaccgcctatgttggcaatgttggcactggcctgtgcattatcatctttgatattaatcacattcagaccattcagtgtaggttccgtatgttttgttgtggtaaactgctctacggtgctataccctgtgcctttggcgttagtagcaaatgcgcggacgtagtaggtgacaccaccctgcaaatcgccaaggttgacgagaatattattgtcagcttccgtagatatcgctttggtgtcctccaaagtcggcttggaatttgtgctgctgtagcagacccctttttccgttacttccagtccgccattagtcgaaatggtagctttcactttggcaccattctccgtcaggtcgtagactctgggttgtgctacggtaggtgcgaatgtagtttctgtattgaactgaatgtcaccgctgtagaatgtaccgtcacgggtgatcgcataggcacgggcatggtaagtatctccttctgtcagtccggtgatggtggctgttactttctgctcggtgctgctgtccgtaactttacctccctctacggtggggttgggatctttgccgtagcagatacccttctccttaataacgctttccgtttcgtaggccattagggctgtgatagtagcggtagaagatgtcagagcagtaacagtggcttgtgtcagcgatactacctgctctttatctgtggtaaattctacggtcgaactgtagcctatgcctttttcattcttggcatatgcacgcatgtaatatttggtactggctgtcagccctgttagcgtagcggagaaacgttgtgctccatccatagcctgtaccttctggctgctttcgacggtgggctgacggctttcggtactatagcaaaaaccgtattcttccactgtgaagccgtgatcctgagttacggcacccaggcaaactgcttcgtaagcaaccgcttctaccggtttattggcaaggctaccggttccattcgctatgaccatcggaatcttttgttgagtggtggtgaactttaccgattcaccgtagcctgttcctgcatcattggtggcgtaagggcgtacaatataggtggtgtttgccaccagatctgtcagttctacggtgaaatcatcaccgaatggcagtttgatgttgtcgtcaagggtaggttcggcggcattttcaatataaatggcataagcgaagcctcgtactgtaggctcgtaaccgccattgtctgtaatactggcagagagggtggcactgtactcggtaacgttagtggcctcggcgatgcttagtgaaggcggaatagcgtcttcagtactgaaactgctgctctttcccttgatgacggacttaccgctacgagcaaagatgcagtaataatacttttctccgggcttcagtccttggactgtggcagtatagttgttgccgtctcccggggtagcgttgacttcttgtgcgttgctcaagctggctgaggtggaataaaggaagcctattttcagttctccggtactgccgggatgcttcatcaccgttccttggaaagtagctccaaaacggctcaagcccgtaacactgttggtagtcagtgtcggtgaataaactgaaggctctttgtcttcttcacagcccattatgaacggcaacaagaacaatagcatacatacatgtctaatgacgtgcgcatgcttaaatgcgtattgttgacccataaattaagtgtgtaaaatgttgtttaataatcttcgttacaaatatatatataatttctgtcccgttattctttttttattccaataattaaaagatgttagtaaaatattttgtttgtaacggaaaaccgtgacaaaagaattgctgtcctgctattttattgcatgttcaccacagagtagcacaga

SEQ ID NO: 6333 - DNA, 5320 bp, Unknown
  gut microbiota DNA sequence
tctataatcattgtttcattttcccaattcatcttgtctttcaatatgttttccacattagccagtgcatagatacacttcacactttgtgtagtcttcagtcgcgtccgatactcaaaattgtctgttgttgttttataatccaataacctgtttaactccactttcttactgtctttatctattacaataagacgcaatgtctttacccgttcacactcgggcttattggagtcgtcttgaggggcagccagcatcacattaaggtccaacaacacaggtttgggctgttggatgaactgttctatgtcctcattgctttgacagctgcaaagactggaaagtagtagggtgaacagaaggataatatgtgctgttttggttatcatgggttgtttttacatttctatattgtttatacgtacggtccagccgttaatggtgattcttacattaatcatgttgccgttggagctttgcgtgaagaaaaagacgataacgtattcgtcctcacggtccaggtattcttgttggggatgttcacggtcaagcattttgtccagcgaaccttcggtaggcattagcatgatatactctatgaggtctacattgagccataccttgccggtggtcttatgccggatggtaagccgtggatgcgtaccataaatcagtcgattggtattaagttcagcacaagtagtggttagtactacgttgccttcggggtcgtggatatcgccatcacccaagtaataaggggaataggtgaggggtaattcttcggtaaccgctgtgttgttataggctaatagggcgttgttgtccgtaatgctgaattcaaactcatcggaggggacgctggaggatgtattgttggcgtcggcctgtatgataagacggaaggtattggtatctttcattagtggaaagcggatgtctgatgttgcagcatcgggtatggttacggtttgcataccgtagaataggggcacgagatcacggtctacgttttgtgcttcggcattcatccgaacgctgtagtccttgatgcgtgaatttgttctgtcggcaggagccaggcagaggtaatcgtcgctgtttagtccggtccatgccaatatctggtaagttcctggttgtagatctagcagaatattgtttcttcgggcttcttcagcggagatattcatctccttcagatagtttccttcctcgtcaaagataaatagagagacttgatccgcttcgtgttgccaggcgtcggcaaatttcatgttgtagtcataaacaaaatgcagatagtgctcgcagggaggaagaacctcgtgcacaaaactgcacgccgccaacagcagggaaaatgccagacccatgacggctgaaacggaatgtatataagcagaacgtctcataatgaactgtttttttcaagtaaaggttaggaaaaaacagccggaaggcggatgcatgaatgccttccggcagagtcttccttatttgtatgctaaaggattaaaattcaatatcgtttacacgaacggtccagtctaaaatttgaacatcgacttccatataggctttgttctgttcgtccggcttaggaggattaacaggatctggatccggttcttgaggatcggtcggattagtcgggtcattaggatgtccgagttctgagatttttgaaattgacagtttatatatattgttacgcactacggcaaattccataattcccatattagtattctgtccattatcattgtggcggttccaatagatgtaataaacattgccatatttgttcccatccactccctgaattgggattcttttggctttaccgtttaatgtctccctgagagtcttcaattcttcgcttgtggtgggttcgttaacagcttctaatgaagtatttcccgaaatattccatgcttctttgaatgaattccaactgttatagaaacttccattatattcataaagagctgcagtgcttgcctcattgataaaatcaccgctaactttagccttgaatactacagctgtagacagtccgttttgttgagaagctacgctgggaacagtgttttcggtacagtagcccatgatataatacgcaggatctgctgtattctctggttctttaaaatctaaaggtaagtatggctcgttattttcttctttatcaatctcgctgttggccagtggagtgaaaaatagcccttttcttatagccaaagcttctgatgactcttttccgccttctgtgatttttgataaccaggtctttttaccgttggtactattccagtcacagtccacaacataattatttaccgtttctgcaccaccataagttattttagtctcatccggatcagtactgtctccttctttcttcgctgcaactcgtttcaggtgatagaatgatttggagacattcattaatttatatccttctagtgtaacagtcagttgagtggcatttgtatttctatctttgatttcatattcattttcatcattcgcggctttgtagtcgaaacgtgctacagctctttctactttggctgtggctgccagtttataatttccctcttcagctacaaaatgtacagcctgctttctgtcggggccactataatttccagttcctacgttggtatcggtcataaagaaacgtcctttggctttatcggcatactttgttataaacccagttacagtttctgcagtagccatttctgattggtctttccatcctgtctgtgtgagctttccgttataatagttgtatatctcggaggtcggattaacaaacgcataaacagcatagtatttatctgaatttgtgtctaatgtcacattgtttatacgggcggtataagatttatcgtttccgtgtacaccctccgttgttttatctggactttgtgctatacccactgatttcacaaagcagatttctccttcctctttcacataatatgtctctccttcttgctccttatctttcacatttactacaacaaccagtacttctttcacagagttttcgtaatcttgtccatcttctgtttcagtcgaaggactggcagttctcgtagttatcggcatcttaatactaacctccatataattctgtgacgcagtagatggaggaatattctcaccaccttgcaatttgtcatcactgcacgaccatgccaatataggcaccaatcctgctaatagtaaattcctgattttcataattgttgctttttatttatacgttaattaaatatatgatcgtaactcttttttatttattgtttatcaacttactttctctctttcagctgtttttccagttctttcagcgtctcttttgccagctctttctgcgggccttccattgctttttgcaggtagcgatgtgcagcctctgcatcacgacgcattaacgctgcatttgcagcatttaggttagataccggatcgtcgggatacatgcgtacggcaatctcaaacacttcgttgaactcgggtgtacccggttcatagctttgtgccacccggtacatctcttccaaacttaattggcgagggtcagtatatatcaattctttggcctcctctacggtgaaattacgaatggtatatttcaccaggtaatccgaatggcgtagagcagggaaccactcacgcagcatgaatcggtagacatccccaccacttatctccatcaacttccgctctctgccgtcgaagatgtccgttccatctatgatggcgagtatttgctctttttccggaaggtccgaagtttctgtcatgcggcgtaatccttcccaatcttcgggttcggatgacacggagaattcggcgttgccaaaatcatacagcccacgcacataattgcgcagggctgtggcacgtccctgcgcaagccgtgcattgttgctatagctaccctcaggcgatgcatatcctttgatgtcgacggctgtgatggtggcgaaacggttgttgcgtaccgagtcgatagtggcctgtatctttgccaactcgcgcgggttgttgcgatattggggatgaatctctgtccggttgacgggaaaatcgaggaaggcacttcctgccagttggcgtgtcttcactgcttcatgcttcggagcgatgtattccaccagtagttgaggctcttccggttcgcggaagtccatctgtgctaccggttcggtactttgttgtaacacctcccaaccgcagccacaaagatcagtaatgagctttagttcagactgttccatccaagggaggtaaggaatgcgtacgttgtattccattgtctgagcggtctgccccttacgttgtacaacgtaactggcattgcgttttttggccggaagccgttggtaaagtagatgccgggtgcgtccattaatcagcattgcgggcagtgtatcctgatgtccgtcacccgaaagtaggggagtgagctctactgaacgggaagattttacaatgagaggagtgagatccaacgtcaggtctatcatcaggaaagaatccacgcgttgtacagactgttgccgtacaatcacttttcctgaattttctccttcgtcatgggtagcagtctgtgtttgtgccacagatgtgttagtggcaaatagacaggctagtatataaattataggtttcattgattttgtaagtatgttgtttactattaggagatcagaacatataaacgaggcttactgccgctttcgtgggacccacataattcttgtgtcctttatcgaggcgtgttccacagcttgcacacggatatttgtcatacttcacgtaaaggtagccaacgcccactgaggcttccagattccagtgcctgttcagcagccattggtatccgaaactgatgccgcctcctgccatccatccttgaaaccgataatcggccagttccggaaaaatatcgaatggcaattctattccggcagcattaaattcaccacccagtgtgtgtacacctataaaacctttataaaacggttcgcagaaccaataacggtattcaggttgtaataaccagtgtttccattgtttgtgattgccaaattcgaaaggattgatgcttccaaacagagaaatggtacttttggcagatacttttgtctctatgccaccattaatggaagcagttccccatcccagtagattcgtcttgaccgtaacttgagcacataaagtgccgaattggaaccacaaaaagaaaaataaaatgaattttctcatcatcattatatctgtcagttttgttgta

SEQ ID NO: 6334 - DNA, 26916 bp, Unknown
  gut microbiota DNA sequence
cttggtgatccgcttggggctcgaacccaagaccccaacattaaaagtgttgtgctctacctgctgagctagcgaatcaaacctttattgctgttaagcgggtgcaaagataggtacttttatttaatttgcaaggaatatgaggaaaaaagtttgcattatttttcttctataccctctattggttgatcttcagtggtttctgtcttataaatattttcttgattaatgatgtatcgctgataataggagagcatcagagtggtaagcggcaaagctataatcatacccagcattcccattaacgatccccaaatggatagggagagcaggataatagccggattcaggccggtaatctttcccatgatacggggaacgagatagccatcttgtatgatttgtactactataaatacagcagcagccgaagctatgatgatccagaagttatcaccggtatccgcagctttcagaatggcaagcatgatggtggggacaaaaccgatgatttgtaggtaaggcaccatattcagcgcaccgataaataatcccaaaccaatggccagcgggaaatcaataatcagaaagccgatactgaatagaatgcctacgcacaaagctactaatgcctgtccgcggaaatatctgttcatgccgtcttttacatcattcagtatgccggttactgttttccggtatttctttggcatcaggtgtgcccagccttcggaaatgctttcgtaatcaagcagaataaacactatatataataggataaggaagacggtgaagaacccgaataagaggttgatagactccgatataagcgaccatagtttaggaacggttactttaagggcatccaatatattctcctggctgaacatttgctctaagatgtgaaggtcgatattctgccggataaattcggagagggtagtggggacattacttgctgtatgagtggtgctgaagtactctatcaataagtcctttacccgcaggaattcctgaatcatgggcggcacaagcagatagaatgcaacgcttcctataacgctaagggtaagcaaggcacaaaagatagatattattctgttttttagccgtagcttatgctggaagaagctcaccaacggatatatcagataagcaataagccaagcaaggaagaacggaagcaatacgccgctcaatcgcttcaggagcattaataccccaatgatgatagcaccgagaatgacagcacggataaaactgtcgaatgtaattttcttacgctccataaggcttttgctttttatttatagtttatccaccggtggcagtccggtccccctttattgcccgcagataacattcccggcagaggggttcgtattcggctgtttctcccagaaggacttgtttgtcgttcttgacagtgcggtgtgagaaggaggctaattgtccgcacttcacacagatagcgtggaccttggatacttcatcggcaatggcgcaaagtcccggcataggaccgaagggaagaccgcggaagtccatatccagacctgctacgataacacgtatgccattattggcaagctcattacacacatcaatcagaccattatcaaagaattgcgcttcgtcgatacctactacatcgatttctgaggtgaacagcaggatacttgccgatgaatcaatcggcgtagaagcaatggaatggctgtcgtgagatacaacctcttcttccgaatagcgcgtatcaatggcaggcttgaatatttctacgcgctgtttggcgaatttagcgcgtttcagacggcggatcagttcttccgtcttaccagagaacattgagccgcatataacttcgatctttcctctacgattggtttcctgtatatggtcttccgagaataataccattgttctaaaatgtttattttagccgcaaaaataacacttttaatggctttccgatattttttcattatttatttctacatttgcggcattaacatttgtgatgcgaaaggaaatgcagacattattggacgacatagaactggatattcaggaactgaaatatttaatgcaagttcttgcaacagacgccaaccctacattgaaggtagtagctaaacggaatatacagcagatgcgtgcacgactggatgctttgcagaaactgctggacgaaactcccgtagaggaagttgccattcctgaagctcctgtcgctccagtggttattcccgaaccggccgctgctcctgaaccggtaaaaccgactcctgtagaagaaccggtcgttgttgaaatcaccaagccggtagagattgtatctcccaagcctgagtccgaatccaaccccaaacccgagtctgaaccgtccgcaataatatcttctgcatcgcctattttagcagagcggataaaaccagccactgatctgcggcatgctatcagtctgaatgactcattccgttttgcccgtgagatttttggtggtaatactgcccgtatgaatgaagtaatacaccaattgggtgctgctccttcattggaaaaggcattggaactcttttcttctaccgttaatcctgatgaagagaatgaaacggtggttgattttatagaacttcttaagaaatacttcagctaaagcaattacggatatgggaaaactttatgtagtgcctactccggtaggaaatttggaagatatgacattccgggctattcgtattctgaaagaggcggatttgattcttgccgaagatacgcgcacttccggaatcttactgaagcattttgaaataaagaacgcaatgcaatcccatcataagtttaatgaacataaaatggtggaaagtgttgttaatagaataaaggcgggtgaaactgttgcgttaatatcggatgcaggtacaccgggaatctctgatccgggctttctggtagtgcgtgagtgtgttcgcaacggtattgaagtacaatgtttgccgggggctacagctcttgtgccggctttggttgcttcgggcttgccgaatgaaaaattctgtttcgaaggttttcttccgcagaaaaaaggacgcatgacacgtctgaagatattggcagaggaacgccgtaccatggtgttttatgagtctccccaccgtctggtgaaagcgctgactcagtttgcagagcatttcggtgtggaacgtcaggcatctgtatcccgggagatctcgaagatacacgaagaaacggtgcgtggcactctgactgaattgattgagcatttcacagccaatgacccgcgtggagaaatagtaatagtagtagcaggaatagacgattaaataacttcattaaccaacgtaaaacaaaagcgtatgaaaaagttagcagttttaattgtatgtgcggccgttatggcatcgtgcgacggcttgtcaggtggaagtaaagaccaactgaaagctgaaaatgattctcttttgatggaacttactcagcgtaatgctgaactggatgaaatgatgggtactttcaatgatatctctgaaggcttccgccaaatcaatgccgccgaaagccgcgtagacttgcagcgtggtgcggtttcagaaggttctttatcagctaagcagcaaatagccactgatattgaatttatccagaaacaaatgcaggaaaacaaagagcagatcgctaaactggaagctatgctgaaaagtagcaagaataactctacccagttgaagaaagctgtagaatctctgacccaggaattggtagccaaaacccagcgtatcgaggaattgcaggctgaacttgcctccaagaatattcgtattcaggaactggatgcagctgtgactggcctgtcaactgacaaagaagtgcttactgccgaaaatgaagcaaaagctaaaaccgtagctgagcaggataaggcactgaacactgcttggtttgttttcggaacaaagaaagaactgaaggatcagaatattctgacaaataccggtctcttccagaaaaagcaagtgcttaaggatagtgatatcaataaggattactttactcaggttgatattcgtacaacgaaagaaattaagttgtattccaagagtgcagatgtcttgaccactcatccggcaggttcttatgctttggagaaagatgataaagatcagctcgttctgaagattacgaatccgaaagatttctggagcgtatccagatacctggttatccaagtaaaataacttaattaaattataagaatggcagggaagggttatccctgccattttctttttatatgcagtacaagaatatttttttcgacctggacgatactctctgggccttttcttttaatgcccgtgatacatttgaggaaatgtatcgcaaatatgaatatgatcgctattttcggtcttttgaccatttctatgaactctatgagaagcgtaatatcgaattgtgggcagaatatgcagatggaaaagtgacaaaagaagaattgaatcgtcaacgttttctctatccgctagaggcagtaggagagggggatgcggctttagcgaaagctttttctgatgacttctttgcggttattcctacaaaaagcagattgatgccccatgcgcaggaagtgctggaatatctggcacctaaatataatctttatattctctccaatggatttcaggaactgcaatgccacaaaatgcgttctgctggaattgaccattacttcaagaaagtagttttatcagatgatattggtgtcctgaagccatggcccgagattttccattttgccatgtcggctacccagtctgaactacgtgaatcgttgatggtgggtgacagttgggaaaatgatataacgggtgctcagggagtaggtatgcatcaagtgttctataatgtaacgggacgtaccgagtttccatttaagcctacttatcagattacagatttgaaagagttgctccaattgttgtgacattgagggattagttgtaattttgtcagcgtaaacacataatttgcagctatggatactattttacctttcgctttgctttgtttcacttctttctttacgttgacaaatcctctcgggactatgcccgtctttctgaccatgacccatggaatgacggataaggagcgacagtctgtagtgtctcgtgctacattagtggctttcatcacgattatggtctttacctttgcaggtcagttcctgttcaagttctttgggatctctacaaacggttttcgtatagcaggtggtgtcatcatctttaaaatcggttttgatatgttgcaggcacgttatacacaaatgaaattgaaagatgaagagattaaaacttatgccgatgacatctccgtcacccctttagggattccgatgctttgcggtcccggtgccatagcaaacgccattgtgttgatgcaggatgcccatactatccaaatgaaaggtgtactgattggtatgatcgcctttatctacttgattacatttttcatcttgcgtgcctctacgcgactggtaaaagttttaggggaaacgggaaataatgtgatgatgcgcctgatgggacttattctgatggtaattgctgtggagtgttttgtgagtggggcaaagccgatattggtggatattttgaaagaagggttgatataaaaatacccccaaatgtcaggttggacattcggaggtatttaaactgttcagttatcgtatgattgtcaccatggataattcgtattccagttaaatgctacagtttgataataggccaagctgacactgcttccaccttcatcaactcccaccaaggcttgcattatatagaggcttccatcattctcaaacgaacagttgttcttacccggtgtgtaggcaaagtaatagttaccgtcgtctgcactcgcttcacccattttctgaaccgtagatggaaatccgacaggtgtaccattagcggcattgacgatgaactggatatggtgtcccttttccaaagtcactcctgttgcaccggctgctgtttctgaataatagtagggacttaccagtcggtacaaaccattaccaccttctgccttttctatatccactttcacaccgtcacctaccaaaccgttatcgtcgatggttcctgaccatgaagtatagaactgagcgctaccggctgctacccaattgtacaatttgcttaaattaattgttgtggtagaattgcctgatacagaggtattatcctttgctatggaaagagtcgctttataagaaacacctacttgaatgttgcctactgcaatcgtataaatggcggtattgctaccatctgcaaatgttacctcagccggtccgctcaatgcaggatcattaaattttgcatctacggcaatggtcgatgcacctacattggtattgcgtgtcagagaaatcttgatttcagtcaacgtttcagtacctgctacgctataggtttgttcgctctggtcgaacgtatatttcacttcgctgtctatcggggctttgtcccaataaccatcggtactacagccgacaaacatgacagccgctaccgacagcgctatggataaaattgatttattgaaattcatataatgctatttttcagtttgttacctatgttcattagttgtctgtaaccggagacggaattgatgttaccggattattgtctgatgccgagatcaatgagttaccttgttcttcactttcagggatacggtagatcaaggtgttatcaccagccggcacgttaaatacataagcggcagggaatcctgctccacgacggtcgatacctttgttcagtcgcagaatatcaaaataagaaaggccctcaccccaaagttcaatacggcgttgctgccatactgcatcctgtacggctgttgcactggaagcggtacaaacataggcagggtcacgatagtcatttacaaacttttgtaaagtagctgcgccggttgaaggatttccacccatagcttgtgcttctgccaaaatcaagtacatttcttccacacgcatcagaggaatgtcgcttgcgttagtgctttgagccattactcctttataaggaccgtatttcatttgggtataagcggggcaaccatatttcgtagcttgggctacttgtgttgcattcaaattgtcagagtgcttattggcatcgagccaccatcctttacgaacgtctgtatcaggaatctcgttatacaacttcttgttgatcatacgccatgatcctactgaagcatatccataattcagtgatcccatatgtgaagggaaattcacaataccggaagttactacacggtctgtttcagcgattacaatggcccacatccaagagtggtcactgctttccgtaaagcccggagcacctgcttcttcgcggctataaggtgtaccgctaccgttgatggctttttgagcgtcttcagctgccgcagtccaattttgcatggtcagattgacacgtgcacgtaaaccataagccacttccttgctgatatagcgcttatcggtaccgcgggttttgtcagtagcttctaataaagatacagctttgttcaggtcactcatgatctgatcgtaaacttcttgcacggtagaccgggcgcaaccattagcagcagcctcattggcattttcgtttgtaatcagaggaacgcaaggcttgctttcattccctttataagtatgctgatacatctgggccaatacgaaataatcgaatgcacgtatagacaaagcttgtgccaggtagtactttagagagctatcttccgtagccgggtcgatggtactcactactccattagcagtatagatctggttgtacatcgtacgccataatatgtttgtcgggcgatagttaaagaaaagatcctcaaaagtcatagaacgggtaaaccagttatagtttatatctaaaccaaccatatctgtgccgcggctgtccaagttcagcataattgaaccataaccgaagtcgtcgtgtccaaaagaagtggggatggcattgccatatacactgaacatcgcagtgatacccgttacacttgccgataccatttctgggtcgtttttaacaacttcttctttctggtcgcttgtaacaacagcacccagtggttcggtatccaaatcattacaccccacaagcaatacacttgcaagtgccgatgcgaatattttaaattttatatctttcattgttattctgctttatagttagtatagtttagaacgttaatttcactcctgccgaaatactgcgtaatgcaccatacgtagaggtggtagatgatacataaccttgacgtggatctaatcctttacgtgcagcaaacaatgcaacattgtcggcagcaccataaactctaagtgattctattcccaggttgcgtacgattcttttcggcaatgtataacctaaagtaatattgttaatagacaagtagttggaagaaacaatccagcggtcggagcttgaacctgcatcatagttttcggttgcacacaaacgaggaacatctgtattcggattctctgccgtccaagctttagcaatgtccttatgccagttgtaaccggcattactgttgctgccaccatgcatcaagtcttgataagtataatcccacagtttaccacccagctgataagagaactggatagaaaaatcaaaaccatagaaatccaagctagtaccaaaaccaccatagacggtcggaagcaaatcaccggtagcttctttgcaattagaagcgacagcatagtctgctgttgtataggcgtttccttcatcatctttcgcccagaacaaagattgtccggtagtggggtcaacacctgcatatttcactagataaagttggtacatagattcaccttcgcgataaatacgtgaaccattgattaattcaccattcaaatcaggatgcagcttatttactttatttttcaggaaagtagcattcccaaaaatgttccacttcaaattattgatatcaatcggagtataattcaattcaatttctacacccgagttagtcatcgaaccaatgttcattggaatagaactgtaaccgttggagtttgctaccggcttattataaagcatgtcgctagtcttacggttgaaatattctattgtaccttctaatttatggttgagcagtgtgaagtcagtacctatattgaaggagttacttttttcccaagtgatgtctggattgcctttataataaagtgtaccatccgagaatataccattagcaccggtcatggagtattgatccagatacggatagtagtttgcataaccgtttctcagcaatgcatcgttaccttgttgaccaaacgaagcctttagcttcaacatatcaatccattctgtattttccaaaaatgcttctttgctgataacccatgcgacactggccgaccagaagttaccccaacgtttgtcaggatggaaacgagaagaagcgtcgcgacggtaagaagcactggcaaagtatttttcatcaaagtcgtaattgattcgactgataatgcctctggtagaatattcgtcacgagcaccgccaccacgtttgttatcgatagtgttgtttaccgtgaagtcataatccttataaagattctgcccggttgcataactatattcatagcggtagtcataactctcataacctaacagaacatcgaaattgttcatgccgaagcttttcttataggtagccaggtattgctggttgaaggcggatgtacgtatgtgttcttgttgtgcagtaccaccgtaacttgcagactgtccataatacttgttacccaaaacattataacgtgtattatcaatataggcacctaatgaacctgttagtttcagtccttcaattggggacaactcgatgaaccatttaccgttaaggatatccatcaggtattcttccttattataaagcaagtcacccttggggtttgacatggacataaagttacgcgtgctgtttgtactgctaccatcaccataatcataaatcttattgcctgaattcttgtcgtaagccagtgaaccatcagcgttacgtacatacatcggataaactggagcaatattatttgccagtaagaaagcgtttcctgaagaagcagtagctgtttggtcgcccggatacttgctcttagagttagtatatcctaagctggtgccgaatttcagccacttttttgcttggtagtctacattcaaacgcgtagaaatacgattgaaacctgaattttcgataacaccgttatcttccaggtaaccggcagagaaatagtagttcaaacgatctgtaccacctgatacgctcaagttatactcttgacgcatttgactggagatcgttccatctgtccaatcatccggagtatagtaatattgtccgtcactatagcccaacttcgcatttggattgattttaccatccataccgataagaccctcaccttgaggtaatgtatatatttggtaaccgattgccgggaacaactgtgtattagcataagtgtgcgctgcttctggggtacgtcccaatttgtaataagcggcattgtaatgagccttatagagagtctccatgtacgtatcagggttttccatcacgtcgtatttgcctacttgacgggaattgctaccccaacgtgcatctacagatacacgtgcattaccgtccttaccttttttagtggtaaccaagataacaccgttagcaccacgtgcaccatacaaagcagctgcggcagcatctttcagtacagtcatagtttcaatatcctgtgaattgatagaagaaatatcaccatcaaaaggaattccatctactacatataacggattgctgctggatgccatagaaccaataccacgaatacgtactgtggctgaagttcctggttggccgttgctgcttgtagtttgtacaccggctacactacccgacaatgcgttggtaatgttggatacttggcgcttttctagtttatctgcctttacaacactcgcagatccggtaaatgcagacttctttgcagtaccgtaagctaccactataacttcgtcaagcatctctgaatccaccttcataaagaccttcatagtaggtttaatagccacttcttgtgtctgcataccaatgtacgaaacctgcaaagtcttcgcagaacttggtacgttcgataaagtaaaatcaccatctacaccggtaatagtaccaagttgagtaccttttaccaatacagaggctccaataactggctgcccatcttcttcagaaatcacaacacccgtgattgtctgagtttgggcagttactaggcctattccaacaaaaagacaggccaataacagcattaattttcttttcataaattctctcttaaagtttaactttacattaattgtttctttactctaacaaaatgcaaatatattaataaaactgaaacgaacaattattttgttgaaaaaaccttgtaaatctatcaatttgttaatcaaatgcttgtttttatgcttaacagcagcttttttgcacttaaaaaacctaaatgacattctgattgctatcactctgaagcacctctcaggctatcattccttaataggtacctcaccttttaaactaaaagtgttaaaaatgtgcattgggaggattaatttgaaagtcattttacgtagatttaccttttttataaaggaaatacaaaacaaaaaacactttgtaaagcgtacttttacagatattaagtcttctttatttcttgtatagcacattatttcgtcttatttgttcatagtattaactaaaataactaaagatgaacaagattatttacagtttagtgtacaaccggaaaaagagccttaataaacgaggcgtagctttagtacaggtagaggcttacttgaataggaagaagaagtacttctctactaaagtctatctgagaccggatcaatgggatgcgaaaaaactactagtaaaaaaccatcctaatgcagatgccttaaatcgattgatttatgagtttatggccatgatagaaaagcgcgaacttgagctctggcaacagggtaaacctatcactttggagatattgaaagagatgctttctgaacagcaagaacaggaagataaatcttcatttatacctttttttaagcaggaagtgatgacttccggcttaaaggaaagtaccaagcgtaatcatctctctacgcttgcactattgcaagattttaaaaagaatgtaacattctctgatttaacttttgagtttgtatcttcatttgaatattttctgcaatcgaaagggtatcatactaacaccatagctaaacatatgaagcatttaaaacggcatatcaatgtagctattaataaggagtatatggatatacaaaaatatgccttcaggaaatataagatcaaaaccgtagaaaatggacatacgcatttggcgccggaggagttagaaaaaatggaaacgttgcaattgactggaagatatataaaataccagaagacattggatgcatttctgttctgttgttacgcaggtatgagatattccgactttgtaaatatgaagccggaaaacattgtggaaatgcatcaggagacctggttaatctataagtctatcaaaaccggtacagaagtccgacttccattatatttattattcaacggaaagggaattcagattttgaataagtatcaggcaaatctacaagatttttttcatttgagagataattcgaacgtgaataaagagttgattatcattacccgattagccgggttatctaaaaaagtgtcattccatacagcacgacatactaatgcaacgttattgatttacaatggtgttaatattacaaccgtgcaaaaacttttagggcataagagtgtgaaaactacgcaaatatacactaatgttatggatatgacaataataagtgatttggagaaaaaccactcgttagctcatcgtaaaaaaggaaaataagtctcgttgaattaaggtgtaactgtttgccatgaagctttaggaatattggataattgagttacaccttttttatgacttcacatatctggtctatttgagattctgttctatatctcttctttttcagtttcttgtattatctgtctttcatatttaactagtaatataaaggaacttaagaagcatcacatgcaatgttgccataatatgcctattccatagcccaaatactatttaaagaataatctaaaatgagagttataattacaaataagcagataataatctttagtaacaatgctaataatcaaagtattacaatgtgtctatttcttgtcgacaagaaattaagagtttgtcgacaaggagttaacttcttgttctcaaactcctaacttcttgttagcagtaaacgacatttctgacttttattcaacaaggtgttccacataaaaattctttctgaatcacttggaagattatcctattttattatctgtgtaaatgaatatatccatatttagaattaatatatgtcaaaaaaataagaccatataatatacttcccttatgtatgtaatttaccgatatgttcccaatatactcttcaagcatttcatacatataaatgttttttcgaacctatagtattggaattataattcatcgcttagccttattacctattaatatcttgataaacagaatattgatgtataaataaaggatcatttgagtagatacatgcttaccaaactatttattatatatctggtaattagctatttaacaaattgtaattatctcataaaaagttcttctggcatttatttctcattgattatcaataaaatatcatctactaagttctgcgaaaacgcttcagattacgtatattggtatgcaagcacaggacgttgcaataaaaccgaatgtaaaggttattatgaagtcggatactgaaatgctggatgaagtaatggtcatagcctatggtaccacaaagaaagagtcttttactggttctgcggaagttatcaagtctgagaagttgaaagaaagaccagttgcaaacgttacgaaagcattggacggtatggttgccggtgtgcaaactacttcaggttcagggcagccgggatcaggctcttctgtagtagtccgtggttatggctctatcaattcatcacaatcaccgttgtatgtagtggatggtgttccctatgatggtaacatttcagcaatcaatcctaatgacattgaaacgatgacagttcttaaagacgcttctgctggtgctctttatggttctcgtggtgcaaatggtgtgattatgattactaccaaaaaaggtaattccggtaaggtaaaagtgaacttgaaagcaaattggggtgtttcctcacgtgctattccacgttatgaaacgatggacgaagccggttatttagaaacaatcttccagtcatataagaataatcagattatcaacggtggagtttctccggagttggcaggtgttgctgcattagaggctatgaaaagtggatccactgctatgctaggccagaatgaacagtataacccttttaattatagtattacagaactgatcgatcctgtgacaggaaaagtacgtagtgatgccaaattaagatatagtgaagactggatggatgaagctttaaaaagcaatcctttacgtcaagagtatgttgcttcgttcagtggtggaagcgacaaaaccaaatatatgttttctttaggctatcttgatgaagaaggtctgttaaagacaacaaaattcaaccggtataatggacgtttgaacatagattctgaagttacaaactggttaaaagccggaatgagcgccaactactctcgcaatgaaagtaatacagctgttgaaaattcatccggttcatccaatgtttggtacagtgcacaattaatggctcctattttccctgtttttgagaaagatgccaatggtgctacgatttatgacaatttgggaaatgccgtttttgactatggtaaaaacagaccggctggtgccagttcagagtggaacacaattgctaccttatatgatgatatgtattctactcaaagcgataacttgagtggacgtgtatatgcggaattaggtgatttgaaaaatacattcttgcaaggattgaaattctctgttaattatggctttgacttaatcaattcagccggagcaacttattataatccatacaacggcaactctgtagccgtgaaaggtactatacagaaagctactgcacgtacattcagctatactttcaatcaattgttgacatacgatagaaagttcggtgatcatcattttgaagctttggttggacatgagttttataaataccgatatgattatttgtcagcaaccaagacgggattcccatttggtggactttatgaactggatgcagctacaacgattacaggagcatcttcttatcagaacaattatgcagttcaatctgtgttatcacgtttgaattatgactttgccgataagtattacctttctgccagtttccgtaccgatggttcttctcgtttctataaggataaccgttggggtaaattctggtcggtcggtggtaactggcgtatctctcacgaatctttcatgagtgacattacttggattaataatctgtcattaaaagccagctacggtgtacagggtaatgatgccatattaaatggtaccaaacagaatttttatgcttggcagtcattttatgatttgggttatgcaaactcgtcgatgagcggtgcggccgtaacttccttggaaaataaagaattgaaatgggagaaaaatgctaacctgaatattggtattgaagcaaaattgtttgatcgtgtttctgctactatcgaatggtatcaacgtaagacgacagatatgttaatgtcattcccaatggcaacttcactcggttttgatggctacaacaagaacgttggtagtatgcgtaatacaggtattgacctcacattgggagttgatatctttaaagatactccgtttacctggaacttaacactccttggctctacgattaagaataaggttttgcaactggcagataaaccggaaatcatttccggatcttatatcattcgcgaaggtgagactttatattcattctatacagcaactgccgctggcgttgaccccgcaactggagaacaactgtattgggcatgggataccgatgaaaacggagttaagggcaaaaagtatataactaacgatatggccaaggctactgcatgcaaagaaattcagggtagccgtattcccgatttatatggttccattaataatacattcaaatataaaggatttgatttgagtatcctttgtacatattctattggtggcaaagtattggatggtatttataataccttattatatggcaattatgtaggacaggcaaagagtaaaatgctggaacgtgcatggagaaatccgggcgatatcacagatattccacgtattgaaatcggaaagagttacattgttactgataacagtttgattgacgcttcctattttgctattaaaaatattgctttaggatattctctgccttcaaagtggatgaaatctatcggattcgattctgcacgcctgactgcaacggcagacaatgttgtgttgttcaatcacctgaaaggtatggaccctcaatataacttcactgggggaacggattttggttacgtacctgtcagaacaatttcattcggaattgatatcactttctaaacctgattaaataatataaaagatgaaaaaagtattatatatattttctttaatcggccttcttgcattcagctcatgtgccgatgaattgaatacggaaccgactgacaaggtatcaggttctacgatatttgcagatgcaagtagcgcagaaactgctataaatggtgtataccgtatgttatatgtagcagggtggagttcaaactggggctcagaaaactgcggacagacagctatccaattgcttggagatctgatggctgaagatcatttaatgaaagagcagggacaaggctggttttatgaagattatcgtttgaatgttcatggagactattcaaataaagctggacgtccttattctatttggaacttctattatactatcgttagtaatgtaaattatatcattgcttcagaaaacacaatgggaggtgatccggaacttaagaacagcgttgtagggcaggcctatgccatgcgtgcttttgcttattactatctgatacaattgtaccaacaaacgtataaaggacatgaggatgcacccggtgtacctttgtatacaggggcaacggttgccggttcggagggaagccctcgtggaaccgttcagggagtttatactcaaatcaattctgatatagaaaaagctattgatctgttaggaagtatcagtaataaagtgcaaacgcatgtatctcatatagattactatgtagctaatggcataaaagcccgtatctgccttactcaacatgactatgcaggtgctgcgacggcagctgctgaagccttaaaaaaaccttcattaaaagttgccactatagccgaattgggcgggaataatagtgtaaaaacagcagatgttttatggggaatggaaattatagccgatcagtccagtggttttgcaagcttcttctcgcatatggatgctgatgcaccgggtatgtatgcttctaaagcacgccaatgcataagcacagggttgtataaactgatttctgatacagatgagcgtaaaacagcgtggttccgtggggccattccttctgacgaagaaaagacagcgtcatcttatacgagttactgccaaattaagtttaaaatggcagattacacaacccgtacaggtgattacttacttatgagagcagaagagatgatattaataaaggctgaagccgaatgtcatcagaaagaatatggtgctgcccgtaccacaataaaaactttaggaaacgcgagagatagtaagtttgaggagcgtttagctgcccgtacagatgcaaatacttataattctgacactaatgctcctttggaaacattaatggatgagattttattccaacgtcgtgtggaactttggggtgaagtgggacgtatcttcgatatgcagcgtttaggtttggggtataatcgtaattatgaaggctctaatcatacagagaaggtaacgacaaagaacactaatgccgcttctccattatttatccttcctctgccgcagtctgaaatagatggtaatgagaatattacctctgcggatcagaatcctatagttcaataatttataaacctatataatgaaggaaaatatgaaactatatacaataaagaaatatgctgctatattgctctgtttggcagcttttacctcctgcgatacagatgcagaaggtacgaaatatggtgtaaacggagttgaagcagcttttgcatctactcaaatgaatgtggaagtaggtgctgaagacaatggtattatccgggttcccgtgtatcgtggaaatacagatgcagaggcttcagtcggcattagcatggatgaagctacagtagaagaaggtgtattcaccttgaaaagttccaatatagcctttgcaaaaggcgaagcagtggggtacgcagaattagttttcggttctatagatgacttgagcgctactggtaaatatgagattgtactgaccatagatgacaaggatgcattgtcaccttccaaatccggtgaaataactgtaactgcccagagaaagttgacatgggaggattacggaaccgggatatatacttcagaacttttcggccaggcatgggaacagcctatattgaaagctaaagaaggtaatatatacaagttgccggattgtataacagaaggatatcccatggtctttacattgagtgaagatggccaaactctggttaattgggacttacaagctactggatataaacatgctacttatggaatggtgtatttcactcctaccgacatgcaacgtcaaggcaacaagttgctattcgcaatgcgtggagctgttgctgtagaaggcgggtatggaattctatacagtggctttacagaaacattagaattaccggaataattgtttcctactactgttatttgggaaataagtttgtaacagagtatatctgatacaaaagatatgaataaggctatctcattttttttgaggtagcctttttataaattgtactatttagttttcgcctttctatttttcttgtctcttgttctctaaatatgaatttagtgaaaaagtgaatgatgacttttagttgaaaaatatagacttccaattatatttgcctctacgcgtgaaccgctgatcataattgatttccaattatgtattattttgtacattcgtgcagtgaattaaacgcacagtaatcatttgatagttcatttacgccttaattaaaacagtatattgctgaatttcaatatgatatcttcttaatatggggtaatgctggtagactttaattaatttaggtatatataaaatacttatattcaaataattacaaaattgaaagtacgtaatacttagtccttcaatatatgttaattgattgatttttagtaaaataaacaccgcattagttctgcgaaaacattggagatatcttacattggtatgaaaaaagaagaagtaggcattaagtctcatttgaagataacaatgaagactgatagcgaaatacttcaagaagttgttgttaccggtatgcaacgtatggataagcgcttatttaccggagcagcaacaaaattgtctgcagataatgtgaaaatggacggtatggcagaaataagccgtgctttagaaggacgagctgccggtgtatctgtacagaacgtatccggtacttttggtacagcacctaaaattcgcgtgcgtggtgctacttctatctatggtagttcgaagccattatgggtggtagatggtgtcatcatggaagacgtgacggaagtaggtgctgacgatttgtcttcaggagatgctgttacattgatcagttccgctatagctggattaaatgcagatgatattgaaagtttccaaatcttgaaggatggttctgctacttctatttatggagcacgcgctatggcgggtgtgattgttgtaacgactaagaaaggtaaagctggtagtaacaaaatcagttatacaggagaattcacaatgcgtatgaagcctaactatagaaacttcaatatcatggattctcaggaacaaatggacgtgtacaaaacaatggccagtaatggctatctaaacttttctgacgtgtatcgtgcttctgatagtggtgtatacggtaagatgtatcaccttatcaatgattactctaacggtaaatttggtttggctaatacaccagaggcaataaatggttacctacagcaggctgaatacagaaatactgattggtttgatatcctatttaataatagcatctcgcagaatcatgctatcagcatgtccagtggtactgagaaagcttcgtattacacctctcttagtgcgatgagcgatccgggatggaccaagcaaagctctgttcagcgctatactgccaatatcaatgctttatataatatttcgcaacaagtttctttgaacttaattggaagcacttcttatcgtaaacaaaaggctcccggaacattaagttccagcatagacgtagtaagtggtgaggttagacgtgactttgatatcaatccgtattcttatgcattgaacacttcacgcgctcttgatccaaatgaatactatgttcgtaactatgctccattcaacattcttcatgaattggataataataacatggacttgaatgtagtagatttaaaatttcaaggtgaattgaaatggaagccattcaaaaaagtggaattgtcagctctgggtgcttataaacattcttctacaacgcaatctcacagtattaccgattattcaaatcaggcatgggcttatcgcgccatggatgatgctaccatgagagatgctaacccatggttgtatacagacccagatgttgccaattcattaccgctgtctgtattgccagttggtggtttctatcgtgaaaccaagtatggaatgaacagttatgacttccgtggcactatcagctataatgatgtttttgcagaagatcatgtaatcaacctctttggtggtatgcagttgactgcaactgatagaagcaagacttggttcaatggtgtaggtatgcaatatgatatgggtatgttgccttcttatgaatatttgttcttcaaacaaggaaaagaagaaaactctcagtactatacagttgaagagacccgttctcgtgaagtagccttctttgcaactggtacttactcatacaaaggtcgatatactgtaaacggtacagtgcgttatgaaggttctaataaattaggtaagagccgttcttcacgctggttacctacatggaacgtttcgggtgcatggaacatgcatgaggaagctttctttgaagatcttacccctaccttatccaacttgacactaagagcgtcctactctttaacagctgatcgtggtccggctaatgttaccaattcacgtgtggtaatccagtcatataatccttatcgaccatttgccagtgtatctgagtcaggtctggaaatatacgatttggaaaacagtgaactcacctacgaaaagaaacacgaaataaaccttggtgcagatatcggttttattaataatcgcattaacttggtgtttgactggtatagacgcaataactatgatctgatcggtattatcaacacaatgggtgtaggagggcagattgccaaatatgcaaatgtcgcaagtatgcgttcgcatggtgtcgaattcaccctttctacccgcaacattgcgactaaggatttcaagtggaataccgattttataatctctcatgcaaagaacacagttacggagttatactcaaactcacgtgtgattgacatgatttcaggatcaggatttgcacagcaaggttatccggtacgttcactgttctctatggacttcaagggattgaatgaagatggtgtaccgactttcatcaatgagaaaggtgtattgactacaagtgacatcaacttccaagaacgtaataataaagatcatctagtttatgaaggtcctacagatcctactattacaggaagttttggtaatgtgtttagttataaaggcttcaagttgaatgcctttattacttactcttttggcaatgtagtacgcctggatcctgttttcagcaataaatattctgatttggacgctatgcctaaagaatttaaaaatcgctggactgttacaggtgatgaaaacagaaccaatgtccctgtcattgcagatagacgcatgaatcagcaagatcaatatttgagtcgtgcgtataatgcatacaactattctactgctcgtatagctaagggagacttcattagaatgaaagaaatatcattgtcttatgatttcccgaaatcatggatcagtcatttgaagttgagtgacctgtctttaaaattgcaggcaaccaatcttttcctgatttattctgatgacaaactgaacggacaagatccggaattcttcaatacaggtggtgttgcagctccggtacccaagcagtttacattaacattaagaatgggaatttaaatattaaaatcttagaaacatgaaaaagataaatatactatattcagctataacggctgcttttatgctctcatcatgtagtgactttctggacactatgccggataacagagcagaaatagataccgaagctaaaatcacttctttgctggtttcagcctatcctactgcttacccgatcatgatggctgaaatggcatcagataatgctatggataacggttctttatattctgttgaaagccagtcacaagaagatgcatatttgtggcaagacattgttaccgatacggatggagatgctcctcaaggaatctgggatgcatgctacatggcaatcgcttcggctaatcatgccctacaggctattgaacaaatggggaatccaagcagtttgtctgcccagagaggcgaagctttgatatgccgtgcttatggccactttgtattggctactactttttgcgaagcatacaactatgaaacagcaggcaataaattgggtattccttattcaattacacctgaagcagaagttgctcctcactatgtaagaggtacattggcagaaacttattctaaaatagcagcagatatcgaagagggacttccactaatcaatgacaatctgtattccgtacccaaatatcacttcaacagaaaggctgcacatgcattcgcagctcgcttctatctgtattatttacaagcagataaatcaaactacgaaaaggtaatagaatatgcaagtgtggtattgggaactgtaccttctaaagtattacgtacttatgatgccgactttggcacattatctaatcctacgaatgtaggagacgcatttatcgcggcaaagtctcccgccaacttgctgattactccaataaatagttcatggccttacatttatgggccttatagtatgtcacaacgttatgggcaagccaaggaaatttgtgataatgaaaatcttcgtgctgatggcatttggggcactgctgcaaacctagtggctgcaaatacaatttggaacccgcaggagaaaatgcctttccctaaattagctatgtatttcgaatatacagacaaggtaaatggaatcggttatcgtcatgcggtcatagtaccctttacaaccaatgagactttgctttgccgtgccgaagcatacatcatgaaagcacaacctgagtatgggaaggcagtgtcggatatcaatgattggctgacttcagtttgttatgtaggtaaagcccctgtcgttacagaggatgatatcaatactttttataaaaatatagaatacacaccgattcctatagaaagcgctgcacagcgtactgtaaaaaaagagctgaatccgattattcaatttgttgatgagaaacaagagaacctgatccattgtattcttcatctccgtagaatagaaacgattcatgaaggtctgcgttggtatgacatcaaacgttacggtattgagatttcacataatagagaggggctaagtcctgatatactgactaaaaatgacctcagaagagcattccaattacctcaggacgtaattaatgcaggtttggacgctaatcccagaaactaataaaaaataagagtatgaaaaagataaaagtatttatattattagctttagcattggccgcagtgtcttgcagtgaagaagacttggattccaaaagcatttttgatacgtcttctccggaacgcaatgcttttgaaacatggattttgaataactataccgaaccatacaatattgatctgaagtacagatttgaggacatagaatcagatatgaagtacaatgtgacaccggctgcttatgataaatcggtggcattggccaaattagtgaaatatttgtggattgaagcttatgaagagctggtaggtcaagaattcgtagcgacttactgtcctaaagtattgcattttgtcggttcaccggaatatgagaagtcgggtggatccatggtattgggaacagcagaaggtggtttgaagatcacgctcttcaatgttaacggtctgaatccggaaaatccggatgctgaaatactaaatgagtggtatttcaaaactatgcaccatgaatttgcacatatcttgcaccagacaaaaaattattctacggatttcaatacaatatccgctggtaagtataccggaccgggctggatgaatattacggaccaagaggccagacaaatgggctttgtctccaactatgccagtacggaaactcaggaagattttgtagagacaatagctatttatgtgacttacaccaaagcacaatggcaaaatatcttgaatgaagccggcgaggcaggtgctgctatcatccttcagaaatttgagatggtgaaagaatatctggcggaatcttggggaattgatatagatatgctgcataacattgtccaagagcgtgaagaaaatattggtgatctggatttaggaaccctttaatattgaaaatagaatatgaaaaaatatatttatctctttttcttgaccttttcttttctttttgtagcatgttcgccggaagcggaagatatttttggtgaaaacgcagcaaccagaatagaagagagattggcagcggacaaggctgtattggttggagctcagaacggttggttgatgaaatattatccggcaagtggacaaatctatggtggttataatgtattggctttcttcggtgaagatggtaaggtgacggtatctgcagacattacaggtgatgctacatccaaagctacaagtacttacagaatgaaagagcaagcaggccccacattgagttttgatacttataatgaaattttccatatattctctgaccctaaaaatgacctggggataggtacggctggaaaaggaatggaaggtgattatgaattcactataatggaagcaactgccgaaaaagtggtgctgaaggggaaaaaaacaggaaataaaattattatgactccattcaatgaaagctgggaggactacctgaacagtattattgaaatggatggaaagatatcaagactcgcccagttcacctatactgatggagattttactgcctcagtgaaacaatcttatcggactttcattgttacatatcaggaaaatggagaagataagaatgtaacagttccatatataatgactcctacaggattaagatttatgacggcactggaattggatggaaaaaaaatagagaccttggaatttgaagatgtaggagatgacggacagcttgtatcaggagaagttgtcttgacacctaaattccccttggcttatttcctcattaatggcgaatggttcttctcatataaaaatatgggtgaattgggacaactttattgggcagccgttaagaggcaggctttggatcctaatggtataaatttgaatatggcatttcttaccccctattcaagttctcaaatggcgttctattggatgtgtgaaggatttaatgatggctatttattctttaatgtaacaacattgggggataatcaagtcaaaattgtttttgctttgagtggtaatcaggttggaatagatttctaccaacaactggggtggaatcttatgatttacccgttctctaaaggaacaacgggagtgacatttaatttatcagcagatgatgaaaagaatccttctgtcataacaatgactgatacgtctgatccttcaaatgttattaaagtgtttaaagaagctatttctgacccatttgataattaagataatcatctttgaacttttggttcattgagtttttaaataaagtgttgaagcaggtatgtcgtgagatacacctgctttttctcatatttataaattaatataatatgtttttcttt

SEQ ID NO: 6335 - DNA, 1133 bp, Unknown
  gut microbiota DNA sequence
ccttcatcacgggaaggaagcaattccatcgcctcgtggaaatctttttccacctggtctagtacggcatcgtaggtgctgttggaggtataaagtccgtccaacgaagaataggtggcataatctgtgatgaggggcggattctgataataaccaaccagattgtagtacgacaggccgcgtaggaaaagcacttgtcctttgatgcgtttcattttattagaaagttggctgttgtcctcaccgcaacgggaaatggcgaagttgcacacgttgatggtgtagtaccactcccgccaaggccaccacgtgatgtccgaggtaacttctgcgttaaggtcatcgaaaggcatgtaccacacttgtgaagagttccaggcttcatcgccacggcacacgtcgatggtgtagcctacacgggcataggaaccctccatacggatgtggttgtaggcagcaatcacgctttcctccaaatcatcggcattaaagccgaaagtacttgaggtttgctggttaggattcaacagatccattttgtcactgcaagaaaccagcgtgctaaatcccaaaatgagagcaagtgaatatttatatagtttcataaaatatgtttttagtatttaggtactagatagtaacgattagaatgtaaagtgaacaccacacatgaaagtgcgtgcagtaggataagaacagaagttgtatcccggggtgaaagtacctcccgcatagtctacattataaccgtgatagccggtgaatgtgtggagattctgtgctgacacatagaaacgtacatcagatacatatttaccgaaccactcgttagggaagttgtaacccaactctacattggcaatcttccagtaggctgcgttctgaatcttgcgtgaactgaagaggtcgttccaacccaagctggcactgttggtgacgtaggtgcgtggcacgttggaaaggtaagtgctgccgtcttcgctaaagcggttagcatcgagcatacccacctctttgtttccccagccgtagcaagagttaagtgagttgtagatgtcgtcactgacgtgatagttcagcgcaccgaaggtagcaatactcaggtcaaagcgcttgtactcaaaacgggcatt

SEQ ID NO: 6336 - DNA, 63798 bp, Unknown
  gut microbiota DNA sequence
ccattcggtatattattttttagacgcggatgacgcggataacgcggatttaaaaggctgcgctataaaaaaagatccgcgtcatccgtgtcatctgcgtctaaaagattatttatcatttagttcataacccgtccgaaatgaacaagttgctctctgttcaactttccctcacctctttaaagatatgggataatcgtaatataaatacccgtaataatggccgaagtgataaccccggaaatattcgctcccaaggcatctcccaggataaacgagtccggattatctttgctcaccaacttctgagccactttagccgtagtgggtacacaactgacggcggcaattccgatcaccggattataatttcccttcttgataaagtacatgatgtatccacccatgatgccgccgataccggaaagcaataatgccactatacccaataccagcagtttcagaatcttcggatcgagtaacaagtgcgcgtcacaaagcacacccagcaatacgcccagcataaatgtagaaccataaagcagcggaccactgacgaaatcatagatatgcttcatacccgattcacgtacagccactcccaagaagagggagaagaacagcggtgaagctaccgggaacaggaaacacagcaccgcacacagtacagccgaaaatgccagtttcactttggcatcataattcttgggagctttctttgaagtcatcttgatggcacgcaggcgtttcggaaccaggagtttcaccagatacgggtagccgccataagtcagtccgagatacaggtaagccactacggtgataggtacaaacaaatgtttggcaagagccagtgacgtgaacagaaccatagggccgtctgcaccgcctaccatggctacggaagcactttcctgcaaggtcagtcccagagccgaagctacggggatagtcaggaaagtacccagttcggcgcataaagccaggaaaagactgacgaaaggtttctgtaacagaaagcctacatccagcaatgtgcctatacccataaacacaaagcaggctatcaatccgttgctgaaggtgagcgtatagacaggttgcagaaagtctatctgcatcgtattcatcaggtcgtccgtgtccgaaagcatcgggtcgagaaagaggttgcccaatgtgccgtccggcataaaaagtgttccacaattgatggcgaccatacccagtcccatcggaatcattaccataggttcgagcactcccttccagcccagatatataagcagcaaacctaaaaggattaaaaatacacgggctgacgcgagcaggtagccactttccatcatcgttccaaaaccttggaacagggttgcgaaatctatattttccatattgtttcttatttggttttatcggctgatttgccggagtgtttcttgtttttttgatatagcatttcttcttgttgattcaggtacatcatgtgtgtatcttcggggtagtagtaatctaccaggttggttttggaaactccggtgcttactccgtggtaatatccgtgatagtcggtgagttcccggtttactccccggctgaactcttcgcgtttgtcatcgagaagtccgttatcttccatggggatgtcccgtatcatgagttctaccttctggcgcagtttgcgcagacgtcgcaggcgaagcagctctttctggtgtgagctgtagaagtcaaatgagtcggcggcaaaggcaatcattttgatgatgaaggccacgaagaagccgattacgaatgtaagccccatcatttcgagggtggctattaataaatcgagcatagttattgcattaatttagaagtgaataaacaatagactgaccaaagacacgccaatggcatgcctccggaaaaataattggtaataagtaaggtggcggtttaaatcagaatatgtttcagctcgtagacgtaatacccgtaagaataacggatagcgctgggagtgaaagaaagactggcattctgttccaccggtaaatgggtggaaaatatacgttgcatctgttctacagatggatggatctttagtttcagcagctttgagggagcactggcctgattgtagaaattctcctgaaaaaggacaccattgattttacgctcattattttcatcgttgaagaaggggcggtgggcaatggtcgagaagtaatcggttgacattgagatgaaacatcccgttggggcaggagtgacagaagcatctgccgaggcttcggtaagcatccgaagtgccggctgttcctcttgcagaatggcggacattcctaatgcgaggcacataaacaagaatatatagtgtagatgtttcatcatagcgtccgcaaacataacaaatatctttgtgtaatgttgtgttccccttcaagaaaattttgttaaatagagaacggtttctttgcacatgttctgcaaatgtgtatatttggaataatatatctaaatatatcgtaaaccacaataactcaaattcctatgagcagtaacatatttctgattatcgctgtagtcacaactggtatttttgtgatacagtttatcctttccatcttcttcggagacattgatgcggatgtagacgtggatgccgacatcagcagcatggtgtcttttaagggactgacacatttcggtatcggtttcggctggtacatgtatctgattggaaatactgacattcagagttatgtcattgccattctgattggtctgtttttcgtatttgccgtgtggtttctctataagaaagcctatcagttgcagcaggtgaataagacggaaaagacggaacagcttgtagggcgagaatgtaccatctactttaaacagggggatggcagatatactgtacaggtgagccgcgatggagccatgcgagagatagatgtaatatcagaagcaagtaagtcttatcagacgggcgacaaaaccattatcatgacttacaaggaaggaacactgtatattcaataaaaacgaaactcaaaaacatagatttatgacacaagaaatgatgattatggccgccatactcgtggcggttattttgcttaccttcattggtatcctttcccgttaccggaaatgtaaaagtgacgaagtactggtagtatatggtaaaacgggcggtgataagaagtctgccaagttgtatcatggtggtgccgcgtttgtatggccgattattcagggttacgaattcctgtccatgaagccgatgcagatagactgtaaactaaccggagctttgtctgctcaaaatatccgtgtggatgtgccgactactattactgtagctatcagtaccgatcacgacgtcatgcagaatgccgccgaacgtatgttggggctatcaatagatgataagcagaatctgattacggatgttgtatacggccagatgcgtctggttattgccgatatgacgattgaagagttgaactccgaccgtgacaaattcctttccaaagtaaaggacaacatcgatacggaactccgtaaattcggtttgtatctgatgaacatcaatatcagtgatatccgtgatgctgccaattatattgtcaacttgggtaaggaagctgaaagtaaggcgttgaatgaggctcaggcaaatatagaagaacaggagaaactgggtgccatcaagattgccaaccagataaaggaacgtgaaacgaaagttgccgaaacacgcaaagatcaggatatcgccattgctgagacgaagaagttgcaggagatttctgtggctaatgcggataaggatagaatctcacaggtagccattgccaatgctgaaaaagaatcacaggtggcaaaggcggaagccgaaaagaatatcaaaattgaacaggccaacaccgagaaggaaagccgcattgccgaattgaactccgacatggaaatcaaacaggcagaagccggaaagaaagctgctatcggacgaaatgaagctcagaaagctgtggcacagtctgacgctgaactggctgtgactcgcgccaatgctgacaagcaggccggtgaagctgaagcacgttcggaagctgccgtgcagactgcccgtgaaatagcacagaaggaagtggaagaagctaaagcacgcaaggtggagtcttctttgaaggcagaaaagattgtgcctgctgagattgcaaaacaggaggccattcttcaggctgatgctgttgccgaaaagattacccgtgaggcggaagctcgtgcaaaggctactctggcgcaggctgaagctgaagcaagagctattcagatgaaactggaggccgaagctgaaggtaagaagaagtcattgcttgccgaggctgaaggttttgaggccatggtacgtgcagcggaatccaatccggctatcgccatccagtacaagatggtagatcagtggaaggaaattgccggagaacaggtgaaggcattcgaacacatgaacttaggaaacatcactgtattcgatggtggaaacggagggacgagtaactttttgagttcattggtgaagacggttgctccaagtttgggtgtattggataagttgcctattggtgagactgtgaagggaatcctccatccggaaggaaaggaagacaagcaggaaaccaagaatgaagaaccgaagaaagacgaaaagaagaaataatcagataactttctctgtcatttaaaaaagaagcgaagaattcatttccccttgaaacaggggaggaattcttcgcttttgcttataaaatagttcaggtttttatattcccagtcgttctttcaataaacggtagcccgtcagactgactcgcagcttggtcccgttctttaataatacttgataagtctctttcccgaataattcaacccgggatatttgtgtcacgtttacaatagtggaacggtggatacgtacaaaattgtttgtcggcagatgcccttcgaaatacttcatggtttgttccttgatgtattcgcttgttggggtaaccagggttgcgtaatctccgcatgcctggatgtagagtagttcgtccactttgattatgtgtatacgtgaaccgtcctttactgtaatacggtcgatgatttcctcttgtgcttccggcttttcttcttctgctgctgcttgcggtgctatgaattcttcttcctgtacgggatctttcactactatcagttgataccacaaaatgatagcgatccaggttggtacgccaaacaacaggcggaaaggtatggtagaagcaaaagatatataaggtattcccgctattcttaccataatgtcacaaatcatgaagctgcccgcaatccagagtaatattcctgctgcgaccgtgatgacctttgtctggagtatggatacgtagcccaccacaaaccaggccaggtatgccagtgctgcaaaccatccgatggtcgtgattccgtctatgatggccggcaaccagtcaactccggcatatccccacgacaaagtcgcctggatgattgccagaaccaatgctagcacaagcatcggaaaccaacggtaagggtaatctatgattggatgtgctctcataggattagtcttttatttctaatccgccgaaggaaatgtttccacggattattaatgtactttctttattaatattcgctccctgccaacgcttatcctcgcatccgccggcaaaagcattgcattggggtagaacgttccagtctgaaggaatgtacagttctattccactacaggtgcagtcgatatcgatgtaggtttctcccggtgcaagatgcgtgtggcgcaggtcaatgacagttcctccgaatgaagcccggatgctggcgcctttaaataattcgtccagaacgacatggcgtacagagccaaaagcattgtcggagcgcagatacccgttttccgattcgcattgttgctcattgtcttccatattcatgtgcatgtgtccgcctcctcttctggcccaatcccggtaatgtccgttcatgtggcttttcatccagcgttctctgcgacgagcctttacaaaaaataggatacccgctacaatcagtgcaacaggccagacgatggtctgtgaattttccggtagccatgataatcctccgatcaggaaataaacacctattaaggttagggtggctccgctcagataatggcggcgtgtcatcgtataaatacctaatataataagaagactatgccaggataccactacattgaataggtcatacgtaatccaccctacgttacgggcaaatagtaatattccggagatgatgaagagcgaagctatcagtgccttacctgataagcctgcatgagacgggaagttttgtttcttttccattgtttctattgttattgattcatattccattgtcatgggttgatggctcaaaggtaagcgaattattcctctccatatagcctttccggctgatttccggtagaaaagccgatgagttccgggtatgaatcggtgaattcggatggtgaaatagaactatttgataaaaaaacagcaatattctgcaaccaaaattcatcttcttgcgtctaataagtaaatgaataaataataataagaactatgaaagtaaatttatccatggatgatatccgtacgaaagtagaagagtatattaaaaaggcaggtcgtgctaccggtcgccccgtacttacggcttattatgtaatgactgccgatacgactcccgataatgagcggaccaatataatgcttgctttggtggccattgtgtttcctaccagtatagaggatgttctgggacagatttttatggtaggtaaaggatttgctgctgtttatgcttataaaaaagtgaagaaatatatcacaccgcagataaaggataaggtagaggcaaagctcgacgagtggttccatgataatgtgacggaggtggagccgctttatttggagtagctctctattaaaggtagaaactgtttttgggagtataaagtgcatcacgaaagttgaataagaacttttacgatgcactttgtgttttttattttttaaggtctataacgcagcgaaagcctactgtgctacaacgatcaatgccaggatatagtaataattgctttgcggcgaaatctgttgtttgaatacctccgtcaaaataccaatcagatccttctgctttataactgctgccacctttaagaatacaaaaacgattacgtccatcattatattcactttcagtcatttcccatgtattggaacacatgtcccatgctccacatgtagctctgcccaaaggatacgcttttacaggagtggttataccattagtatgttcgttgcagtgtccggcttgtatattatttccccaaggatacttatacatctcttttccagcagcggctaattgccactcttcttcgcgaggtaggcgcttgccggcccatttagcataggctcttgcgtcatccagatcaacatatacaacagggtgttgctctgaacctactggtatttctccattcttccaatgttttaagaaattctcgggaaaacgaggcttgtaacctgtggcctcaaggaattctttgtactgggcgttagtgacaggcgttgcatctattgcaacatgattcactttaatgtggcgcgaaaaagttattttctgatgggggacagcggggcctctatttataaaatcatgttctaaagactggtaatagccaatttctctacagttaaaaacaacaggaatttctccttcataattgtctatttcaaccatatcctgaggtatgctcttatatagtttggttggagaaacaggctttaaggaggctttaatctggacagacttagtattatatgttttctcttgtgctataagagattgagatgagaggagtttgtcaaaatctttaggtgttttgtctttggggaatgcaactatacaaccaataccacgtggtataatttgtccttcaatcacacctgatttgtcaggaaacacctcttctccttttactaaatcataatatgcccagtccttatttagtgttatttgtaatagaggaccgtctttttgtatatatgatcgatttactaatgtccataactggcaattgtcatcataccaaagactggcgtagacatctgttgctaatgtattattaactaaaggttcccactgatccgatgtgaacatttctgagaagtagtgctggattccatacattgttttaagtatataagaatcacggggagaccagccaacccattggccaaaaatattttcccagatcattatgccactgccattcatccatgctgtctgtagctcttttgatttatcttctgtccaacgactaatgccatgttgcatatggcgaggctcaatccatttgttacgtaatattccaggcacgggagaatcataaaaccattgtgcccaagacatgtgatgccttgatatatcttcgacaggaagggctaattcactttcaagaaccaccccttttcgagacatatccagcttttggcggaattcctctgaaccacggtccatggtatctaagaagatgccatcggcccctatagccttaatgaccattgccaatgcatcaatatctcctatgctttctctgcgtgtccctgtatcccatgggttataattgatatatacttttactcctttttcatgtagtttatttgctacttcctttaaagcattcaatccacccggcatatctcgatagaaatcaaattgatttcttgggtcaagaccaatacgagggtaggcatgccacaatacaacaatatcataccctccaaatcttttttgcccttcaaccagtatcttgtctattgtataacaattattgttccggtcatagaatctttgatcgtacatcattaaaaaacagcagttgaatgatgatcttatccattggaagtcttctctgtcataaagagatgcattatagttgactttctcatgaatttgttctctccattttagaagagactttttaaaatgcttccattgagtggtatctgatggtgctggtataagaggagcttgaataggatctaaatcttgaaaggagttcttaaaagatttctgtgctgatattgtaaacggaaagataatccctaagaataataatgtgcaggaaataatgacatgttttttatgtatatccatcttttattagtttaagtgaaacatttatttaagatttcaataattgcttggattaattggtcgaataacgccttttatatactatgatttattatggttgatctcaagctataatgtgataatggcgcttttactgtgaaatcataatgcaaatataatatattataacgaattagcaaaaatagtttgctaatttaaatataatgtctatatttgcatcgtactaatatggtaaatagtatgattacaagataataatctcaaattatcatattattatttgcaaaaacgttatatataaatatatgtcatcattaaaaaaaatatcgctaaaagatattgctgaagctgcaggagtttcaacggcattggtttcatttgtgttgaatgggaagaaaaaagagtatcgtgtaggtgaagagactgctcaacgcatattgaagattgcgaatgaaatgaattatcagcccaatcttgcggccaaaagccttcgtagtggtaaaaccaagacaattgggttagtagtctctgatatttcgaatcctttcttttctcaattaacgcgtgtgttggaagatgaagccaccaaacaagggtatactgtactttttggcagttccgatgaagatgcgagtaaaatgaatcatatcgtaggtagtcttcttaataaaggtgttgatggactgatgatcgttccctgtgaaaactcagagaaatttatagcttcacttgttaatgacaatatacctgtggtcttatttgataggtatttccctgaaataaatgttagttatgtagctttgaataattttaatgctgcttatgtctcaacaaaatatctgttggattctggatataatgctccatgtatggtagcttatgatgttaatcttattcatatgaaggaacgcgtacgtgggtataagaaggctatgagtgatgcaggtaagaaaaaaatgataaatgtagtctttctgaagcaggactctcctaaaaaatctgcagaccgtttgctccctaagatggttgagtctggagcggatgcattcctttttggaactaatatgatttcgttggcttgtttatatacgattaaggatatgggacaagaggttattagtaaaatcggtttagtgggatttgatggcaatcctgtatttgactttttttattcacctatatcttacattcggcaaccaatagatgttttggtgcaaaaggcacttggtatattagtggataatatctctaatggtaatacagtacagtctgttcttgcagagggagagtttatagaaatggctccttaggagagtcattttttttatatggttgcttaaacgatttaaccatttatgtatattgaactaaattagttgaaccatgaaaaattcaagattaattggtggaaaaccgaaaattggtatacgacctataattgatggtcgtcgtggaggtattcgtgagtcattggaagatatgactatgactatggctcgcaaagtagcagaactttattcttcggagttgtatcatagtgatggtactcctgtggagtgtatcattgctgatactactattggcggagttgcagaagctgctatggcagctgagaagttccgtaataatggagtaggtgtagtgctctctgtaacaccttgctggtgttatggatttgagactattgatatggatggagaaatgccaaaagctatttggggatttaatggtacagagcgtccgggggcagtttatttggcttctgcattggctggtcatacacagaaaggattacctacttttggcatttatggacgtgatgtacaggaagtaaccaatatggagataccgggagacgtaaaggaaaaactgttgcgctttgcccgtgcaggtatagctgtggctacaatgaaggggaaatcctatctttcaatcggtagtgtatctatgggtattgcaggctctattcctaatcctgatttcttccaggagtatttgggcatgcgtaatgagtatgtagatgccagtgaaatagaacgtcgtgttcagttgagcatttatgaccatgaagagtttgaacgtgccatggcatggacagaaaggtattgcaagagtaatgaagggacagattttaatccggaacatctggtatattcccgtgaagagaaagatgcccgttgggaatacgtggtaaaaatgaccctcattttccgtgatatgatgattggtaatcccaaattagctgaaatggggttcaaggaagaatcaatggggcataatgcgattgctgcaggtttccagggacagcgccagtggacggattataagcctgacggtgatttttcagaagctattctgaacacttcttttgattggaacggtatccgtgaagcatttacttttgctacggaaaatgatacgctgaattgtacttcaatgctcttcaatcatctattgactaatactgcacagatatttgcagatgtgcgtacttattggagtccgaatgctatagaacgggtaacgggtaagaaattggaaggtaaggcggcaaacggtttcatccacctcatcaattccggttcttgtacgcttgatggaacaggttgtcagacacgtgacaataaaccggtaatgaagcctttctgggaaattacggaagaagaagtggaagcttgtctttcagtaactaaatggtatccggccagtcgcgaatatatgcgtggtggtggttattcttctcagtttttgactcgtggtgagatgccagtaacaatgtgtcgtttgaatcttgtaaaaggtcaaggtccagtattgcagattgccgaaggctggacagtaaacttggataaggatgttttcaaggctatcaatgaacgtactgaccgtacgtggccttctactttcttcgctccgcgcctgacaggtaagggatatttccgtgatgtatatactgttatgaataactggggggctaatcatggtgctatcagttatggtcatatcggtgctgacttgataactttggcttccatgcttcgtatcccagtatgcatgcacaatgtttctgaggaagatattttccgtcccagcgcatggactgcttttggtgaagatatggaaggcagtgattatagagcttgcaagaattatggacctctctataaataaaagaaacaagcgttatgttgaaatcaaccaaactgaaaaacactctgctggtaggtgcaactacaatacttgtatcatgcggcggacaaaaagaaatcaagatgggaagttatgcttatgatgcccagttcttaaaggaccatggcgttgaatatactgaattagtatctgctgatggaaattctaaagtgatggttattcctgcatggcaaggccgtgtaatgactacttctgcttccggcgatgaaggtgatagctacggctggattaattatcgtttcataaatgaaggcaaagttagttctcagtttaatccggtaggaggtgaagaacgtttttggcttggtcccgaaggtgggccgttctcactctatttcaaggaaggacaagagcaggtttatgataattggatagttcctccggtacttgatactgaagcttttgacattaagtcacaagacaacagcagcatccgttttgtgaaagatactcgtttgacaaatgcttccggtactgcttttgatatgaatattgaccgtactgtatcgttgatggatgccggtgaagtggctgcggactttgacattgaacttgcagacgacatgaagatggtagcttacaagagcgagaataagattaccaatacgggggacaatgcgtggacaaaagaaggcggactggtagctgtatggatgctcggttgttttaatcctacgccgaccactactgtattcattccttataaggagaatgctgaaggggttatcgtaaatgacgaatattttggcaagattcctgcagataggctgataaaggaaaacggcatcatctatttcaagattgacgggctctatcgctccaaactgggattgccggcttcacgcgcaacggatttatgcggaagctatgattcatcgaagggcgtgctcaccatattgtggtgcagtcttcccgaaaccccttcaatttatgtaaacggtcaatgggggcctcaggaagatccgtttgctggtgatgtaatcaattcttataatgacggtccggtagaagacggctctatcatggggcctttctatgaaatcgagacttcctcacccggcgcagaattggctcccggcgcatcgttggtccatacacagaaagtaatccatatacaggggaaggatgagcaactggctctcatcgtgcaaaaattgttcggagcggatttgaatgtaatcaagacaaagtttcaatagggtaattatataaaaaataggagaattcgtatggaatcgaataagataataccgaaagggatcctcttctcgttcatcctgctcaccacacttttttttgcctgggctgtgccgaacaatcttacggataccatgcttgcggctttcaagcgcatcatgagtatgagtgattcgaagacggcctggatacaagtggtgtgctatctgttaggatatggatgctgtgctgttcccggtgccttgttcatcaagaagtatacttataaatcaggtgtaatgctgggacttgggctgtatgcttttggggccttgctgttctatcctgccatgctcagttcgggagtgaatgttgatttcagcttctttatgtatctgcttgcaatctttgttctctttgccgggctttcaatcctggagacatctaccaattcctatgtattggcaatcggtcctgaaagtactgcaacacgccgtctgaatctgtcgcaggctttcaatccgttcggggcaattacgggagtagtaatcagtcagattttcatcctctcacaattgaatggaatgacggcgacagagcgtgctcaacttccggctgaggagttagctgccatccagggacaggagctgagtgctgtcactacggcttatgtggtacttggtctggtgatgttggtgcttctgcttgctatccggtttaccaagatgccgaacctcagtgagaaaggggaaaaggtggaatttactgctactctccgtcgcctgataaagaacaggaattatgtatggggggtggttgcacagttcttcaatattggtgcacagatagccgtatggtctttcgtcatccgttatgctatgcaacaacttaattttgatggtgtattggcttctttaggtgactcagcctctgcggaggccgttgtcaacgcattgcgcggtgtggaaccggtggccgccgcattctataatggatgcgaatggctcggattggatgacttactgccgcgtacggcggaacaggctgcggccacttactatatcatgtcactcattctttttgtgatcatgagatttgtatgtactgcaatgatgaagtatgtgaaagcctataaacttttgataggtcttgcccttcttgccgtaatgtgctgtttgggcgccatgttcggtaagggaagtttcggagtttattgcctgatgggtatttccggctgtatgtcattgatgttcccgaccatttacggattcggtcttacaggtttgggtaatgacactaaaatcggtggttcattcatggtaatggctattgccggtgctgctgttctgactcaaatccagggtattgtttccgaccagacgggtagtattatggctgcatatgttgtaccggccatcgcttttgcagtgattgcctattatggtttcttcattgctagaaaacaggaaagtggagattgtatgtagaaaacttataatttaaaaacaaaatatcatgaaaaaagtatttttattcttaacaactttaataagcttgtccgctctgactattgatggttcggctcagattgatagaggagaattaggaagtctgaccacagtcaaagacggattacgtagccgtcggataagtagtgccgataaaaccggtaataacggtgactgcgtagggcagtttaagccgggagaaaaatggagcgtggaaattcctggaacaggtgtcatcaaccatatttggtttaccatcgctccgacaagcatcatgagaaacgatcttatattccgtatttattgggatggaaacaagtatccctctgtagaagctcctatcgctgccttcttcggaaacggttgggacgagaaatatgagttcatctctctgccattggcagttggtccaagagatggtacggggcttgcctgctatttccagatgcctttcgagaagggcgcacgtctggagattgagaaccagagtgatgagcccttgactcacctctactactatgtggactacaccgagatggataagttacctgccaattcaggacgttttcacgcttggttcaaccacgagacaaccgacgctctccccgaaggcgaaaccgagtgggggttggttggcactccgggttgcaatgtagatggtgccaacaactatctgtttgctgatattaaaggtaaaggacactttgtaggtatcaactactatatccactgtccgtcgcctatgtggtatggcgaaggcgatgacctaattatcatcgatggtgaaccgaagaaagccttgagaggtacgggaacggaagacttctttaacacttcttggtgtccggcaagcatctttacgcatccttactacggctatgcccgtgtgaaccgtgacaacggttggttaggaagaacgcacgcttaccgtttttttattgccgaccccatctacttcaacacctctctcaaaggttctatcgagcatggacataataacaacttgactctagatctcagcagtgtcgcttactggtatcagtccgaggctcatgagttacctgccgctccgactaaggccgacagagcaccgaaaccattcatccgtgaccaagatatgcatcgttggagacatgagtggagaaagaacttcggcaatggctctaaattgtggggtaatgaaagaaagtaaagtgaattaaacgagtattatgaaaactatattttttatctaaatttaatgttataatatttaatcgtaactactcagttatacagacttgctatcatttaatgtggtataattagtaatatgcttcgttttgagtcttattagactcaatttattagaatttctaataaatcatattgataatcaatgaattaaggcatcgtggatatctgagtagttacatttaatcttaacgctgatgaaaaacaggaatatgctacaaaagtggcttatcattcttttcttaggcttgataatccaagcggtttccgcacagaacattaatgtacatggtatcattaccgatgaaacaggagaaacaatgataggtgtatcagtattggttaaaggaacatcaaccggagtagttaccgatgtaaacggtaatttctcgctttctgttccgaagaatagtgttttgtcgatttcttatatcggatataaaagtcaagaaatctccataaacggagctaaaaaactgaacatagagatggagccagaggctcaaaatctggacgaagtcgttgtcgtagcttacggacaacagaagaaagtctcggttacaggttctatgtcaagtattaataacgaagcattgctgaagtcaccgtcagcatctttgggtaacgccatttccggtaagttgccggggctttctacggtacagtattcaggtcttcccggtgctgatgatcctgtgattttgattcgaggtcaatcttcattcaatggttcatcgcctttgattttggtggacggtgtagaacgttcgttcacgcagattgacccgaatgaggttgccgacatcaccgtgttgaaggatgcatccgctaccgctgtgtatggtgtgcgtggtgctaacggtgttattttggtaaccaccaagcgtggtgaagtcggtagaactaaagtatccgcatctacctcatggggtgtacagagtgtgaccaactttattgatatggcgaactcctatacctatgctaccgcttataacaacgcccgtatttcggacggtaatcaaccggctttccagcctgctattatcgatcactttaagaatcacgataatccgcttctctatccggacatcgattggatagactatgtgatgaaagaccgtgctttgcagagccagcacaacatatccgtatcgggtggtaaccaggtggcacgctatttcgtgtcagctggtttcctcgaccaagatggtttgttccgtactttcgacaaggatcctaacaccaacttctcatacaaacgttacaactaccgtgctaacttggacctttctttaggtaaatatcacgaactctccatcaaccttggtggtcgtgttgagaacaagcacagtcttagcagttcggaggaacgtatctttgtctatttgatggatgcgcaacctttctccggtgccggtattgtagatggcagatgggtactcgctaatagagatcttatcgacccgacgggtcttgaaaatatcgtgagcggtattgacggtttggacacgttctatggtcagggttatactttttcctctactaacgtgttgaatgccgatatcatctacaaattgaacatggatttcctgaccaagggattggatttccgtgtaaaggcttcttacaactcttcttatgggcaaacaaagaaccgtacatgtggtaagcctgcttctttccgtccttatctcacagagaatggcgaagtcgtttatcaacgttccggtgactactggaatccgggttatagtgagtctgcatggtctaaccgtgactggtatgctgaggcaagcttcaactacaaccgcacgtttggctaccataacgtaggcgctttgttgctgtacaaccagtctaagacctactaccccggttcttatacttctatcccctacggttatgtaggtttggttgcacgtgccacttacgactataagcaccgctatatgatcgatgctaacatgggttataacggttctgagaactttgccgaaggcaagcgtttcggcttcttcccctctgtatctgttggttggggcatttctgaagagaaattttgggaacccatcaagtcagtgatctcttacttgaagatacgtgcatctgtcggtaccgtaggtaacgacaactgccaaggccgtcgtttcctttacctgccttctgcatggggcatttggaacggatatttctccagcatgcaagattaccaaggttataacttcggtaccacgaacaatacttttttgaacgtggcacgtgagatgtcttcttcttcacctgatgtaacttgggaaaccgcagtaaagtataacataggtttcgatgcgaagttctgtaaagacaaaatcggcttgaatgttgacctgtttaaggagaaccgtaaggacatcctgatttctaacgtgaatatgattcagtcacctacagctgtccgtccttcttacatcaactatggtcgcgtaaaaaaccacggttacgaggtgactttgtcctactccgacaagattggcgaggacttttctttcactatctctccctcagtatcttatgccaagaataaggttcttgaatattctgagttgaagcgtaaagacaagttggtgaaagccgatagttatatgggtcgtaaattaggtttgaccgaagaccgagtggtttctccggactggacctattcaaccggtcatgccattggtgcccgtcgtggatatgttttcttcggcctttacgaggaaggtgtaactgaagaggcttaccgcaacgcttatggaacggatattcctcagcagctggttcctgatttgaagaacggtgatgctgtttatgttgacttggacggtgacggtttgattttggaagagtacgaccagatttactctgaaattacggataacccaaaatatgtattctctttgaacttcgatttccgttataagaatttcgactttactatgttgtggacgggagctgaccaggtgaaccgtatcctacaaggtccttaccgtaatcccttcggtgaatctcatcgttccgctttgatgcagtgggtgtatgataactcttggtcagaggataaccccagtggacatctgccacgtcttacctttaccaatgagaagcagaaccgtgctaactccgacctttggtatcaggatgcccgttatatccgtctgaagaacttggagattggctatacgctgagaaacaagtcttggttgccgaaaaccacgaatatgcgtttctacctaaacggtaccaatttgctgacttttactccgtttgatgccaacgaccctgaaaatacaggtggtggttctggatttagatacccgctgatgcgtgttgttaatttaggcttgaaagttaacttctaaataattgtatatgaaaaaaagaaattcaataaaatccatactgctgctgacgatcatctctttcgtgggtgtagcttgtgtggacgagattaagttcggaaatgcgtttctggagaaggctccgggagaagacgtgaacgaagatgttattttctccaagaaggtatataccgattatttgttatggcagtgctacgagggactttttactccgtttaagaattgttatgcaggtaatggacaatttgaaaccttgtccgatatcatgcactctgaagagggatgggactctatggggcgtttccattatacaggtgttttgtctgcctctaacgctaacccgggctggttggttgcccgtgcggcttacattacatcgggggggatggagaatatgagtaatacagcttttcgttgcatttggaccggcatacgcgactgttgcttgctgttggataatgtcgaccgcgtgcccgatatgaccgatgcggaaaaggcacgttacaaagccgaggcgaaagtgattatggcaagtaaatattttgacggtattcacaattttggtggtctgcctatcgttgatcatgcactcgccgcagacgaagtcttggagaaaccgcgctctaccattgaggaaaccgtaacatttgttgttcgtttgctggatgaagccattgccgaacctgaattgccgtggaacattcccacttcagaattggctacttgggcaggacgtgttaccaaagcttcggcattgggtattaaggcaaaattgttgaactatgtggcaagtcccatcttcaatagcgatactccgtattgtgttgaagagccccaggaggctgttaacgcccttcaggtgtggtatggtaattacgacgtgaagcgttgggaagctgtggtagatgcgtgtgaagagttcttccggatgaactccgccaacggtaactattaccagttggaagaggcaactactcccgatgaagctggctatcgtgctgctttccgcaaggcataccgtgcccgtggtaacagagagtctctgcttgaagtacatgaccgtgtatatatgttggagtgggataaccaacctggcggtttctggcatgatggtggtatcgctcctaccttggagtggatggaaatgttcccgtgggctgatggtaagaactacgatggacagaaatattacaatcaaagacccgcgcagaaggatatcttcgaaaaacgtgacccccgtttgtatgaatctatcgtcgtacaaaagcgtgactataaacatcagatttatggtgaggataaccccatacagttgtgggaaggtggtgagttcttgacttccggtggaagatataattgtaagccttggggattacctacttataaatttgtattggatttgggtgatgctattcaaggtggtaaaggtactattgataaagagcctttccaaacctcttatattcgtttggccgagctctatctgatttacgctgaggcattggcagagactggtaacaacgtaaaggcattggagcaaatcaacaaggtaagagcccgtgtaggtttaggtaaactcgaagtaatgaaccccgaattgagcttgactaccaataaggagaacttaataaaagaaatcatgcgtgaacgtgcttgtgaattaggatttgagtatgaaacccgtttacacgacatgaatcgtcgtgtcatggaaaaagactttaagaaacatctgcatggaatccacatctatcgtttggatgatgataatgatttggtattggagaaatggacgaaagatagcggcgatcctttcccgactaaattcttatatgtgccatatgacctgaatgaaggagatgctacagctgtaggttatactataataaaagatggaaaggagtcaaagatagaatcacctacgggaatgactgcaaacccacgttttgtttgggaacaccccgaacgctggtccaataagtggttgctcgttccgctgccacctgatgaaattaataagaactatggtttgacacaaaacccgggatggtattaaaatcttaattctaaaatagcaaacaatgaatagaaaacataaaacactaaagtggggcatagctttggtatcgtctatgctcactttaaacttgtcggcgcaaagttcgcttatagactaccagtccgataaggttgatttaggaatgggtgttgagcagagtcagatgttgactaccgcttccgtggaggtggttagtggtgatgagttgcaaaaaacggcagctatttctttgaaagaggctctttatggaaaattgttgggacttacggtgttgcgtccaggcggaacggtcagtgactacagctccggagcagtattcaacattcgtggtcagcagactacgacggagaatggtgtattggtgctggtagacggcatcgagcgttctatcgaatatttgaccgttgacgaggtagaatcggttacggtattgaaggatgctgccgctgtggctcttttaggctatcagggcgtgaacggtgctatcttggtgaagaccaagcgtggtgtggagggacgtcagatttctgtatcttacgatcataagttcacgttcaatccaaaagtggctaattttgtagatgctcctacctacgctaatgctttgaaccaggcgcgtgtcaacgacggtttggcaccgatgtacaacgattatgagttgcaggcttttgctgacggtactcatccctactactatccgaacgttgactggaagaaagaggtattcaaaaactacggttcggaagaccaattcaacctatccatgaagggcggtaaccagaagttgaaatatttctctatgttggattatactgatagccgtggtttgttggataaaacagatcaagagcaatactcttcacagatgagattctctaaagccaatatccgtaccaacttggacgtgcagtttactccgacaaccaagttcgtcttgaatgcggtgggtagtttcgtagagaccaaacgtccttacggtgtgaccgaaaacggtttgaccgacctgctttatcgtactccggcttccgcatttccggtaatgaacgacccggaaggtaaattggcaggaatttggggtggtaacactacttatggcgctaacaacgtggtcgcacaggttcgggcttccggctttacgaagagtcactcccgttctttccaaggtgacttctcgcttattcagaacctggacttcatcacgaagggactgagtgtgtcggcacgtttgggttacaataacttctctcagatttatgagaccaacgcgttgggttttatgtatggttacgagcgttatcgcttcgacgaggccgggcatccgaccgagctgataaactactctgccggtgacaaaaccaacaacttgaccttcgatcattggaccaaccagcacaaccgttcttctttcttggaagtttcgactgactatcatacttcgttccgtgacgatgataatttctctgcctcattgatatggcaccaaaagaactccacctataacgaccagtatatgactttcaaccggatgaatgtaatggcttacctgcactacgatttgcagcagaagtatgtagccgacttggtattggcgatgaatggttctaaccgctcctatccggagaagtggtcgttttctccaactttgtctttgggttatgtatttgccaacaaggaggacaaccgaatattaaacttcggtaaactgcgtttctcagccggtattcagcacaccgactatgtgcctattcagggattgtggctagagaactacaatggaagtgcaggtagttatctgacaggcctaggtgacggttcatggcagtggggtacgtttctcggttaccagcctaccaggcgctttaacttggaaacggcctataaattcaattggggggctgacctgcgcttgttcaaacaggtggacgtgaactttgatgtttattatcaattgcgtgacgatatcctattgtcgggtgacggtttgaattcagctgtattcggtaggccttccgcttacgtaaactggggacgcgtagctagctacggtgttgaactgggtgtgaattgggttaagcagataaacaaagatctctcttttaacttgggttctaatctgacttggggacgtaataaacagaaacgtaacattgagaacgtggcttatgactatttgtcagctatcggtggacgtgtaagccaggcgtgggggctggaagtagtcggttttttcaaggatgaagcagatatcaccgcttcaccacaacagaacttcgataattgccgtccgggtgacttcaagtataaggatcagaacggcgataacgtcatcgatgaaaacgacgtggtgaaaatggggtacgataccagcgtgccggaactgaacttttcattgaatctgggcttccgctacaagaactttggtatgaacgccatgtttcagggtgcaggtatgtataccgcatacttaggtacggtgggtgtatggactccgattatcgacggtgccaacctttctaaagagtattataacaactgctgggatagaagcgagaccccggtttatccgcgtctgacttcacgcaccaaccttaacaactaccgtggtaacgatgtttggtacaaaaatgtgaacttctttaaactgagaaactgcgaggtatattacatgttgcccgaaaattggatttctaaagtgaagatgtcacaatgcaaagtgtttgtcaaaggagagaacctgatggccttgtctaacctgaaggcgatggatcccgagaacatcggtaccaattttccgactttgatgggagttaacttaggagtttctgtaaagttttaacggataaagaaaaaacagatatgaatcgaattaaatatatattttgtgcagtaatactctccgcatttacagtgagctgtgtcaatttggactatactgaggtgactacagccgatgaggagtggatatataaaagccctatgtacggtatccagaaattggtgtacaacatttatgcacgtgtacccaacggttttgagaaaaactacgagggcggtagaggggctacgctggcggctgccaccgatgaggcagagtgcgcattgtcttactcttcagttcaccgtttctacaacggtggatggaatcctaacaatcccttctcatttacgtggagcaattcgtatgcggctatcgccgaagcgaacaccttccatgagaagcgcgataaaatcaatttggacgagtataagaacaacctggacttcgaagctatgaaaaagaagttcgagctgtttgagtatgaggtccgtttcttgcgtgcttatttctattttgaactggtccgtgcctacggtgacgtgcctttcacgctgaaaacgttaacagtggaagaagcgaatagaatcgaacgtacttcagccattgccatcatggattggattgcagaagagttggatgccatcgttgaatatctgcctatctctttcaccgatgagttgagcccggaaacaggtcgtgcaaaccgtatgatgtgtttggcgctgaaagcccgtacattgctttataaggcttctccgttgtttaacaatgagaataataaagagtggtggctggatgccgtcagagctaatggtgaggttttactccgtgcgcaagagtggggcattggtttggacaggtactctaagatttggggacctcgcaacggtgacggcatcgagatgatttgggccattaagcgtggtaccagtaactattgggaatcgtacaactaccccatcggcgtggagaacgccaacggtggtatgtgtcctacccaaactttggtcgacaattatgagtataacgatggcagcaaccagacctttggcgagcgtcattccaacacagtgattaacctcacacaagaagacccttacgttggtttggatccccgcttttttatgacggtagtgaagaacggtgatatttggccgaattacaatcctaatcctatcgagacctttataggtggattgaacgctgcgccgattcataactccactccgacaggctactatctacggaagtattgcgatcctaacgtgagtctggcaacgaacaaccccaccacttctcctcatgcttgggtagtgatgcgtttgggtgagttttacctgaactatgcggaggcaatgttccaatactatggcgatgctgaagcaaagggcgaaggcggcttctctgctaatgatgctatcaacctgttgcgcgatcgtgccgatgtgatgatgcctcactggaacggaactcctgccaactggttcgaacgctacaaacgcgagcgtatggtggagatggcatttgaggaccaacgcttttgggacgtacgtcgttggaagtgtggttcggaactgagtgaaatctccattgccgaattgcagaagaacgcttcaggtgacattatcctgacacgcaagcaggagcaaagacgttgggaagataagtattatctctttccgattcctttcagtgagtataacaagaacaagtatttgggacagaacccgggttggaactaataaaaataaagcatagattatgaagcagattataaataaattggctattctctttttggcattggtatcctgttgtgcttgttcgaatgacgacgaagagcagaatgcgagattgtctgtggtggacttctatccctcaatcgtgatggaagggattaatctgactgtggttggtacagacgtaaaatcggtaaaagaggtggtttttcccagtggcgttatagctaccgatattaccgtaaaggatgaatattcgtttgaagttactgtacccgccggagtatcggaagaagcagcacccttgattgtgagaggagagggcgaggaagtttccagccgtcaaaccatacgtcgcgccaaaccggtgtttaattcttttctgttcaccgacaagaaaggtgctgccatcaatactaagatgtcgattttaggtaaagatctattgtttgtcgatgccgtagcttttatggttaatggagaaaagcgtatggtagataacaagcatttgctacgtaaatcgaacgatgatatcaaatttataattcctgacaatttcgagaaaggagatgtagtgtcactacagctcattttcaagaatggtgagacaatggacttggatgaaaaaattgacatcgtgataccttggcaaaatccgttcgcattgtgcgacccgattacggatgaaactttcatgattactgatttcgaacatgaagaccctgcaaacggcgtaagtgatataaaggcaagcggatttgtggctgttcatgaggaacaatcagaggatgatttcttttggaacaatacctatatttatacggcagaagatacaggcagtggcgatttatttatttgtcatgtgcatggaaaccgtcctgatggtgatttaaaaatgaatgagtatgagattaagcttgacgtgagaattgatgaaggtacgtttggtgcttctttatgggctggtcacttcgatttgggatggacatggtgttggattggtaacttcttccccgaatcaaccgacgggaaatggataaccgttaagtgcaaagtcaaagacttaggtataggtggagattttgatactggacatcctatgggacagtgggcattaagtggtctgattggtccttctcttccagccggaatcagtcttgacaacttccgtatggatccgcttcctgaagattaatcgttgcaacatttattcatgtcgaatctgtaaaaaagaaaagaatatgaaataatgattataaagtggcaacagaggtgaatatcttttatctctgttgctgtttttaacgttttgttattaaaataatcaatagagatagaccaaagaatatgaaaagaatcattttaactcttatctgttgcctctctatatggggagtatcggcacaaaataaatcgttcgacggactggacgtgcacatgggcaatctgttccgactgtctgatgccaagacccattccatctgtcccgaaaattttactggtgagaaaggtaaaggcggtatggctcaagtctgtgaccgcgggaaacggaacattgccaatgcggcatatgcggcaagagaccttggtgaaggctggaaagtgaatccgtatattatcataaatcccaaagagaccattaccattgctgaaatggaaggaccgggtgccattcagcacatctggatgacccctaccggaaactggcgcttctccatcatccgcatttattgggacgatgaaaaggaaccttctgtggaatgtcctgtcggtgatttcttttgtatgggctggggaatatatgctccactttcttctttggcagtctgtatcaatcccggcagtgctttcaactgctattggacaatgcctttcagaaagaaatgtaagattacaattgagaatatagatgaagagaaagcaatgaatttatattatcaggttgattatacattgacggatgtacctgaagatgcggcctacttccatgctcaatggagaagaacgaatcccaatcatacatcagactatacaattgttgacaacattaagggaaaaggacactttgtcggtacttaccttgcatggggggtaaacaacaatggatggtggggagaaggagaaatcaagttctttatggatggtgataagaagttccctacaatatgtggcacgggtacagaggattatttctgtggctcgtacaattttgaccggggaggtcaatacaaagagttctgtactccttatgccggtctgcatcaggtgatcagaccggacggtacttacaattcccagcaacgttttggattgtatcgctggcatattacagatcctattcgatttgaaaaagatttgaaagttactatacaggatttgggctggcgtgcaggtggtcgttatttgcctcaaaagtcagacatcgcatctgttgcattttggtatcaagcagagccccataataagttcccggaaatggtttcttgggaggaacttgaagtaaattgaaaagtgaaatgttatgagatattcagtttatatatttttactattgttccttttatacggatgttcatcgtcgagtgtccgtgagcaatatggcttgaagttgaaagaatttcccattgattgtgactcattgataaagtcgatagagatagataggttgggagatgcagagttctcatcggaagttacacaagtggatgaaaatatagtaaaagtacatatccgtttcgaccttaaggatacagtcaaacaggatgattggcaggtgcagataaagccggctttcaaacctgaattcaactgggcacctcatttgactcctacagttaataatattattgaccagcatgtttttcgttcgcctgcgcttattgcaacagaccaacaacggggtatcgtaatcatacctgatttggatatactgtctaggtctggtaaaaataggtggtatatggatatggatgcggagaataatatcctttcgttgggtatgtctgcaagcaaggtatctgaccatgtattatatgaacgtcagcctggagcagtttatgagggtggtattgtggaatatggattttatataatcaaatatacggaaaagcaagagttggcaaatccatttcgtctaccactgcagtttatgtggaacaaatggggacacgatcgattggtgaaattgtcttctgaagattttgagccttatgtaaaatatacctataactgggcgtttaatacttgggaaaaaagtgtttggcaggaatttacactgaatggaaagaaagtgggtgcacctgtatttattgtaaatacgacccagagccccaattatccgggtgaagtgaatgaacgggagtttaggtccatttggaatcaggcttggtttagttctttgcgttcggcaagtggattgttcagatatgctagacggactgctgacagaacgctgttggaaaaagcgaatctgactaaagaattggcattgtcatttccgatgaaagatggatttttctacggtcttatcggtaccgatatgtgtgaggtagagatggatggaaaaaaatgcaatcgttccaagggctgggaccattatttttggggtaattccaatcggaatccgtttacgtgggatgccagacaatcacctttccacattttggatatgagttggactgcactgctgatgcttcgttggtatgaagaattggagaaggatgcacgcctgttggcttatgctgagacttatgcacgtgcattgttgggggtacaatatgagaatggatattttccaggctggttggatctggaaaaattgcaacctatggagtatttgaatgattctccggaaacgtctctatcggttacattcttactcaaactgtatgagatgacagggaaagaaaaatataaaattgcagctctaaaaggtatagaagctgttaaagaagctattacagaaggacgttgggaagattttgagacttattggtcctgttgtagaataggtactcctcaatgggttggcaaaaaagtaacgagaaataatatgtataagcaatgtaatttttccatgttttggacagcggaagccttgttggagtgttatcgtataactggttgttttgattacttgaaactagggcaaagggtattagatgaaatgttaatgacacaggcatcttggcaaccgtcgtatatatatgtaaatggtctaggagggtttggagtcatgaatactgatggtgaatggaatgattcaagaggaagcttatttgctgaagttatcttacaatatggaaagctattggatattcctgaatataaagagagaggaatatgtgctttgaaaacatcctttgaaatgatgtattgccctcaaaatctaaaagcaaagcaacaatgggaaaaagtgtggccattttttaatgaaaaggattatggctttacaatggaaaactatgggcacggaggacgcacttcacttactggagaaggtatgggagagtttactatttatgattggggaaatggcgcagcttccgaagcttttaatcgcattttagatagatatggggcggagatatttcaatgatatttatattctggttttataaaatgccaaattcgttaatcgtaaaatagtacaagtatggatataattttaaaaagactattttcttttatagtagtgctttttgtaggcgtttctatgtttgcaggagggactattaaaaatgtaaagaaaaaggccgttgatacacaaatgactgatgaaacggctgctctgttatataatatacaccaaatacagggcaaaggaacaatgcttggccaacacgatggtgtgtggatggaggaaggagaaaagataacaggacatattcataaattatctggtaggttaccagctattgcaagttatgattttatgtttataaccaatgtaaacaatacagaaggctcttggtttagaataagagaacatgaaatacgcgaaaggattattgctgcaaatcgtgaaggtctctttataactatgtgctggcattataatgatccatatacacaaaaaacattttatacaaaagaattgccgattgaggaacttaaaatgatgtcatttaagtcaatacttccgggcggtcaaaatcatgaacgttataaaaaggatttgcggaaagtagcagaattttcatcatctcttcgtgatgatgacggtaaattaattccttttatatttcgtccttttcatgaatttgacggggaatggttttggtggggagcagcctacaatgaaccggaagaattcaaggatttgtggagatttacagtacactatctgagagatattctgaatgtccataatatgctttatgctttttctcctgatataaaatttgattctcgtgaggactatctattgcgttatcctggcgatgattatgttgatatattaggttttgatgattatgaagacttcaaatatgataaaaaaaggacgaatgaggctcggaagaggattcgtattgtcggagccttggcaaatgagaagaagaaaccttgtgcattgactgaagtgggatattttattaaaaaggataatccgcaaaaagtagacattaaacgaatggaatatttattagaaaccatttctgatatgtacgaatatctttcttatgctgtattttggggaaatggtggaggtgtatattgtgtacccacacaaggtgatgccggagaggaagagtttaaatccttcctagggcaaccatttattctattgaatgataataagtaaaacaataaagttatgaaaaagaaactattagctgtgtttttattctctgctaccaccatgttgtgtgcacagactttacaaacttccaacaagtattttgaagttggaaacttcaaagaagtacacaatcctgcatggggggtgactgatgatccatggtgtatcaatgaccatactttcatttacgataaaaaaaagaaaaaatggcatgtgatcggtataacacatgcccgaaaaatggattatataaaagatcctgggctcaatctacttcatatttcggcagatagcctatttcaaactccgtgggagattcatcctcatgcactgactgctgattttaagaaatataaggaatcggttctttgggctccttattgtgtacatcataaggggaaatattacatgtatgtgtgtgccggatcgcaaggtggtgcacatgttcatgattcataccaaatgaatctttatatatccaaaaatttgaagaactgggaaagatataagcaaaatccgttgtttgtggatggatttgatgcacgtgatccgatgattattagggatggtaaccaatggataatgtactatactgcaaactctacaccaatggggggaaatcatgtcattgcagcttatgttagtaaagatttacttcattggtcagataggaaaatagtttttgtccattcccgaaaaggaactttcggaggacctaccgagtctcctttcgttgtgagacgtggtgataaatattatatgtttttgtgtgatggagggcatacggatgtatatattagtaatgatccgctacagtttgaacaggctaacttgatagcggaaataaatgattgtcgggcatctgaattaatcaaagataaagaagggaactattacatcagtagcgccggatggttcgatggaacatacgggttaaaaatagctccgtttatttggaaagatgggttagataatgaaacaaacagtttaaatccttaacatatatattatgaaaaaactatttttagtcatatcggtttttattggactattgttgacgaatattgattgtcaggctcaaaaagttggaggagaacttgggaatctagctgcaattaaaaaagggtttcgtaatcgtaggataagtagcactgataaaaatggtaataatggtgattggatagattcaataaagcctggtgagaaatggagtgtggcaatttcaggtacaggcattattaatcatatttggtttactatttctccaatgaatatcatgagaaataatcttatatttagaatttattgggatggtaaatcatatccttctgtagaagcgcctctagcagcctttttcggtaatggttgggatgaatattatgagtttgcttctcttccattggctgtaggtcctcaaggaggaacggggcttgtttcttatttccagatgccttttgccaatggtgctcgtttggaaatagagaatcaaagtgatgaaacaatttctcgcctttatttttatatagattatgtggaaatgaaaaaactgccgaatgatttagggcgttttcatgcatggtataaccatgaattaacagatgcattaccagaaggtgaaactgaatgggggttggtgggaccacaaactaataatgtagatggtgctggtaactatttgtttgcagatattaaaggtgaaggacagtttgttggaattaactattatgttcattctccttcacccatgtggtatggtgaaggtgatgacatgatatttatagatggtgaagaaaaagcatcattattaggaacagggacagaagacttttttaatacttcatggtgccctaaaactatctttgctcatccttattacggttatgcaagagtaaataatgataatggttggttgggaagaacccatgtatatcgtttctttatctccgatcccatatattttgaaaaatcactgaagggaactattgagcatgggcataataacaatctaaccttggatataagtagtgttgcttattggtatcagtctgaagctggtattcttcctcctgccccacctaaagctgacagaactcctaaggaatttattcgggatcaggatatgcaccgttggagacatgaatggagaaagaattcaggaaatggatcaaaattgtggggaaatgaggtgaatgaaaagcctaatacataacaaaggactattaaaagatatgaaatatctgacaaactcaataattctgctggtcactataattatagtgaccggttgtactgggcaaaaaaacataagatttgttttaatgccggatatacagacttatacgcgactttatcctgagatcttagaatgccaaactagatggattaaagagcatgcagatagtattacatttgtcttgcaacaaggagatatgactgaaaataatattgatgaacagtggaaagttgcagcatctggaatgaacatattggacaatcaagtaccatatgcctttgtaatgggcaatcatgatttaggaaacaattctgataaaagagattctaaattgtttaatgaatactttccgtatataaaacatagccagatgaggcattttggtggagcattcgaggaagggaaaatggataatgtatggtattcatttaaagcaggtggattagaatggttagttctttgtttggaatttggtcctcgtaacatggttttagattgggcgggaaaggttatagactctcaccctacttataaagtaattataaatacccatgcttatatgtattcagatgatactcgtatgggaactaatgattgttggctaccccaagaatatggaattgggaaagatacgggagaaaatactgtgaacaatggagagcagatatgggataagctaataaaaaagtatcctaatattttattcgtatttagtggtcatgttttaaatgatggaactggtaccttagttagcactggaatacatggtaataaggtatatcaaatgttagctaattatcaagatggtgtggaaggagctattagggggaaaaatggttttttacgtattatagatattaatgtaaaggaaaaacagataggtgtgaaaacatattctccttatttacgtgagtataaattggataaagagcatcagttttcttttgaagatatatccttcaactaaaaacatatatcattaattaaatatattatgaaaagaatcaaattacttgctatcttgttgttatttggtatccaagttttttctcaaattgatttttataaatgggaattgcagaatctctcagatatttctcgattgcctgaatatcgtacaggcaacatatatcaattatccagttatgatcgtactggtggcaatgatgatgggttttctggcaggtactcttacattcgtaaagaagggaatgatttagtggtggctgatatcaaaggggcaggggttattaaccggatatggactcctactcctactaaagatactattcagttttattttgatggagaacaacaaccgaggataaatattccttttatagatcttttttccggaaatgtttatccttttattgccccattatgtggaaatgaaataggaggatattattgttatatgcctataccctatgcaaaatcaattaaaattgtatataaagggaatgatttgaagtttcaccaaatacaatacagagaattgtctggtaaagaaaaggtcaaaagcttttcatggagctattttgataatacgttgctattacctgaaatagataaaatttggaattgtctccctctttctgtatatggtgataaagtaagcatacagcaaataaatgtaacgattaaagaaggagaggatggggaaatctttgaacttcaaaatggtggtaggatagtaggaatagaattagatggtggatatgatttgcaaagaaaaagtgaaaaactgctattgaaagccaattgggatgatgaagtaagggctgcaatagatgtacctttcaatagcttttttggatatgtgtcaggaaagccatccatgagttctattttgcttggatcaactttatctatgtgttattcttatttaccgatgccatttgataacaaggcgaagttgtctgtagaatataaagataatggtaccggaggggaaattacgatttcagggagagtttattttatagaagaaaagcgtgataggaaaagggaagggaaactgtatgctcaggcgcgtagggaatatttgcctccggtaggttctccctttacaattgccaatgtgcttggaaaaggtcattacataggtacaattcttattgctcaagggttgaatgaaggaatgactgaatactgggaaagtgatgattgttctctgattgatggagaaatgcgcatacatggaacaggctctgaggattattttaatggtggctggtacgctgtgatggatcgttgggacagaggagtaagtttgcctatacatggggctttattatatgatttgaaaacggcacgtacgggtggatatcgtttttatttatcagataaggttaatttcgattcatcctatgtgttaactatcgaacatggtcctgagggtaataaattgaatgtggattatacttctgttgggttgttctattcagatagcccacagtttgagaacaagcatctatttgatgttactgacgaagtgcaacgtagagatattcttttggctcaagatatgactatgcggctttattggttcactcaggcttcatttgatggaagttcaatgattatttcatcaaaacgagaagaacattggactaccaatattgattttgaggctgtacctatggtacaattcgatcttacaggaatggataatggtaaatataaagtatatgttgttcatacaggtttagaagaaaataagcccttctctatatggcaacggacaaatcaggtttcagaatggattgtaagcaataaggaccttcagtcgacttcttttgctggagaaattgaaatatccgaacaggttaaaactctgaccgtacgaaaaaagaagatggataatactatagtgaaaattgattatcttatttttgaaaaagagaaagactaataatgaagatgatacgattatatttggaatttattttgttgctcgtaatattttgttcgtgtaattctacttcttctgatgtagaaaggaaatatttgcatttaagtaaggctgatttagagaataagattaagggtggctgggcaggtcaaacaattggagtaacttttggaggagtaactgaattcaaattcaatggcacttttattcaagattatcagccgttgccttggaatgataatcaaataaagaatacaatgctttcatggcctgacttatatgatgatctttatatggatcttacatttgtggaagtatttgagcgtctaggttttgatgcaccagttgactcatttgcttatgctttcgctaatgctgactatatgttatggcatgctaaccaagcggctcgttataatatactaaatggagtacttcctcctaaatctggatattggaagaataatccccatgccgatgatattgactatcaaatcgaagcggattttgcggggttaatgtctcctgcaatgcctaatgtagcttctgatattagtgacaaaataggacatataatgtgttatggtgatggttggtatggtggtgtatatgtaggggcaatgtatagtttggcttttgtttatgataatatttatgagattgtaacggaagctttgaaaactatacctcagcaaagtactttttaccagtgtatagctgatgttataagatggcataaagaatatccggaagattggcatcagacttggtttgagatacaaaagaagtggtcggaagataaggcttgtccggaaggtgtatttgtacctttcaatattgatgcaaaattaaatgctgcttatgtggttatgggcttattatatggtaatggagatttcactcgaacgcttgaaataagtacccgggcagggcaagattcagattgtaatccatcgacggccggcggagtattggcaacaatgataggatatgataaaattcctacatattggaagagtagcctttctcaggcggaacaattaaactttaaatatacgaatatgtctttagaaaagacttatgaaattagttttaaacatgctttgttgatgattgaacgtaatggtggaattataaaggaagatagtgttgaaatcttactccaaaatcttaaggaagtacgctttgaacaaagttaccccaatctgattcctaaaaagaaagaatcattctggaggcttgttgataaagaagtttcttttgaatttgaaggtactgggtttgcttggcgtggtgaagctacgaaaaaaaacaaagatttaaatgactatgtctttaatgtaacattttgtataaatgataaagaagtagagcgctgtgttcttcctacttcctataagcttcgtaagcatgattttttttggaagtatgacttgccatatggaaaatataaggtaaaaatgataatcgataatcctcgcccggattatgaaatatattcgtgggactacacgattttttagaaagaatgtttaataataaattaagatagagtatgaaaaagttttgttttagtttactgctagtgtttccaatattagttttcggacaattaagaaatgctgatgtttataagttacctgaaatggggaaagaaaatattcgtgaaaatattaatattccaggcttcgatggatatgaagtgttgaaatgtgactttcacattcatacggttttttctgatgggagagtatggccggacatgcgagtcaatgaggcgtggcaacaagggttggatgctatagctattacagaccatattgaatatcgtccttttaaagatatggttataggtgatttgaatgaaagttataaaatagctaaggctcatgctgattatttggggttcattgttatcaaaggtgcagaggttacacgagaaaaacccataggacatcttaatgctttattcataaatgatgctaataaacttgatcaagaagatcctgtggatgctttgcgtgaagctaaaaagcaaggggcattcattatgtggaatcatccgggatggcccgatgataagagtactttatattcaattcatgaacaacttttgaaagataaagttatagatggagttgaatgcttcaattttctagagtattatcccattgcatttgattatgctaataaatataatttggcttatatgggtaattctgatattcataatttagttactgaaacttatggtggagaaaaattagcacgtcccataacattggttttttcttctgaacgatctgaagaaggagtaaaggaagctttgtttgctagacgtacagctatattattcaatggcgtgttagcggggaaagaggatattcttagaagacttttcttagcatctgtacatctcaggatgatagaaaacaatagtggctatacggaactatgtaatacttccgatttgaattatatccttttgataaataatttccaatataatttgcctgccaacaaaactatacgtttgcagttgccgaaagaaggaaaaataatagttggaaattgctatacgggcaaggactccaaattggagattagtttacctttaaaataagagttgataggaaactgattcattatgaaatagtatgggaaaaaattgccccaataggtgacagtaataaatttgtttatcggagttgatcgttctctcgtaccaggagaaaacagtattgaatggtagttgtatgatgacttccagattcgatccccaatttgggactagaataaatcgcacacattcaaaatatcaggagaagttgttgaagaattacgtctgattttgaattatattgtaattggtgtgttgtgtcgtatgtactgggttaagaagtacttatgattacaacgttgtgggatattatgaatatacttgaaatatgactagtcctaaataaccccattaaagggtttattggactagtcataatgtgagtcccataatcaaagaggttctatggcatatgtatagtgatatactttgttctttaataagaactctttatgaactctaggtgaccaactgtcatctcctccaagccccatctgcttataatcaatatgtaaccaattcttttcaccacgaattaatgtatgcgcttttttactgcggttcaaatctttatcggagtaattttgaatattaaaattgaaaaatggttttcctgttatacgtattccgcttccgaaatcatcatatatctccaaccagcggttatccgttttatttccattttcttgaggcataatatgtggaaaagactgttcactgacaattccattataaataccaacataagctgattcttttctatcatcatagctttcgtgagggcctcttccaaaccaagtgagatttttccactcaacaggtaatgcacacttcattccgactcttgccaatgacagcacatctatatttatataaaagatggcatcaatgagaacttcaccttcatgtgagattgtataatttgctttttgcaggatattaccttctttgaattctaataggttattaacataaacttgcacatctccggtaggtaaaatcacgaaatccaattgcttggtttttattttataatcatccaatcctactttgcgccatgaacttgcataagaattattacgtccttcatcgttatcggtcggaacccgccagaaacatggtaatagaggagattccagcaaattgtttcctttataactgaactgtgatatcgctccggtgagtctgtcaaattgtatatgaaaacttttccctataactgttagtccattttttctttctacccgaagaggagaggttgtttgaacttctttctctatgaacggttcgggaagtatatctagagctaattgctctgaagcgatctcaatactaccgtcagaataattccgttgttcagtattataaaaactaaagtttacatggtattcatttccagcttttaagctttgcctgggtaagtccaattctatcaattgcttgctttggggagctatattcaaggcggtaatcgtatcatgatctataggaagaccattctctaataatgtccaacataaaataattccttttgtatcagtgaaatagttcgcatttgatatagaaacaagtccttcatttatatctatattttctacattgaaattttgaaaaactttcttcaattcatataactccggttgaacttcccgatcaggatttactaagccatcatttgaatttgcaccgtcactataatttattacttcccaatattctttgccatttttatctttcaaacgtagtccctgatctacccaatcccaagtaaaccctccatgcatacggggatatttatagaataaattccagaactttctgaaattgcctaaaccatttcccatagagtgagcatattcacatatcaacatagggcgtgactgatcttcattatactgcttgataatttcattaagaggattatacatatttgaaatgaaatcataccttgaaagtacttttgcataagcaggattttttgcctcataatgaaccggacgtttctctgggtcacatctttttatttcttcataagccttgtcaaagttctttccccaaccagattcattccccatagaccagaagatgatagaaggatgattcttatctctttttaccatgttcacattcctttcgacaatagcacttttccactcatctctttctcctacatagaatccttttgcccacaaaccatgactctctacattagcttcatccattacatatagtccatactcgtcacacaagtcataccaatccgggtgattggggtaatgggaagttctcaccgcattgatattaaataatttcatcaatttgatgtcacgttccatcgtttcacgggtaatatatcgcccggtataaggatcgaattcatgtctgttaactccttttatttttacaggttgtccattaagcaacagatgtccatcttttatttctacctttctaaatcctaccttttggtgaataacttgttgtacgctgccatgctttggggataattctatatccaagcgatataattcaggtgtttctgccgtccactttaaaggagaagaaactttctctgagaatgagatttcttgctcttcacccgaagctacactgaacaaaaactttcttgtccatattaatttgccggatgtttcttttaaggaaatacgcaaacaaccatctttgacaaattcgcttgtctcgttctttatagaaacgattgcatttaattctgcatccttatactccgtatccaagttagagaaaatggagaaatctctgatatggactttaggaagtgcaaataaaaagacatcacggtatataccacttaatctccaatagtccaaatcctctaagtaactgccgtcagaccaatttaggacttggacagtcaactgattctcacctttctgcaaatatttgctgatattaaactctgccggtaacattccatcttcatggtatcccactttttccccattcaaccaaacatacatggcggattgtactccggaaaagtgcaaaaagatttcttcatctttccagtcagtcggaacaacaaagtttcgacggtatagtcctattggattggaatctttgggaacataggggggattaggttcaaaggggtatttcacatttgtaaaaataggcggatcatattctccttgtagttgccaattaccaggaacattaatataattccatgaactatcatcgtaatctacgctataaaaagcagtaggggaggcttctataccggaaatatacttaaatttccattttccattcagagaatgtaccatggaagactctcctcgttctacctctgcaacagatcgataaggtatataagaggcatgagttggttctgcatttacactatttatttcaggattctcccattcagataatacttcctgagagtggacaagtgttacagtccaacatataataaccagggctaatatttttttcagcatatctattgggtgacattaaatgttttatacataaaaagctgttcttttttatcattaagggttgattgtacatctactttttctaaaataactccttttacgtccgatgttacaatagcaggtctgtaatcaaaggtgtgaacttttaatttcacattatccaaccggatgtcatctgcatgacgtatgaagattccccacgcaggaagctccttaaattgtgaaaactccggataggttgttctcatctcaggtattccttccagttctttcgcggtcactccgcatttggcatagaaaggattacctcctcctggagattctatatctatattcttgagaataattccttgaattctatcttcaggtaaaccgataatacttgcaggagagatgttgcgaggtagatgttctaccgggccttcgtatgaataacctgcatcaggcttagagcttgccagcttcacgttgaagttggaaagggtaacattcttcataagcggtcttcgtccggaattccagcggtctcctattcgtagatagaatgcatttcctacattcacggcacgtacactatcaacaagtatattttcgataatgcctccatccacagtggcgaatgtcacggcggaacggtaagtgttataaatcgtgagattcttgatgataaaatcacgaaaaccaccttttgatgctgttccgaattttaagccactggcacttgaacgtatgatgcaattatcaactactacattttggcagatttgcgatggctcatgcgatttgaaacagattccatcatcggcagcatcgaaaaaagaattgctgattctgacactatcacaatctacgatatctataccgtcattattccagtaagatttacaatcaacatttatattatctataatgacttgccgacactggtcgtaggcttgattccaacttgccggatcgtgcatccgtactccttcaactcttacatttcgacattctctaaaataaatattgtggggacggtttatttcatcaggcctatccatatgcaatgggtcatctatcaatcctctctgaatgtatgatatcagattgttggctactatgaatcccctaccgttaattgtaccttcacctgttattccgatattatcttgccgtacggcaaaaagtaaagctgttcgttgtatatactcatctttcttatagtctaaggcattatacgaacctaataagacagccccttgcgctaagtgtaaagtaacattggattttaaatatatggtgccggtcaaatagtttccggcatcaaaaatgagttttccccctcctgctgtatgaacataatcaattgcatattggatggtatgcgtgtttaaagttaccccatcaggttttgccccaaaatccattatagagtaatcttttccttggacaccagtccaatagaggaatagagtcaacaaagtatatagtaattttcttttcagcattgtatcaagatattattttttcatctttgcatataactcattcaaaatttcccttcgggtagaaattcccggttgaatttttatattcaatttagacaaacgcttccagttacttaaagtctgttcctctatcgcttcatctaattttgcttcccattcgggcaaaaagccccgaagtcccatgtattgtaccattaagaaatcttcgtcatctaatgaaatatctttataataaatcagagtagtgccttgtttaagcaagacatcttgcatcatagctatattgatattcctgacttttaccttttcttctattgcaactgaagatgctacaccggcagcttgtcccatagccatccagcatggttccattctaagtgtagagaaaccgatatgagagccggaaatgggaactggaaataataaattatctatctccttaggaacaatcactccataggggacagtgtaaggtgatgttggataacccagaaatccattcaggtgcaccataccgggttcccgtttatgggtggcatgtgaatcaaatccataatggctggctgtgatgcttgatgaatacacaggaggccttccactgccttttacaggcatcgcatcacttgctatgaaaaaatgaagtccttcgaaccgacgtccttcacgtacatatacttgtctgggaaaatgcccattatcagtatattcatcttttgcatacccccattcgcgagctgctttccgaaaatgaaccggtaattctttatcgttttgggcaaaccaaagcagtccttctgtatattctctcagtcttgtagcaaacttgtcacgccatgcccaaccggctgtaggccatgcccagttctcttcaggcagatctgatgagacaaaagcagcatgctggttgttagcatctgttttttcatttggaatttcaaccaggtttactactttaccaagcccccatttgtcaccaggaatcatagtcggattgcccttagctatatgtttcttattagcttctaacatttccaaagtaacattcaccatttctgcttgggtatgacgtcccgtccagacatcatcgataatagatgcatattcattacggtcataatttttgggctttgttataggtactttattatccggatttttggtcaggcacaatcggtagttgtatgcctggacagcattatctccaataaaagtggaagcatccatttccgggccatgccagtatttgtaaacacttcctgctccgggttctccaaactcatttttaccttcgcgccctactctaaaggggacaccggctgctgctgccagatctccctcgtaagtggcatcaatgaaaatcttgccttgatactcttcttgagtattattatcacgattcagaacgttgattttcacaattttatcatctactttttttatattatgaggactggaatcgaattgccgcattgtcaaaactgtgattagatctttatattctcctaaccagtctgtgaatacttgttctgccactgaaggttcgaaacggaaaccatcatcacatctctgatattgtatagaagttacaccatatttttttttgtaatagtctttgatgcggcaggtgaactctctgaataatcctgttgttgctgcccgggttacaatatccgttgctcccagtccattggagggcagacctcctatatgctgtgttcgttctaaaataacagaagttttcccaagtttagcagctgcgagtgctgtggtcaatccgccgggtgttcctcccactataacaatatcatatgtttgctgtgcaaaaatattgatactccaaaataatagtaaagttgttagtaattgtttcattgtaatttctatttagtgatattagtagattgatatatatgtatctgttgcttctttttccccggttcctggattttcattttactcatgctgacatgatgtgcatcgtccagtattatagctggtctataatctttttttcgggcaataaatgtaacattctctaaaacaattcgctcaacatgtcgaagatagaggccccacgctggaagttccttgaaacatgaaaattcaggatatgaatcagccaattcaggaactctatctaattcttccggagtcacaccaacttttgctatttccggttttcctgcacccggatgattgattactacatttttcagtgtcacgtgtgttatgggatgcccttttagcccaatgatacttgccggagatatatttctaggcatatgttctatggggccttcatattcataacctgcatccggttttccttcgggaatttctacatacaaattagaaataaggatagagtccattgttccgattttattcgaatgcgtacggttgcctattcgaagaaatatagcatttcctgtattataggcttgcagactatccactactatgtttcgggcgtatcctccatcgggagtagctattgttaatgccgaacgataagtatcataaatcttattgtttatgatccggatattttcatatcctccaactgtcatagtacctaattttatcccgttggcactcgaacgcatagtacaattacgaattactacattccggcatgcagtttcagttttatgggatttcaggcaaactgcatcatccgaagagtcaaagaaagaattctctatcaaaacattctggcaatcgacgatatcaataccatcattattccaatatgctttattgtcgactgtaatacccctgacccatagcgaatcgcattcttcatattcctgtgtccaatcacaggtgttttttatagtaatcccttctatagttatgcctcggcattgcttaaaatgaattcctcgcggtctacgcggtctgtcgttttccaaagggtctttgataaaacctttatgtacttggtcgattatgttgtatgatacttgacgcccttgtgcatcaattattccttttccataaatggctatatttttttggtttatagctcgaatcatactatagcaaggaccttccatattatagtcataagggtttagggaacctaccagcactgctccttcctttaattgtatcgctacgttcgatttgagttcaatgctacctgttaaataacggccgacattaaaaactaaaacacctcccccttctttgtgaatataattaataccagtctggatagagttggtgttcaatgttactccatcagactttatgccaaaaaaagatgcattatactctttactccacactaacgaaaaagacagggagaaaaggattgataatatgtatactttcataattaattaaatgattttgacggattatccgtcatgataaattctaaaatacctccgtctgtgatttcatgatgaaagattctaaaccgttttaattcttttccattcaaaaagactgcctttacatatttattttcttctgataagccttcggcacgaatgatgaaattctttccaccttccagacgtaatatcatctccttcagttgaggagcaccaataatatactctttactgataggatctacaggataaaatcccatagctgagaacaaataccatgcggacatctgcccacaatcgtcatttccgcacaaaccgtcggaaacgggcagataaaagtgatcaaagatttctcggataagtttttgggttttccagaattcccctgcatagttgtataggtaagctacatgatgactaggttcattcccatgggcatattgtcctatgagtccggtcacatcagatacaaaacctgtatttacagtattgttctcaagccagaagagtgaatcgagttttgctgtaaatgctttatttcctcccatcatctcaattaaagaatctacatcgtgttgcacatgccatacatattgccatgcatttccttcagtataatcccctccggaagttccggcatgtgatagtctgaaaggatcaaaaggttctctccatttgccctgtgagtccttcccgcgcattagtttggttaccggatcaaacagggatgtatatgcacgggctcttttggaaaagaaattataatcttctttctttcctaatgcttttgccatttgtgccacacaatagtcatcatagcaactctctaaagttctggaaactgattcttcaggaataagatcgaaaggatagtatccatattgattgtaggtttcccaatcagacttcgggtgagattctaatgatgattttctgattgcttcataagctctctcaggatcaaaacctttatatcctttcagatatgcatctacaataacggggatggcatggttaccgatcatacaatgattttctttaccccataaagcccatatgggtaaataaccctgtgtatcacagtgagataacattgaattgacaaatccgttaactttctccggtactaaaagagtatataatggatgagctgcacgataagtatcccacaaggatagggtagaatagtattctcctatgggagagtagaggatgctgtcattaggacctctgtatcttccatccacatcagttatattattaggttggatacataaatggtaaatggaagtgtagaagtttactttttgttcttctgtgcctaatacgtctatccgtgacaacagattgttccaggcttcggcagattgagcctttactttttcaaagttccaatctggattttctttttctaatgcttcctgtgcaccttctatgctgacagtagacagaccgacttttacttgaacattttctcctggttttaaatcaaatgaaagaagaaggcgtttggctttttctccttcttgaggttgaagttcttcaatagctatatagggtttgtcgaatttgataacatagaagaactctctttctacccacattttcaccttgttctttccgacgatactatattggtctaacagctgcatttctgcatctattacatgagttcgcagctgctcattcttacttacgattccactttgaaggtctaccagaatatgtgccggttctgcttttctgaaagtataacgatgcatggccgtgcgttgtgtcgcagtcaattctacctccactccaaaatcagataaaactactgaatagtatcctggatgagctttttgatgttctttctcatatctacttttatatttttcattttgtatatcaccacaaaatggtagaatcaatatatctcctaagtcgggacatcccgtaccgttcaaatgattttgggaaaatcccatgatagagtcatcctcaatattaaagccggagcaatatctccacgaaccatttccactttccggacttacttgtatcattccaaatggtacgcaagctcctggaaatgtgtggccattatctgcattaccaataaagggatttacataacagcaataatcctcttttacattactacatcttatgctcagaaagcatactccaattatcgcaaatacccaccaaaaacattcctttcttttcatttaatttattttttaaatagtgactttataaaatcagtattatgtccccaatgtttattaggaagcttgcctaactctagggtcaaatctccgccttgcatgatttcgttatagcttaaccaacttctatttaaaactttaccgtttaaaattgctttttgaatatagatacactctgcatcagggcgatttacatggattttaaattcttgttgagacgttgggtgtaatgtaatcgtatcaaagaccggagcatttatccaataatagggtatacccgggcagacaggaaataatcctatggaagagagcacaaaccaagaggacatggttccggcatcatcatccatttctttcaagtacccttgtggagtggtattgaagattttgccgatataaggtttttcccacttttcatgtgtcccataataattagtggtcggttcaagtaatatttggcggactaacttttgcgttttccatggcgctccaaggtaataatataaaaacggaacatgtatatcaggttggtttcccatattgaataaattgttctcaaagaaataatctaattcactcaaaacctttttcttgctacccaaagtcgcaataacccagtcgaagtcatgaggtacgaaccaacgatattgccatatagtaccttcgtacaaaccgtcaccatgcattatatctgaagttggaccaatgtccttaaatttttgtaaccatattggtctgtattcttttgagcgtaaagagaactctttttttaactctttattacccattttccctgcgagttcagaaactccccagaaatcatatcctcgttccaatgctttgtccggtgagtcattggagatatcttctgcctcttttagcatcagtggaagtagctcgtcgagagaaccatcaaacattcctttttgtaatgcatctaaaatcgtgataatagagtgttcagtacgtgttgtcagaaatggttctgtctttgttgcagaacgaggcttgccttgtttgtataattccgcaagtgaggagatcatgtgcttgtattccgtgggacaaacaatagataacagaggatattttgttcggtaggtatcccaaatagaccaaccatgataatagggtaactgctggcttttatatacttttccgtcacttcccttataactaccggaataatcattgattgtgaaaggggtctggcaggcatgatagagccgcgtataaaatgatgtttttaaatcttcatcagaagtttctacttgtatttgtcccaatagattttcccaggcaatacgtgcattggtgcgtatctgttcgaaagactgattcgagcactcttttttgagattcgcctcagcttcttctgcactgacagaggataatcctattttcagtataatttgttcattaggctctgtttgaaacttccatagtaattctgaatcgttatcttctggtttataagtagatttatctttttcaatataataataaaatttgtaactgcctaaatcacaagtgcaagcagaacgcacaaatccttttactgcattgtctcctataatgctatgttcttcggcaatatgcttaccataagaatgtttgaaatttatttttatgccggcggtctctgtagcaggataggtaaaacgatagatagctgcagtcctacctgtggttatttcaactttaagttgattatctaaagttacgctataatatccgggaattgcagtttctgacgccttatccatttttaaagtcttgcatgctgttccgacaaaaggtgttattagcaggtttcctccgacgcctatacagcctactccagacattctggtctgtgagaatcctttcagctgttgtgattgataatcataacctccgtttccgcgaggtatagtttctggccccggtttaatcatcccgaacggaatggttgcggatggatcggtttgtccatgatcatcggaagtaccaatgaaaggatttacaaaagaggtttgctgagcttgaaccatagaaagggtcaagcataatacaaatattatactaaagtatctcatattaaatgttttataaatgaaagagggtttcaaaagaaacgcgaactcttaaaaccctcattttagaaaagtagaattaatcttttaatccaggaactattaagagttcattgtctggtatcggaaaataatagaattcttcgcttaatgttaaattgggatttaaagaaagctcggctgcatctctataattcttttgcaaatgaagaatctcatgtctttgcatagtaaagaaacgccccatacagctatgttccatacctgcggtttcccaccgtctctcatccagaacagctttttggaaatattctttagtgacatcctttgaaataagtggtactccagctctttcttgtactctccacatgcagtcaaatgctaaatcatcaatactcttagttccataagcaactgcttctgcgtacaatagtaagatatcagcatatctaaatatcattctggttttcccgcttgcgcttgaaattcctttggtttcataatacccgtcatcataattaaatacccagtctgaactttctatatttttcttccaataaggatgtttctgattggttgcgggatcatcccaatttagtaatggatagcgtcccgtttctgggttacgctcctgcccggtcatcgtcaccttagtcaggaaccaagcatccttgcgtattccttccggcatacttttaaagaattccaattcaaccatatagtcacaccatccgccggactcctctggtaattcgcttttgggtccagagaaatagtttttcgttttgttatggaactctccaaatactatttccttggagtaattagcttcaggttctttagtcaatgtacgtatgtccggttctaatatataaccatacgtatcttcgttttcaatgatttctttatactttgcagccgccttatcataatattccgctccttttttcaaaggccagcctgcttccgtcatgtaaacagaggctagtaaagcttttgcagcgcctttgttaggagctacattaattccgttctgaaaatagggggctatcttatgattatccggtagcattctttctgctgttaatgcatccgattctattaattcatatattttattcacctctgcttttggggtattgtaatttatctcattctctgtgactagaggtatacgtccccaaatgcgtacaagcataaaatagtttaatgctcttaaaaagtaggcttgtcccagtctcggctccaggaaagatttctcaaccggtgttctttctgcattattaattacataattgcaagctttgattgtctgataatagagttgatacatttcaagaatatctgtatttcccgagttgaaattaaaccggtcatattccgaaaaacgtgacttattaccaccactatgggctgttacatcatctgcacaccacacataaatggctctgaagacgcgagcattagtctggtaatatttgttgtacatcccagttatagccatatccaagtcttccggacttgagaagaaagaggaaggggtaagtttaccacgagggtcttcttccaggaaattgtcacaagaacataaagcaaataataatatgctataaatcaatatttttttcattttgcatctattttattggttaaactaaaatgagaatccaagccccaaagtaaatgttcttggtaatgggtatgaaccgccatcaacgcctgcgttaatgtcactattgccgccattgcttgtgatatccatagttccttccggatcatatcctgtgtaagacgtgatcgtaaacaggttttgagcactcagggagattctgatatctgcaaattttgtttttgctctggggattgtatatgcaatacttatattctttaatcttagataatcagctttttccaaatattgagcagtttcaaatctggaattgattgtcgaactgaacgggtttggtattttagtattttgattttcgggtgtccatctgttataataaccttctttagaggtgataaaacgtgaatcactgacacattcattggtgagatagcgtgataaattcaaacggtcagctcccagtgaaccttgaaagaataaattgaaatctaaattcttccatttgatggtattattccatcctaatattacatcaggaaatgcttgtccgataatatctgcgtcatcagattccaatttgtaattcacatttttctccttaaatttgttatctcctggcttttgcccccatttggctgcctcttcggcctcgtcagtacgccataaaccttcccaaatatatccatagatactacctaatggttttcccacttgcaatacggccgtattgagagaagcttggtctaattttgttcccggatgtaatcttgtttcatctcctaagctgacaacttcattttttgagtaggatacattaaatgtgctttcccatattaaatttttgttttgaataggaattccggttaaagagaattcaatacctctgtttttcacttcaccaagatttacccaagtggttcctccgccatcatagtatggtataggtttctttagtaacaacccggttgtattcttttggtatagatcgatatttgccagaattctattatttgcaaatgccatatctaagcctaaatcatattgagtagttttttcccatgtcagattaggagtggcaggtccggaaactccgtatccgggataatcacttgtacctccccaaccatacttcgactcagctagaagccctaaggttgaataggctccaatggcttggttacctgtattgccccaactcattcttaactttaagacatcaaaaatattgagattctttataaaagattcttctgacattctccaggcaacggcaactgatggaaaatttccccatttattcttaccttggaatttggaagaaccatctcgtctaatagtcgcagtaagtaagtatctatctttgaattgatacattgcacgtcccataagtgaaactaacgaagagcgtgaaaatgaattgctaaacagattcatatctcccaaactcaaattccaaaaatcaacagattctgttctcaggttagctacttcattagacaatcctgtagttgttgattgtgataattctatggctcccataagattcaacttatgttctttccattctcttgcataatttatttgatttacattataccagtcaaaactatcgttttgattattatttgcagaattgttttgagctcgtaaatcctttgcattcgacttcatccaacgattcttgtaatctttataatgggcagcaccttggaaattcaaactcaacccttttactggtaattgtaccataaactgtaaatttgctgctagataattagtgtaactttcatccaaatcttgagttaatcggccataagggttatcttttgttgaattgatattatctctcaaccagtttccttcttcatcttttaatttcaaggtaggactataggtaattgcatctgctataatagttccgactcctccacggggaccatttttatttgtttttcgtcttactgcatttacgtctaagttcattttcaaccaattagttacatcagcagttatattagaccgtaaactgaatttctgacttttcgattccttcaaaatgccttctatgtccatcatattcatagataccaaatattgaagtttcggaatacctcctgaaatagagagtttataattttgagtatgagctgttctgaacattagatcttgccagtctgtacccccattttttttccactgagtgatttcatccggagaaaagaaatcttgattagcccccttttcccgacgatactcattatagaattctgcatattcacttgcacttaatagatctagctttttggcaatggtagatattgattgttctgtttccaagtgaatatttgtcttaccttcagcccctcttttggtagtgaccagtattactccgtttgcaccgcgagaaccataaatagcagttgccgaagcgtctttcaggacctctatcgattgtatgtcattaggagccagattgttaaataaatcggtattaggtaccccatctacaatataaagtggtgaatttccaccataaatagaatttgcaccacgtatacgaatttgggtactctgctccggtgcaccggagtttgttataacaacgacgccgggaattcttccgcttaaagcttgatccaatcgagtcattggctggtcctttatatttttctgtgaaatggaagaaactgaacctgtcaagtctgacttcttcacagttccatagccaattacaaccacttcatcaagcatttccatatcttcttgtaaaacaattgtgatatgtttgtttgcaactttggtagtttgagttttgtagccaatgaatgaaacctgaagggtatttcctagtgaagcttggatggtaaacttgccatctatatctgtaattgtacctattgatttgcctataacactgacatttgcacctataatcggctctccttttacatcagtcactattcctgttattttttcttgttgtatctgatctaataagctggtatttttcgataaaataatataatcgttttcgaatttatagccaatacctactttcgccaatgtctctttcaaatatgaagataccttagcagatttattttgtataatgacctgccggttggtatctatttcgcgattgctatatacaactaagtaatctgtctgcttttctatctcttctattaactgacctacagatatagaattagaaggaaaggttatgactgcgttttgtgcttctgtatttactgccagtaattggagggcacaagcaaatagcaagaataaagagattttcataattctaaaataatctttaaagctttgattttggacaataaagagtgataacaaaggatttattttcatatctttgtatttagagtgaatactaaaattttttccggtgtttactttctactggcgacaggtggtggtgcacttgtcgccttcttgattataattctatgttttcatgtggataatgtattaagggttaaacaattgtattactttaaggtgatcacgttattttctttgtctatttcaattttgaaatgatgtatcttttgaatggtatgtagtattttctctattccatctctttgacggaatttacatgtataatttatatctttcaatttgggatttgcaatattgattgtgacatcataatatagctccaatttgttaacaatgtcagccaagcgttcattattaaagctgtagatgccatttctccataataacatatcaggattttttatattgctgactgtcaatttcccgtcttgtgcaatgctttcttcattgggccttaatataacttgcttactcttgtagaacacttgaacggcaccttcaatcagacttgtcctgatttgtttgttatccggatagctatatacattgaattttgttcctaatacttgtattttcgcatcttgagccgctacgatgaaaggtctgtttttgtctttagctacttcaaaaaaggcttcgcctataatggaaacagttctttcctttccataaaaatgcgaggggtaggtcaaggtcgattgagcatttaaccagaccacggtaccatcttgcaaagatatacaagcacgttgcccggctggtacatataaagtattggtttgcacttggaagtcatcttgtagcttatgtgacatctgccaaatagatagctgatatgtgcttatcattaaaatgagtattgcagctgcatatttcattgttttcaccagccaaatacgcatttttttgctttttatccgtttttggaaatgctgatagcttgtttctccctctttcttatcttctgtgtgtgaggataagttcagtaatgcctggatattctgatactcggcaaactgcttttttagctcctcatttttctctatttcacgaagaagtagcaacctctcattgggtgctaggctgttttggaaatattttaatatacgttcatccatctttttatgacttaattcatagtatagacgaatgtagaaaaagaatccgctaaaagaaaatcactttttttgttcaggttacaaataatacagaaagataaaaagaggaaaatagtcttttagttcgtttcgtagctttttataggcaattcccatctgagtttcaaccgtattaattgaaatgttcatctcttctgctatttccttttgctttttgccctctatcttacttttcaaaaatatctctctacatctttcaggcagcgaatctattactttagagagcaattgttctacatcatctttttcaaaaatcccttcatctaattctcctaaagaataatatttcatttgtaaggtcaatctatattcttcctgcattttattttctacttctttctgcactattttgtgccgtagaaagtcaatgcaacggttttttatagaagtgaataaataggccagaatattgataggtagtggcaatagttctttcttttcccaaaaatcgaggaaaacatcttgtactatattctctgcatcttcatccgataagacatattctcgggcaaaacgtttcattttcgagaaataagaaagataaatctgttcaaaatcaatatgttgtttctctagtatcacctttcattttttagattatgggagcaaatataataagtttagaatgataagcaactcataaaatgagttttttctcttattatactttttaggagtaaattctaaattgcttggtttgggggcaacaataggttaacaattgcctaacttgagactaaaactactaaaacaacggacttataactggaggggtattacaaagaaaaaaggctgtattcccttaggaatcagcctttttcttcgtggaccagcctgggcttgaaccagggacctccagattatgaggcttcgttattagttttctcattaagacgattatcaacacattaactatctctttgcaagtttaaaggtcaacaatgggtcaacattgagcttgctttgcaaagtaagcaataatttccctatttaagaagtaaattacactttttcgtgattccaaatgctgattttaatttacatacatgctttttgcctcgtttttgaaatctggttcgtagcattatgttctcaattctcttcttagtacctttgtaagtagattaatcaatgaccaaccaattaacgttaaccagaatgagagtgacaaagaaggacaacgctgtgtattacatgccacaagaagttagggagattgtaacaacagatgtgacttacatgcctgtaacaagagaattgctagagaagtatttccagaaggctactaaagaagataagcggaagttagtgaagaaaaaaaagacacaagtagaacgacattgaagctaattcagtgtcgttctacctttttagtacattttacttccaagagcaataacatgcccattggtctccgtcttcgtattccataatgactttggttacatagccttcctcgtccgttgtgtagatgtaatcataatggtcatagcctcgttcagtcttgactaaatttgtgaggcatttaccatagaatccttgggcaaaaagtgtgttgttaattaaatctggatcaaacacattggttgcttcacctaggaactggtaaggaagtgaagtgtaagacaattctgtagcatcatcatcaatcatagaagtgatgttgccattctgccagatgaattttactagtttttcgctgttagtattgtaagagttgctgtattcaatggaaacaagttgttttgaactgtcataattgtatttgacattaacgattgcttctccttcagggttatactcaaccttgctagctatgatgccatcctttaattcatagttggttatccatttctcatcagcactactggaagagcttatgtcataagccgttgctatgattctatttgcttcataagtaaattctgtaatttcttggcgaagctcgtattcatcccacacttccttcgtaattcttccttggttatcatactcaaatgaggatgcatccccagattcgtatgtcgcagagatgaatttcttactagtaccgttattgccttctccttcatcgtcatcgtcactacatgcagtaaagttaacactcataattacggctacaatcgccattccaattaatcttaaagttttcattgtaataaatctgtttgtgcttctacgttccttgcagaaagcattagtaataggttaaatgagtgtgaggaacacagcaaaggctgcacactccttaaaagaactgtcaattgattggttaattcaaactctctgttttttacatgcttttttaatgtcaaccagttcccaatggttgactgttacatacagaagaagcgtgggaactactgattattaccgtcatgaggctctggactgcccatctccaagtaataaacaatagcccacgcctaatgtaattatgcagccttcccatgcacatgagaagttgataacaacaaactaagcgtgagcgttcttgcctattatccttggagaatgaaattgtccagatttcatgacaggataatgctttaaacgctcttcgttttcttaataagtccttccagtcctaacgcattaggcttctgaaattgctacaaagttacgaatttacgtttgattagcaagaactattgtttattaatcgttgaggctgacttctactcaacattttaaggttaggaggaaatttgcaaagtccccataaaggtagaattttagaaatttcctcccaaccaattaataagactaggcattgacaaagatgttcttcacccgttgaactgtggagatgccaattccttgtaacttggctacatttctaacagagtagcccttctttaacagttgaattacttctttgtactcttcccgtttcttttcttccgttttgatactgcctgtcttccgtcctaatttcccacctttggcaatgtaattactcctaccgctgttcaaacgatacacaatgttgcttctctcaatgttagacatttccgctagtatggtaatcagaatggagacgataggatttactttaccatctggttgaagtgtgtaaagtcccaagttctgaatgtaaacggaaactttggcttcatgtagtacttctaatgagcgaagcacttgtaatgtacttctgcccagtctggaaagttcagatagtagcaagtaatgaactgaattagtagtacagtattccaaacagtccgtaagaacttggcgttcctcattcttctttgcaccgcttatgtgttcttcaaatgtggcaactacttcaatgtcccgtaagttggcatactttcttaaatcctcaatttgtctgcttgtgtcctgtctgtcactaacagatgaaacacgagcataaatcactgcttttgttctcatttaattctttgattaagttaataacataagggaatgtattcaaaccatctttccagattaatttgaacacgctcccaatttgaacacatggtcagctacccttgataagagcgtaggcaattaagagagcatagccaaccatgattaaaggaaatgatagcatagccacaagcatagtggcgacaaataacaatacatagaataacttttgtaccatagtttcaagaattaagcatttgacaattctgtgtattctcaaataccactaacttaaaaaccattggtatctctcatctccatgtaaagcggctgcaattccagtaaccaattctgtagcattgtaagccctgtccaagaaagaatctatgtaacttgacttgttactaccagtaagtaaattgtagaacttccacattgataagtcattccccaagctactaaaattctcatcttgaatgtaagacttcgccacattgttaatctgactgtcagttagtaacattcttggtatggctttctgtaggctctgtggtaatgactgataaagtctcattctcccaagtaattggcaaaactggtgttccgttaagtaagagttgccaagtgtttgcatcaaatgtatgtgcttggctggatcataacggttgaacaattccaagatggcacggtacaactcattcgtattggtaacttccaaacatgaaagatacccatcagttgatacgcacaagttcgtacagaccttacaggtaaaacctatgaatactttaaatcgttctgctgtcttcttactgtataagttcgtatgattgtacgcacgaactccgccaatagtaagagtcaacctgttaccgtttactgtctcgtaaatcgtaggaacttgaatgacaaaagcgcatctttcgtagtagatagtcttgtcactttccagtaattgattggcaggcttatgaattgcttcgggtattctgcccttaatcacatgagaaacacgaatgtcaggcaattcaatttgttcaccttgaaagaatgtccttgcagcgtcttgcactgtttcaatgaaagccacatgagataaggtagcctcattatccttggcgaatacaggaatgatacaatcatttcttaaatgctccaaacttgcttcaatcgtgttggcttcaatgaataacggtctcttttcctttgtgggctgttcttccattactaaagtcgcgtcttctgcatactcaccaaaatttaaacttctcctttgtgccattactggcgtaatctgtaatgtttccataatctgtaattcattaagttagtattaaaaagctcttcgtctgagtgcgaaacacaccacagtcagaacaagtaaaccaatgaaaaactgtggcattaggactacaggaaggattaagataactcctagcgttaatacaatctttaatttctccatacgcattgtttaagattagtaatcagttgaatgtagacaaaatgaacgctttgcatgaaagtactttccactctcattacgaacgtgtgtttttgtagtcagtctttaattatctgcacttggcagaactgacaaattaaaaatttcattcgtttggggttgggaagctgtttcatgtttagctttcatttttctattgattggt

SEQ ID NO: 6337 - DNA, 36461 bp, Unknown
  gut microbiota DNA sequence
tattttcttattttgaaaactggagcaattttattaatctgtttatcaggcatatttataagtaaccctttgtccgtacgggtgaatgaaactttgccataacctaataattccactctactaatcttaccagggaataatttactttcatcagacaatgatttgatgagtatttgcttttctgtcggccaagccagaaccgtagcatataagtcctttttagtctgtgtgaagcggatttcttgtgccgtagctctgctatatgatccttcgttgaacccttgtgcattaattttgatatctgcttcagctatcggaccttcaccgaatatttcccaaggacgagtatcaaagatggcctctctattaatattcatccaatctccgaattcattcaatatcctttcttccttctcatcaaaggtaccatcagcccgtagtggaacactgagcagcagattgccatttttacttacgatgtcaactaatagttttacaacatctgccgcggatttataccagttattctcataaatagatgtattgtaatgccatcctccaatgcatgaacaggattgccatggttgctccataatctcattgggtgccccgcgctctacatcccagactatagctttgcgttggttttcatccaatatcttactcagcatgacagcctccagttttcctttatgagtggccatattatgattgtagaagtgagctgcgatcttcaatcctgcatcgctgatagggtggaatggaactactgttacatcaaaatagatgagatcaggattgtaacgattgatagcatctaccgtgcggttatagaagttcgtgcaatattcttgtgtaggtaggcatgctccatttccccaagcccattggctatgtatcataccgtctacccaacttcctttactcatcggatgattttgcgcatataaatcctgcgggtcgtatccttcccaccacttacctttaccgtcagcttttgtcagtgtaccatcgtaaggaacaccagctttgggaccgtttctatcataacgttgagagggctcataccaagtccaggcatggtcggcatggaaactgataccaaatggaagttcgtacttacgtgcagcttgttcccattctgccagaatatcacgttttggtcccatattttttgaattccaggcttgatatttgctgtcccaaaggtcgaaattatcgtgatggttgcctaaagcgaagaaatattgtgcacctatctttttatagaattcaaccaatttatccgggttccatttttcagctttaaataaaggaataatatctttgaaacccacttcagaaggatgtccatagtgctctacatgatgtttatattccgctgatccttccagatacatggaacgtgccatccagtcgcctgaaccttctacacactgtggcccccaatgtgcccatattccgaactttgcatttctaaaccattcgggaacttgataattttccagtgaactccatgtgggttggaatttacctttcatcatgggttcgtttttttccgatactggaacttgatagttctgagcagataatgtccctatcgaaagagctaaagatgctaataaaatttttgttctcataggtattaatattgtttctattgtacattgcaaagatatggattaattagtagctttgataggattaaaaagtgcttgtattggaatatatcgatagatttattagaaaaagccttttaagataggatgagaacgatttttatatggagaatatcgataactattttgaaggcttaataaaatcacttacctttatcaagttactaaatactatatactatggctttattggttgataaattgcaccctttagtgctgaatgtcggtttggctgtgcacaatgcagattggaattggaaaaacgtaaatagcccgtttacgcgtttgtactatataacagaagggacggctcaaatacaactatcgggaggtatacaaattctgaaaccaaattatctgtatttcatcccagcttttactatacacagttatatatgtaattcttatttctgccattactatctgcacatttatgaggagcatcaatcagatacgaacttattggatgaatgggaatttccggtagagatacctgccggcgatttggatctggcgttgtttcaacgcttgtgtgcgataaatcctcacatgagtttgcctaaatcggacccctcgacttatgataataactcgacgctgatggaaaatcttctgaagaacaagcagcgtgcattatgtgacaaggttgaatcacgtggtattgtataccagttactggcacatttcttaaagcgtgcgcaagttaaagtggagacaaaggacgatcggatagagaaagctattctttatatacgcaaacatatttatgaggccatagatctgacaactttgtctgagaactcatgtctgtcaaaagatcattttatccgtttattcaaaaaagaaactggtgtgaccccttcaaaatatatcaatcagaagaaaatagaaaaagcacaactcattttggtaactgatgagatgtccgttaagaatgtagcttttgccctctcttttgatgactattcttattttaaccgactatttaagaagacaaccggactgacaccgcaggaataccgtaattcttatcactgataatcggagatttagaacagtattcttatttgaaccatacccggtccgtgtctggcccgtacctggtccgtatctggtccatgcgtatagatacggaggaaatacgggccggatacggttcaggtcttgagagagaagaaatacagaacattcttatcgctcatttttacggaaatcgtactccgattattctcgtaccgagaacttatagatgcattgactatgatacttttctcccggtctcaataccgccgatgcccattccggtttatttggtgtatcaggatacttctgtgtttccaagcagacagatgcacggaagttataaacgattcccttcttgcccgtcaaagttccatccaggaagttgccgcaatatacctgtataccgggttcattggtataaacatccagaacgatgccggtagccggtgattcaagggtggcacacaccttgtttacatttccttgagtattcaaaacccagttatgatcgattccgttgccattcttcaactgttcaaagtcctggttgatattggcaccgatagcggtgggctttctgaaatccatgggagtcccttctactgttactatttcgccggttgtcatgaaagtactgtctaccggagtataactattggcattcagtgtcagcaggtaagcggagttatccgtagacggatcaccatccaggttgaagtaagaatggttggtcatgttgacgatggtaggtttatccgtttctgcttcatattgtatatcgatggcattgtcatctgtcagtttcatgataacggtgcattgcagattgccggggaatccttcttctccgtcctttgccagataagtcagttgcaattcctggtcgctcttctgtacccctttgtacacacgatactggaaacctttcggaccgccgtgcaagcaatggccgtagttattttgcggcaattgatattccacaccatccagtgtgaagcgtccctggttaatacgattggcatatcgtccgatacttgctccgaaatcagacggatatttgatgtagtcctgtatggaatcaaagcccagtaccacatccttcatgtttccatccttgtcgggaaccatgaccgatacgatgcggcctccgaaattagtgacacacacttccatcttgttcttgttcttcagaacgaacaagtccgttttctcaccattgacttctgtctggaaatcgcttcgcttcaatccggattcggtcagttcttcttttgtagttgcggtacatccagccatcagaactgtgcataccaaaagaattagtttattcatatagttttaattaaagtgactgtggcattgtgataagtagttgcattatgcgtaacttttacttattacaaacgtagtgaagattgttttgaaatcgtagtagtatagcaccaaaaaataaaactatttgttcattcttgatatctatggtagtggtaaggggtgttttcggtagtttttaacgctttctgtagtaatggtgtgtttatattatacttgtaggggcaatgttacccctacaagtatattgcaattgtttgttacttattctttacttttccgggaatatgattctataatttccgctcagatgcatgaaagcgaagaggcggagcaatccgtcatagtaagcatcgaaatatccgtcttcatacggcttatgttttgcgttccataacttatctacaaactcgcggcttttctcgtgggtacacatcagtgaggcggcggcagaggtggcaaccagacctaaagaatgtcttaatgccttatgctctccggcccggagggtgtcttttacttgcgtgccgtctacgttatactgatctacgaaggtatcaataccctggctgtaaaggaagttctggattttattgccgtattcctgttgccactctttgtcggcacatgcccaggagtaatctaaggcgatgttcataggtacgcgccaggagtcaaagcggaaagcatcgccgatgatgcggttattgcccagcaaactgccgtcatagttgttataatcggggtttagtccggttacggggtggatacttttatgcagatattcgcggctgcgttcggcgcattcacgccaaaagtcagctctgccgtcattggcccagcgtgcccatacttcgtaaaaagcgggtacatggtaagacgggtcggtaaaacgtccgccatgtatgtccggaacgaaagtgatgagcttatgctccacattgatgaaaggcattacacggtttgtgccgtctttctccatggaacagttcaggatattctgggcttcggcaaggtagttgatgccggtgtcatttccccaacggttggaagcgaagatgagggcggttacatagtaaagctctccgtcggaggcggggccttgggagttacgggtaccgtccgttgcacaactccaggcaaagtaacctttcagtggaccatcctggtgctgcatgtactttgtgccccatcgccagagacggtcgaagatatcctgacggtcgaactggacggcaatcattaatccgtaggacataccttcggtgcggacgtcatgatttttgacgtcgctgatatatgccatagaatcgcctacttcgaaatatactttgtcagggccgtagaacacaccgtcgaagacggatttgagtttggcgtcaatgtctgcctgtttataacccatctcggcaaagagattccggtatttctgtgtctcaaaggcacctttatcccagggctttgtcgggtctgcctgactgcacgatgctccggcgatgagacagaggaggagatagaataaattcttcataaaggaatgtttttagtgaatttaaaggagttaagcgagttatttaatagtgacaggaattgatttcagttgtttcagttccgatgtaccgccatacagaatttcataatcaccttctatcggacgcatagtgttggtgcttgtatcaaaccattcaaaattttctttgctcaaaggtatggtgacattatttgttgcccctttagctatcgctacacgtttaaaggcacggagtgcatgtgaaggtccttctttatcgcccggatggcgcagatatacctgtaccacttcttcaccatcgtatttacccgtgttgctaacaggaatagtcaaagtaacttgttccccatctttgatttcagatgtattcaatgaggcgtttccatattggaaagtcgtgtaactcaacccatgaccaaaggggaagagcgggttttccgtcatatagcggtaagtacgtcctttcatggagtagtcctcgaagtccggcaattgcttggtgctcttatagaaagtcaccggaagacgtcctgccggattataatctccgaatagaacgtttgcaatggctgtaccacctgcctgaccgggataccatgcttgcaggatagcatcgcatgttttcgattcgggagtcagggcgatagcggaaccggagaagttgacgaatacgatcttctttccggctttcttcaattcggcaagcagacggctttggatagacggaagttcgatggtttcgcggtcacctcccttgaagccgggaatgttgacatgcatttcctcaccttccactgccggggatatacctccggcaaagatgataacatctgcctcttttactttgtctacggtttgtttcaggtcaacgggaacttcgcgtcccatgtcaaaatcgagtgcggcatcacggttgcggaaagcaaaatcaatcttgatacgatattcttttccggcttctgcctggagggtgtagactttggacttgtttttgaaattcatgcctgcggcaacttccttgccgtcaattgagagtttggttatcccttgagtctggaaacggaaggcgatatcttcactcttggcgggacggaatacggattcgtaactggcggagaaatcttgcaggttgatgccggcagcaaaggtcgtggcaccggtggtgatgaagtggaagggtgtgctgatgtgattggttacatccggtgttccttcctgtttcgtattattccagtatttggcactgaaaccttgcttgccatccatgctgcattgctggaatacactttgcaaagtgacgtcggaggtcaggtcgcatccgggttcgtagatgatctgtgattcgggcagatattcgcggataccctccaatagagtgatggtatgtgagggaaaaccattgtagttgccccattgcattacggagtcattggcattaggtcctaccacggccactttcaggttcttgtttaaaggcagtaaactttgattgttttgcagcaacacaaggctctcacgtgccatacggagtgccagttcacgatgttctttactatctaccacgctgtaaggaatttgtgcccaggacacttgtgaaggttcgtccatctcacccaactcaaagcgggctttcatcaggcgcttcagggagatgtctatctgtttctcgtcaatcaatccttcctttacggcttcgggcagtgaagcatagctgtcgccacattccacatctgttccggagagtacggctttggcggaagcgtgttgtttgtcaggatcagtttcatgggcacctttgttgtagaagtcgctgattgcccagcaatccgatactacgatttctttatatccccattcatcacgcagaatttgcataagcaggcggttacttccgcagcagggttcaccttcaaagcggttgtaggcacacatcacttcttttacgtgcgctttttgaactaggtctttaaaagcgggcagataagtttcccataaatcacgcgggtcgatgttctcggcattgaaactatggcggttccactccggaccggaatgtacggcatagtgcttagcacaggcatgtagcttatcatacttctctccttcaggtccttgcaggccgcgtaccactgccatacccatctgccctgtgaggtaaggatcttctccgtaagtttcctgtccccgtccccagcgcggatcacggaagatgttgatattgggtgtccacatggtgagcccctgataacgttttaatccgccttctttgctgaattcggtattcttggcacgtgcttcatccgaaactgcggtgaatacatcgtaaagcagttcgttgttgaaagaagctcccataccgatggcttgcgggaatacggtggccagtccggcacgtcctacgccgtgcagcgcttcgttccaccagtcataggcttttatgcccagtcgggggatggcaggagatgtgttttgcatcaatgaggctttctcttccaatgtaagtcggcctaccagatcattggcgcgttcttccgggcttagagccgggttcttgtagggaggttgtgaacaggaaaggaagcacagacacaggcatccgattccggtgagcaactgaagttttcttttcatggtattagtgcgtttttattgttattaatagacttctgttttgtcattgtggatgacgattacaaaaataggcagaaaagaggatttggaagaagaatcgtatttcagaaagttgagtctatgttacagatttcctccggatgttacatcttgttttgctgaggttacattaaagagaaaaatgcctgttacaggctatattccggagggggatattgtaatttgttgtgttaacctattggcgggatttgtttctttccggaaaagaaaggaaggaaaccagttgacgagttgacaagggaacaaggggctgcgcaatgcttctatgccgcatggaaccttgtccccttgtcaactcgtcccctagtcaactttccctcataaccctacaagaaggaatcaattgcgccaacaaatcatattagttccttccttctgctttctcacatcggatcagaaccttctgttcattatttaaggtcgtagcgaacagataaacttctccgccttcgctcagtttgatacgtttacggagttccgctactgaacttggaaagttacgaaccgtgatattggctttcttcagatctcctaatacgccttttagctctttcttatttaatgtacatacccccgttatccggaaacttcttccgggaaagttctttatcggttcaccggaagtatagaggtggctgttaggatgcagcttctttaccttatatatacaggctacattgcggaaagcccctgctttgaggatggacgcgttgggttcgtacagatatttatctaaagtatcggtgtattcattcggacttgattgttcctgttcgcgggtgaaagtgaagaactgtccggttggctctgtatttctcccatccttcgtttgcagattgatgcaatggataggaatattctctgcggcaacagtgttgtgtcctaagataagcaagagttccttgcattcattgtttacagaaacaatatgtgcttcctgtacgtactttaaatcctgaatagccaaagacaggtcgagcataggggagagcttcaccattacgtgctgcgccttttcgagtagcagggattccagttctgctacattcggttcacagtcggcaatggcaacagtcttaccgccatgcccgtcacgacgggcaggatcaatgaatatccagtcgacggaagacatctcttgcagataccggataccgtctttgttttctatccggatatgattcagacccagtaacgggaagttatgcgatgcaatctcgcaaagaacttcctgccgttccacataggtgacatgatggaatttcggagaaagaaaagcacagtctatgccgaagcctccggttaagtcggtcagtgtgccggaggaagactccggaatgatagatgctttgtatcgtgccgtagcttccgaagaacattgctctaacgataggtgacggggatatagaacgccttcttcctcatgccaggacggtattttctcagctgccgcctgtctgcccgctatctgcgtcagtgcaacaggtatatccacatcgggatatctcggtgcttgcagtgccaggctgcgtacatcatccttgcgatgttcacgtataaaacgaagggtttcgccattcaattccataatccttgtcgtttagtagtttctttgaagccataatccgaagaaacggtcgtaaatctgataagctcccgcctcttgtgtgacaaaatccttctccaacagtccttttaatgccgattgtacagagctggaggatggcaatctatatttcttgataaatgcaccggaagtgatggcacttgcttttccttctttggtaatggcaatgagcagttctttttgtttctcgggcatccggaaaagggtttcggagtaggtatattggaatgagcctatgatttgacagatggcttcctcaaccatcgaaacatctgcgacctcatgaacaggcgtcatgtcatacagggtatgcaatactttctgcatataccaggtgatgccttcgaaatattgatatatctgttcgatagcttctttggatatgttcttctctgcttctttgaagtgtttctgagcaaatttgatgtattcctctaaaggaatactttccagatgcatcatcgatacactctgatagaaagggcgtgaggctgtcagaaatatattgcccataatgtgcctctggcttccggcaaagatgaaatgggcattgttgcaatgttgcacgtaagtgcgcaggatagcttccacattgtcttccgcataatttgtgatttgctggaattcgtcgatggctacgatgcagggcttgttcgcctgttccagataatggaatatttcatccagcgtagcgtccggagattggatgtctcccaagcctaaattgaatgaagggttaccattgaagtcgaatgtcagactggcttgcagtgacttcatcgtttcccagaaagtctgtatcgttttcttgcccgaggacttcaatgactcgataatttctttgctgagagcaaacacaaattcacgcagagatttggtcgcatatatatcaataaagaatgtgtaatatgtcttttgaatttctttactctggaagcaatgacgtatcaatcctgtcttacccattcttcgcgttgagattaacgcggtattattaccattggtaatttgccggataagcatctcactctccgctttcctgtcacagaaataggcaggggatatgtatccgtttataatgaaagggtttcggatgattagcatggcttctttactttatgatgattatgcaaagataattattataaagtaataatgcaaagaaaataatggtggcttcacttagacctgtacttgtgcctcccggagcattgtctccataatatccagatcagagttaacctcgccttgcagcaaatacttatcccgcttgcgcgctactttttcataaatctctttcgcccgttccggttgattctcccaatacaaggcaagagcacacagcaagcgttgtttggaagacatcataatcttataccgctggatgtatctctttatcttatctgtataaagccgctctatttcttcttttctccgtttacctatcagttcgaggaacaggagttcacactcgatttcttttacgtatagtccgacaatttcctctttatgccgctctatttcgctaaacaggacgtgtgcggtttcaaattctttccggtctacatagcgcgaaatatagagcagtttaacggcaacctgcatgatattcctgtaatctgtcacttcatcgttcggaaaccattcgtccggcatgtctttcagtcttacgcctttctgaacttcagcgttgacggctaactgtaatgccagatacttccgggtattcaggtcccggtgcatcaatatcaggttgtaggcatcattcgtgatgcccgacatcttcaatggaataccgttcatcagtgccaggaagaagccgcagataaaggagaatagaaggaataaatgtaaaggtagcggtatctcgggataggcaacccaaagaacaagtgcaaggattgccgtcagcagattcatcagtactccgcctgcattataccagaaataaggcaactgttcgtaaggcttatccggtggagagagcaggcattgtccgcccgtgccggagatggagaagcgtttgaaacggaactttcctttttcttttatcagtgtaaggctacctacccgaaaagaaacgaaccggtaaccggtggcaagtccgaagatcagatgcccgccttcgtggagaatgatttgtacaaaaacggcaaggatgagacaagtcaatgataagatacaggaaagcaagagtctgcttaactgtatgtttcccatattcccgaagaattcacttaatgtggtttccgtaaagaatgtaatgcaaagcaccactgcaccgaagccgatgcatgcaccgaacagggtggaaagtataagtttgagagcttgtttcatagttgcatggtatggagttcttacccggtttgtctgcacaaatatacggaaaatctccgggagttctggtaaagttaagtagataaagtgagtggatgttgttactctgtgtttctaaacatacgtaaatgtatgtcaattgatgtaaataacactacatttgtaaaatgtttaacctaaagaatatgaatatgcgacatttgaaaattacttatgtatgttttgctcttagcgttctgtgtttattgttaatatcatgcaaagatgatgaagatccgtatcctgctggaaaagaacttgtaaactatgaaatgacacttttccgagtggaatatggcgctccgaaaccaaatccattaccgaaagattgtatagtctatagcgaagtgccgggaaacaatgaggcctgtgataataaattttttatctccttttattatgaaggaaatttataccctatcgggggattacccattccggaaatgagagactggactatgaataagtcatcagtacaagtattgctcggtggaaaattttatttttatgaggatgctggaaatataccgcacagtagaagcaagagagacgattattttgtttctttccaagtaagttcaataatccttaaatagagatagtatgagaaaatacacagtacttttacttacgtttttttgtttttacagtttatctgcccaaaaacaactgtcttatttgggtgagaataagagcatgttgaagccattatggaaggtgcaacctcttacacttgggagttactacaaggtaaatgtggtatctgggcctatgataacaaagccgatttaatgccttacgatacaaatcatgtcataatcagtgttacaggttataataggtgtggttcttggaatgaatggattagttttacgcccgaccatagaacttcaaataggaattcccgtcaggctggtgcgaaatccgttatcatatacaatctctcatataaacagatttactctcataaaaaactgatagctccatttgatattaataccgtgaatctgccatcgggattttatataattgaatatcagttagaaaatggcattattacaagagaaaaagtatatgtcccttaatatagtttcttaatgtttttgctcattctaagagatataaggaactttatggtataaccttgtatttttgtttagcttcctgtcggctgcaccagttaaaatgccaccactcgctgggcaatgcgcgaaaacctgcggtacgcatgacgctccgcagcagttgccggttcacctgttcctgctttgtcatttttccgctttgcaccagtgcggcttcattcgtgatgtgagcttcgggaccgaggtggtctacttccgtacccatcggcaggggatttcccgcttcatccagtatgctgatgtctactgccagaccgtagttgtgcagtccgccaccacgtgcaggattggaaacatagatatacttggaggtgcctttcactacattccacattttctgctgcacactcatcgggcgggcggcatcatacacgatgaggcgacggccggggtatcgctttttcagttcctgttgcgccagtagcagtcctttcatggcatcgggatgcaggtacgcctcatgcaggtcttcgtatagcacctttcccgtgaaattatccgcccgggtatacatcaggtctacgatgatgctactgtctgcttcggcaatattcactagtccgatgctttccagatatcttgccgtttcacttttttgtgcggatgcggggataaaccagagagcaagtagaaaataatatatatacttcatacctttttttctttgcctgcaaaggtacgaattcccaccggattagccattccgtgcgaatacatagattttgtctatttcctcatagaatttatcagtttgtaatgaacttacgaatccttacatttgttccatatattaattatctaaacaaaaataccatggaaaagaaaaaactcacttctgccaacgggcgcctgatcgccgacaatcaaaacactcagaccgcaggacaacgtggtcctatcatgatgcaagacccctggtttttggaaaaacttgcacacttcgaccgtgaagtgattcccgaaagacgtatgcatgccaaaggttccggcgcatacggtacgtttaccgtaacacatgacatcacaaagtacacccgtgctgccatcttcagcgaagttggtaagaagacggagtgtttcgtgcgtttctccaccgtagccggtgaacggggagccgccgatgctgaacgtgatatccgtggttttgccatgaagttctatacagaagaaggcaactgggatttagtgggaaataatactcctgtattcttcctgcgcgatccgttgaaatttcccgatttgaaccatgccgtaaaacgtgacccgcgcaccaatatgcgcagtccgaacaataactgggatttctggaccctgctgcccgaagctttgcatcaggtgaccatcacgatgagtccccgtggtattccttattcctatcgccatatgcatggtttcggtagtcatacttatagctttttcaatgccgccaacgaacgtatttgggtgaagttccatctgcgcaccctgcaaggcatcaagaatctgaccgaccaggaggccgaggctatcattgccaaggatcgtgaatcgcaccaacgcgacttgtacgagagcatcgaaaagggtgacttcccgaagtggcaattccagatacagctgatgacggaagagcaggcggacgaataccgcatcaatccgttcgaccttacaaaggtatggccgcacaaagatttcccgcttcaggatgtaggtatcttggaactgaaccgtaacccggaaaactactttgccgaagtagagcaagctgctttcaatccgcagaatatagtggaaggtatcggtttctctcccgacaaaatgttgcagggacgccttttctcttatggtgatgcacagcgttaccgcttgggagtgaatgcggaacagattccggtaaacaagccccgttgcccgttccatgcttaccatcgtgacggtgccatgcgtgtagacggtaattacggcagtgccaagagctacgaacccaacagctacggtgaatggcaggactctcccgagaagaaagaaccgcctttgaaagttcatggcgacgtttataactacaatgagcgtgagtacgatgatgattactacagccagccgggtgatcttttccgactgatgtctgctgaagatcagcaactgacgtgcgaaaatacagcccgtgccatgggtgatgccgaactcttcattaagcaacgccatgtacgcaactgctacaaagctgatccggcctacggtacaggtgtagccaaggctttaggtattgacctggatgaagcattgaaagcaacccgatagttaagggatgtcctgaataacactaagaccctatatgcaaaagatggcatctattacatcaaaagatgccatcttttacagtgaaagatgccaccttttgcaacgaaagatggcatcttttgcatatccgggataagagatggatatggtatggtataaccttgaggttaatacttaataagcatctgttgcaagaacatacggtattcttgcggtgtactccctttcttcttcttgaatatccttataaaattagataagttattgaagccgcaagtgtagcagatctcggctaccgtgtgggttgtttctgccaatagctggcaagcgcgggctatccgcaagttcgtgatataatcaatgaatgtgcaattcgtcttttttttgaagaaatggctgaatgcagattcggacatgttcaccagttgcgccacgtcgcccagcttaatcggttcttcaaagtttttctcgatatagtcgcagactttggctatccgtcggcttttggaagtgcgtacggtgtctttggtatcatattggttgctgactaagatatggcggtcggcaatagaaagctcatgcaggatagagaaaaattccaataccgtatgaaatccctgcatccgggtcagcttgataatcttatctttcatcaccagttgggtttgtctggaaaagccaatgccccgttgtgattcaagcagcagttgcttgatggggttgaataagcgtttttccaatatcggaaagttcagtagcttgtccgagaactggatggtaatcacatggtttccttctactacttctcctttccaggcgtgtggaaggttgggacctatcatgatgaggtccagggcttcgaaagcctctaccgaatctccaacgatgcggcttccgtaggtgtccataaccaaattgatttcatagtccggatgatagtgtaccggatagtcgaacttggcgttcggatgattgagtacaatgaacaggtcatccgcggcaatgggagtgatttctttttgtatgtctttcatggtcgtagttgtttctctcttgcaaagctacgaattctaatgaaaatacagtcaggtattcaaaaaagtataatcaatagacagaatattataagcgaattatcagaatcccctctatttttgcagcatgaattcaaaacaattaatttctatgctatggagacattttcaataagcaatttagatcttgtaatagtccttgtttatttggcctttatcatctggtgggggctgaagaatggtaagagctcagactcccaatcctattttttggcgggacgctcaatgccttggtgggtagtggggttgtcgctgtttgctgccagtatttcaagtaccactttgataggtcagtccggtgatgcttatcacacgggtatcgctgtgtttaattataacctgacgggtattgtggtaatggtgttctttgcagttttcctgctacctctttatattaagtcgggtatattcacgatatcggaatttctggagaagcgttttgaccgccgttcgcgctattacttctctgccatttgcatcataggaaacattttcctggacgcagccggggctttgtatgctgctgcgctgattattaagctgatacttcccgatgctgatttgcaactgatcattattgtgtttgcgattattgctgcatcttatactatcccgggtggtttgtcttctgccattaatgcggaattgatacaggctgtcattcttatattaggatctattttgctgactttctactgtttccagcaaggcggggattatttctatcagttgtttgccagtggcgatatatcggtgaagctgattcgtccgttgacggatacggccactccctggctggggctgatagtcggtatgccggttctgggcatctatttctgggcaaataaccagacgttggtgcagcgtgtattgagctcgaagtcagtggatgaaggacgtaagggtgtattgtttacgggtttccttactatgctgactctttttatcattgccataccgggtgtgattgcccgccatttgtttccggggcttgaaaagccggatatggtatatcccaatatggtgcttcaactgataccggtgggattgttgggtatcatgctggcagcgcttttgtctgctttgacttctactttgagcgctattcttaactctacgtctacactgttcacaatggacttctatgcgcaatataataagaatgccggttcccagaaactcgtgattatcggaaagataacctcttgcgtcattattgttgcggccgccttatgggcacctcagatcgggaagttcggttcgttgctgaagtattaccaggagatgctttcttacattgctccgcctgttgttgcggcatttttgctgggcgtgtttaataagcgtgtgaatggaaatggtgcttttgccggactgctcagtggtttggctatagcggttgtgatgcttttctataagaatgaaatatttggcgatatgcacttcctgttgattgttcctttcttgttggtcgccagtgcattggtgatttatttggttagtctgcgttatgtgaagccaatggagagtaaactcaaggataccacattctctatggacgatttgaaagcggagtttcgggcaactcgtggagtgacgtggtataaaaactattataattgggcaattatcttattggtattgagtgcggtaatatgggttgtattcagatgattattatattattataaagaaatagaaagatgaaactaaagaaatttgagggaaatccgatactttccccgacggatgcgaatgattgggaatctctggtgacttgtaacccgggggtaatatatgacgacggtacgttctatatgttgtatcgggctgcgggaaatgataccgagcacgtcattcgtttggggttggcgaccagtaaggatggatttcactttgagcgcgtgtccgatatgccggcatttggtcccagcgaggacgggccggactccggttgtgtggaagatccccgtatcgtgaagtatgatacggagtattacatcacttatgcttatcgtccatactcgccagggcagtattggaatttcggacatgatgagattctgttaccggagtgtggcagcgatgcgcctatggctattcgtaagaatttgggtaacacggggttggctgttactactgatttccgtgagtttaagagactgggacggttgacctctccggtgttggatgacagggacgtgattatttttccggaaaagatagaggggcaatatgtgatgctgcatcgcccgaaggaatatattggcgataagtacggtgtggattacccttctatttgggtgaagttttcggacgaccttctgaattgggaggataaagaaagtcatttgttactgactggacgtgaaaattcctgggaggagaagattggtggaagtacgcctccacttaaaacaaaagaagggtggttgatgctgtatcatggtgtagaaagtggtggtttaggctattatcgcgtaggtgcgttactattggatagtactgatcctatgcgaatcatcggaaaaacaccttatccgatattggagccggaaatggattttgaaattaaaggatattacaatgggtgtgtgttcccgacaggtaatgcaatagtagatgatacactttttgtgtattatggaagtgctgataagtatgtttgtgttgccacatgtcgggttaatgaactgataagttatcttttgtcggatgaatgtaaaataactgattagtttttaatagaatgagagccatgaaaataaaaatcttaaattttatcttagttatactatgtgcttcaagcggtacggctaaggttgtgttgcctgatattattagcaataatatggtgctgcaacaggatgcacaagtaaggctttggggtaaggcgctgccgaacggacagatagttgtgaccgtgtcgtggaattctcagaaattcacaactctaagtgacaaagaaggcaattgggaaatcggtataactactccacggggaagttacatacctcaaaatatagaaatatcagatggcgagagcgtgacgcttactaatattttgattggagaagtttggctctgttccggacaatcaaatatggaaatgcctttgaggggatttcaaaactgtccggtagcaggaggtaatgaaacgatagcaactagtggaagatggagaaagcagatacgttttgctactgtgccgtggacggaagcgcttagtccgcaagaaagctgtcgtggtaactggaaaatatcaagtcctgaaaatgcacaatggtttagtgcggtgggatttcattttgctatgatgttaaatgaagtgctagatgtaccggtaggcattatcagttgttgttggggaggttctacacttgaaggatggctccctgaaaaagtcttaagaaattatgctgatattgacttggataaagctaaaaaaaggcaggggatgcaatgtttacgtccgatgattatgtataatggcatgttgtatcctttacgcaagtacaccattaaaggttttctatggtatcaaggagaatcaaatgttgataaattcgatgtgtatacagaacgtttgactacattggtacgtctttggcgtgaagaatggaactcagatttgcctttctatttcgctgaaatagctccttatcaatatggagaaaagttggacgcagcccgttttcgggaagctcagtacaaagcgcaatttgtaattcccaactgtggaatgattagtacgaatgatttggtagagccctatgaacgaactaatatacatcctaaaaataagaaggaggtggggaaaagatttgcatatatggcattgagagagacctatggacttcggggattttacagtagaggacctgaatataaatcgatgagtatagaaggtgaaagagtggtattgtcgtttgatcatgcggaagagggctttagtcggttggaagaaatacgaggatttgagatagctgggaaagatagcttcttttatcctgcacatgtaaaggtactgtataatgaacgcaaacttcagatttctacggataaagtatcagagccggtagctgtccgatattgctttcataatttcatgttaggaaatacgggtaatcaaatggaacttccgatagttcctttccgtacggatagttggtaggttaaagggtattcatggagtaacttttgctattcaaaaaagtataatcattcgacatttttttaaaatacgttttgtctacttgtatctacatttgtaatgtaaaacaaaataatattaattttttagatttaatagctatgataacaaaatcatttccaaaactttggactcttttactgcttctgatggcaatgatctgttttccggcctttggtgtatatgctcagcaatccaaggtcaagataacggtttcaggtgtagtgcaagatcaaacaggactgccagttccaggagcgacagtggtagctgatcaaactaccatgaaaggtacagtgaccgattccgatggctttttctcattagatggtatttctgtcggtgaaactttgaccgttacatttattggatataaaaagcagacggtgaaaattacgggaaaagaaaagttggtaattactttatcggaagattcagaactacttgacgaagtggttgttgtgggatatggacaaatgaagaagagcgatcttacgggatcggtggcttcggtaaagaccgaaaaattggctgacattcctgtcggttccatcgaaaaggtgcttcaaggacgcattgcaggtgtgcaggtgattaattcttcgcaggacccgggtgctggttctaccgtacgcatacgtggtaactcttctttgaatggttccaatgcaccgttggtagttatcgatggatttccatttggagaagctggtaatttgaagcagatcaatccgcaagacattgtttcaatggaggtgcttaaagatgcctctgcatcagctatttatggttcgcgtggcgctaatggtgttattcttatcactactcgtaaggctaaggaaaatgtaacccgtattaatgtacgccagcaaactaccttgtcagagttcggttcagagttgaacttgtggcgtgatccagtcttgatggcaatgctgagtaacgaaagctatattaatgccgggctgacaccattgtatactggtacgactaatggaagtggagtttactatccttcgatagaggaattacagacgacttggactaccaatacccgttgggatgatttggtgttccgtgatatgccggtttcaaacaatacgactgtacaattgcaaagttccaatgaccgcacttcgtttacagctagtgccaattacttttcggaaaacggtatgtatattaaagataattatcataagtttggtggaaacttttctgtagaacacaaggtgctggataacctctccataaaggcaaatgccaatattacccataacaagcgtcacagcaatggatggctgtcatatactcgtaatcctatctttccagtctatgacgaaaacggcaactattggttatacggtgaaactgattattatcaccctttggccatcactaacttgcaaaagaacgagtcgaaaggttttgatttgatttcttcctttttggtggactatcaagtatttcctttcttgaatttaaaagcacagctcaattataagcacggagaatctatcggtgatctttattatcccaaaaaatatacttcaataggtgtgcgtaataatggttatggaaaaataagtaatggaaagagtgataatgtggtatttgaaacttatgcaacctttgacaagattttcaatgaaaggcatcatgtgactgcaatgggcggatattcatacgagcagtatcagtcacgcagttcttcgcttgccgctaaaaattttgtaaacgagtcattgggaaatgagaatcttgcagctggtgatgctcaaagttatgaagtcagcaacggtttttatgagacgaagcttgtgtcggggatggcacgtttgaattatgcctacaataatcgttatctggtgacatttacagctcgtgccgatggttcatccaaatttggtagagataatcaatgggcgtttttcccttcaggtgctgttagttggaagatgcatgaggaagaatttgttaagcggttggacatttttgatatattgaagattcgtgccagctatggtatatcgggtaatcaaggtatcagcgcctatcagactttgagccgctatgggcagcacaaatattataatgatggtgaatggaaaacggtaatcggaccaggatatatctccggatattacggtgaaggaaatcgttggaaatactggagtggtgtgtccaataaaaagctgaaatgggagacgacatcacagttggacttaggctttgacatgagcttctttaagaaccgtctgaatataacttttgattggtatgataagtatacgtccgatctgctacgcgagaggaatattgccccttcatcaggttatgacaaaatgtgggtgaatgatggcaaaatacgtaatcgtggtatagaactgactgtagatggaataccttatcaggataaaaactggagagtgggtggaacatttgttttttcacgcaaccgaaataaggtggttagtttgggtaatgtaatagaaacagggctgagtaccgattcgcgtaccggtatgttatatgaaaattatggagattctaattctacatttgtggcatatactaacatattggctgtgggaaaaccgatgtatgtattttatggttataaagtcgatggtattgtacaaacttataccgagggtgtagaggctggtttgtctggtgattttgcacagccgggtgaattcaagtatgtggatattgacggaaacaataccgtggacgaaagagaccgttgcatcattggtgatccgaaccctgattggtctgcttcattgggtattgatgtgtcatggaaacgttttgatttcagcgtcttttttaatggtgtatttggtagtgatgttgtcaatatgtcaagcttcaaccagcctaacaattcccatcttcgctggactactgataatcctactaatgattatccacgtttgaacataaaccgccagaccaaattctccgattggtggatagaagatggttcgtttgttcgtattcagaatctgaccttgggatattccatccctatttcaaaaaggaatgccgcccggaaaatacgtctttatatgaatgttgataacctttatacttttagtggttttaaagggtatgacccggaagtgggtatgacgggaatttacagtggtggttatccccgtttacgtaaatggactattggtgctgatataactttctaaaaaaatgcaaagatgaaaaagaatactcttatactattgtcatccgccatttgggggatgttatccttagcctcgtgcgatctttccgaatctccttacggattctattcggagaataatttctataaaacggaagctgatgcggaagcagcagtaaactatatttatgatgctatcacttacattgagttttcgcgtgccattgtatttttgggagatatgccgactgatgtgcttgatcccaaaacaagtacaactgaaaacgacaaccaacaattggatgaatggaaactggaaagcttcaagagtaattcttctcttggaaatttctataagtattgctatattaccattaaccgtgcaaatgcagtaataaaaaatgtggcattgatgaatattgatgagaagatcaagcagcgttacgtaggtgaggcctattttatgcgagcttacgcctattttagtttaactcgtaatttcggtcttgtacctcttcatctggaaccggtggaaacattggaacagtctactgtcggtgcggcaaaatcactggacgagttgtggggagtcattatatccgatttagaactggccatcaataatctgcctttctttgaaaaagcagagccggggcgagctgataagactgcggcttattcactgcttgcaaagacctatctgtatcttgcgtcagccaaagaacataacactccgaaatatgttgatatgagcctgaatgttgacgattattatataaaagctgcagaatatgctgcaaaggtagtagacaatcctgaacagacagtattcggttttgaatctaatctgcttgacatttatgatgtggaaaaaccggacggaaaagaacatatcttcattatgtcaatggaccgtacggggattgatgaaggacaatactctaaattatcaaaaatgtatctgccttatgtatcagggggaacaatctatatgaaacaaggtaatactgataagatgattgcttcgcatgatggatggagtgagtatgtgaccaatactcgattctataattcttttgagatcggagaccttcgtcatgactggcttattgtagacaaagtttacaatgctgcgggggaagtaattgcttcagtagctgataagaagctttcttatccattttgccgtaaatttatcgatccgaattttattggtgataagacttctacgcgaccttatcttattcgttattcggatattgcccttacctatgctgaggctgtaggacctactgctaaagcttatgatttggtaaactatgttcgtaaccgtgcagggttaagtaatttggagcccaacttatcgctagaagcctttagggaagctgtacttttggaacgcaaatatgaattggcttttgaaggtaactggtgttatgatttgcgccgctggaatagactccataccgatattgaggctgccagggagcagggactcagtgcagatatgatggtgttttatccgataccttcaatggaaacagatttaaatcctaacctttaaaaacagaatcagatgaataagattatttattggatattagcggcttctacagttttgattggtctgaattcctgtaaggaaaatccgtgggatgatgtaacggatggaggctggaatcatgaacgtacaatccttgacataaaacttgagggacaggtcggagtggcacagattgaaaatacggatgctactacaggaattattaaccttaaggtggcacctgatatggtgaatgatatgtcgaaagtgcatattgaaaaactttctctttcctatcaagcggaatcatctgttgaccaaggtggaataattgattttacttcttcagtcattccttctattactgtaacttcaaaaatgggtgagacgcgaacctatacattgagtatgtctccttttatagagactataacgggtatttataccattcaggacttttatgtttatggagggacaggagcgtcatatggcggaacgggagtggtccgtctgagtggaaaggggagttgttggactaccggagctactaaaccaagtgcagaatttgataattatatagtattaaaactgactgaggttatggttgatggtaatactactggtgagtgtatcaactatggtggtgtagatgctaattggtgggattgcatattcgtggccgcccagaataaatggaatacgggagatttggatttgagttccttctaccgtcgtattcctaaaggcaagagtacttgggtacgcaattatgcagaaaacacaataacttttatagctgaggatggtacggtgtcatcgtcttgtaaattgttggaaacaggtacttataccatgtattcaaacgattctcgtaatttgatattgaatgtgcctaatcaagcattcgaatttgacgtggcaggtaaggataattgggataatatgtataccgattttaatatgcttgcttccagtcctcgtaagttttttatcatgatcactaaacagactagtgattttgtattgcctgaagattcaaaaacattacctgaataacttaattattcagaaagaggttttcaatatacttcttagtcgtttttatagatacttttgacatcatgaagatattctatatactctttattttaggtctgtggagctgtacggcagcttcacagactgttgtttctgtagatgcgaaacagattatcaatgaaggttacatcggtaacggtgctcagtgggacccttatcaattggattacggaaaaggacgtttggacatttccgaagccgactggaagaagatgtatgaccgtctggactttatgcgccctcagtttatacgtgtcatgaccaacactacatcggtaatgcaggatggagttctttatcccgaacgtggcttggagcatttgtctcatatattggattactgccaatcgcgtgatgtgacagtaatgttcggtgactggggtgggggaatggtagatgcccggaaagaggtgatccgtgaaaagaatctttccgctgctgccgaatatgttcgttttctgatagaggaaaaagggtattcctgtattaaatactacaatctggtgaatgagccgaatggctactggtcttcaacggacggaaaatactccctttgggcacgtgccatccgcttcttctatggagaattgcaaaagaacaaacttgcaggtaaactttcggttgtggggcctgatgctgcaatctggacggctgatgaggcctggtgggtggatagttgtgctacgcatctgaaagatgagattggtctttatgatatccatacctatccttctaaaataacggtgaacagcggggagtatactgacattatccgtgcctacaaacaagctgttccggcaggtcggaaaatcgtgatgggtgagatcggatttaagtttgtggaacctgccgattctgtttatcagcgtgaaaaccttcgtagggcagcggcaaagccttatgcttcgatggatgattctcaaatgtttgtttatgatttcatgtatggtaccgacatggcagatgctcttttccagacagtaaacgccggatattccggttcggtggtgtggatgctcgatgatgccatgcatgcgaaagaagcacctgataaactgaaggtatggggattttggaatatctttggcgaagagtatttcggtacggaagaagaggaagtgcgtccctggttttatgcctggtcgttgctgacgcgctatatgcctgccggttcgcgtgcttataaggttgaggtggaaggagacaagtctcttaaggcgattgctgtggaaaaagacggtaaatatatgattgccgtggtcaatgtttccagggaagagaaatctgtattgcttaaaagtacttctctccccgtattgaaaggtgtgaaacagtacttgtatgccgagggccggttacagaaagaaggtgattgccgattattaccccatcgccagggggtgacattgcgcccggccaaaggcgaggcattccaaatgcccggagagtctctggtgctatatacgaatttcgattattaattgataaccgttcataataagattatgatgaagataaatatgattttaagttgcatgctgttatggctcgtatcagcttgcacctcgcaagaagtggtggaaattacggtctcaccggaagtgacgaatgccggatatatcggcaatggtgccgagtgggatccctatgatgaggctgaagcttggggtgcttctatctctgataaagactgggaaacactctgcaaacgactcgactttatgaagccgcagtatatacgttgcatgataaacagcccctatcgctattatgattccgcaacaggcacgtatgataaaacgcggaatatagcttccatctcccgactcttgaagtattgcactgagcgggggataaccgtcatgtacggtgaatacaatccgcctacctgggatatgaagcaggatcagaaatgggtggatatgtccgtcgactatcttaattatctggtgaatgaccttggtttctcctgtatcaagtattttgtaatcttcaacgagcctgatggaaactgggcatctaccaatggtgattatgaaatgtggaaacaaatgcttttccgttttcaccggaaaatgaaagagtatcccgggctgacggaaaaggtgatgcttgcagggccggatgtagtagccgattacaagaatgaggcttctgcctatgatgccgaggggtgggtgaaacaaacggcactggatgctgactccattatcggattgtacgatgtccatgcttatccgggtcagaatgaagtgcgtaccggacaatatcctgaaattctttcccgctataaacgtcatgttcccgaggggaaaaagattgttttgggtgaggccggttataagtattggcgtgatgctgattctttgttgatggcagaatataaccgccgggtcgaagggcatcctttcactaaagggagtgactgcaatatgctctgttacgactatttctatggcctcgatatgccgttgcttgccatggaagtgatgaacggaggatattcgggtatggctgtgtggatgctggatgatgcaatgcatagcagcggagattccggaaagacggaagatgttaagatatggggtatgtggaatattctgggagaggaagtatttaataaacccgatgaagaacagatacggccctggttctatacctggtcgctgatgtgccgttattttcctgccggaacggatatattgcatactgctgtagcttcggaagataaagatgtctatgtggtggcaggtacttaccagggcaaattgtcggtggctatggtgaatgtgggagagaaagataaatctgtgcagctcactttaccctgtccgatggagaatgcctccctttataaatatgaggaaaatcttcaacccaaggatgccgatggatttcctgttccccaggaaacgggatttcatttgaaaggaacgtataaaacgaccttgaaggcacagacgttccagttattaactgatattcaataataagatagttatgaaaaaagtatatatggcaatctttatcgccttgttgggctgttcgtcctgctctaaagataatgatgattctgcacccgaaccgccgggtaccgaaactgtcgaactgagtatggtagataaaagtgcaacagccgaaactaaggctttgtatgcccgtctatgggatatacagcaaaccgggttcatgtttggacaccatgatgatttgttctatggccgtaaatggtatgatgtttcgggcaattctgatacgaaggaggtatgcggagattatccggctgtattcagtgtagattttgcggagattatggatgatcgctgcgaggggaatgaggctaacgctattcgcaaacgctgtattcttgaggcacgtcgtcgtggggaggtagttattgcatgctgccacctgaataatcctttgaccggaggtgattcgtgggataattcaagtgccgaagtcgtacgtgggattttggaagacggaagtgccgtacaggctaagtttaagacctggcttgaccgtcttgctacatttgccggtgaattgaaagatgatcaggggaagccgatccctgttattttccgtcctttccatgagcatacacagacttggtcatggtggggaaaaagttgcactacggaggcggagtttatcggtctctggaagtttacagtcaattatctccgtgatacaaaaggtatacaccagtttgtctatgccatttccccgcagatggattccgtgaagcgtgaagaggacttccttttccgttggccgggtgatgagtatgtcgattttataggtatggattgctaccacggtctgaatcctgccactttctcctccaatctaaagactatttccgaattatcgaagaaaaagaagaagccttgcggagtgacggaaaccggtgtcgaaggatttactgataaggattattggagtaagcagatacttactcctgcaactgggcgcaaagtcagcatgattgtgatgtggcgcaataagtttgtcggaggcaatgaatcggacatgcattatttctctgtattcaaggggcatgcttctgaggcggatttcattaagttccatgctaatgagcttactttcttcagtagcgatctgccggacatgtatcagatgcctgagaatgtggaggtgaaataagtttcctaatacattctgttacctattaggatatgattcgtttgttacttttcggtttactatagttattcaaaagatatactatagtaaaccgaatttctattaggcaataataacaagtaagattaggtagaaaaaaatataaagtagccaatcgatcttctttcaatgcttgtatcaatgagcgaataccgcgttcttaattccttacaatgaaaaagcttcccaatcatcatcacctgaatacgggtgatggcgattgggaagccagggagaattaagcgatgcggaatatgcgaatggaaaagtacgaatggattagtattcgtcgctcagggaaataacttttaattgttttttaaatgcaggctgcggtaaatcggtatagacattcactttcacagaaccgccgggcaatatatcgaagtaattgtcgctgaatgaactgtccacatcgccgatggttatgaatacggcacgggcaaagttgtcgctgttgagggtcagttcgaaaccgccttcgatgggctctatgctcgaagtgatagcagctttgggatagttcacttctttctgtttcacgaggaagtagttattggcataactgtttttccctttgtcggtcagcaggacggcatgaacgaatacatcttctttaggtgtgttttttaaggcttcacccaaaggaaccgagaataccgtctggctactgttggcgtctatctttatatttcgtttgtaactgttcactttctctcctgtcagtttcataacttctacctggagcgtgccgttgcaggatttgaggcggtcggaaaccacctggatgttcaatacttcgccttcgtcggtgatgggagaaacgaggatgtcacggtaaaccttgcgggcaaagtaatgctgcgctttccagcgaccgtagtagtcgcggcttgcccaggaagccacgggccagcagtcgttgtgttgccagaagagcgttcccatgcagtagggcatatcccggcgatgtgcctcgatggctgttttgatggcatctccttgcagcacgtggttcatgtagaggaaggcttcgaagtttttgggtttgcgatattcgttcagcagataagtctcaatcagttggttggcgtgcatgcctccgcgctgatgggacatcatgacttccgaatagatatcccagtcctcttcacagggagcgtagcgcttcacggattcaaattcggggaaggattggaagccatattcgctgaaaaaacggcttcgttctttgttgtacgtctcgatgggctttttaccatgccacacatcccagtagtggcggtcgccgttgtggtcatcgctgccgccgtcttcacgggcgaagggggaagaaggccaatagaagctctcgggtgcgtattccttcacaacttcgggaagggtgacgtaatactgatcggtgaactgtttccagatcttcttttcatattccggattctgcgccttgtatcgtttctgccagccccagttgaaccaggcgtcattacattcgttatttccgcaccagagggcgatacaggcatggtttcgcagacgtttcacattgtcgatggcttcctggcggatattctccagtaattccccttcagcggggtagaggctgcatgcaaacatgaaatcttgccagacaaggatgccgtagcggtcgcagagttcatagaacaggtcattctcataaatgccgccgccccagatgcgaagcatgttcatgttgacattggcggcgtcaaggattgtcttttcgtacagttccggtgtgacacgtggcaggaagttgtcttgcggaatgtagttggcacctttggcaaagacggggacgccgttcagttccacatagaaagtctttccatccttgtccgggcggttgatgatcttcagcgagcggatacccacttttgtgctctgaatgtcggatgtttcgttattgatggtaagtgcagtacggaagtcatataaatgctgctcacccagtccgttactccaccacaatcggggattccggatgataaacggaagggaaatcttattgtttcctttgtggagggaaacggttttgcctgccattactctgccggaagcggcatcagtcactgtaagggtggcttcgtctatttccttgtccgattgaacttctatttctcccacgatggatgcacggcttttactgacttcctgttgacggatgaagacatcgctgagtcgggcgtcgttccatgcttcaatgtatacaggacgccaaatgccggaggtcactaagcgaggtccccagtcccagccgtagtgataaccggctttgcgggcaaatacgctgactttcttgtcgaataatccaccgttttcggactggtcgttactggcttcgtaatggtagggcagtgcatcccatttggggatgtccaccttgatgggagaatggaaatagattttcaggatattttctccgggtttcagttccgcctttatgtctgttttccattcacggaacatgttgttggtctccagtattttcttttcgttcagatatacgtctgcataagtgtcgagtcctttgaatacgaggtctatattctgcctctccattatttcgggagtcagttggaaggaggtctggtagatccagtcttccttatctatccactgcatatcgcgttcgttgaggcggaagaagggatcttcgatgatcttgttgtttattaagtcggtgtgcaccaccccgggaacggtggcgggataccagttgcttagccgggcttgtttgaattgccagccttcgttcaactctttccggagaggaacggctattagcagggcgctgcacaagagtgatgaggtcagtagtgacgctcgcttcatgttcaaattcggttttttcatgactgttagttattgagttatgttgaatgtcgcttttaatccttcccggctgttgcctcctatccacaaatcaaactttccgggctctacacaatagtccatcgcatagttccagaaggataactgctttaccggtagctccatccgtatgtgccgtgtctctccggctttcagatgaatatgctcaaaagcagccagttcctttaccggccgggttacggatgctgccaggtcgcggaaatagagttgcgctatttcggtgccgtccgttttgccggtattagttaggtcaaaggtaatgataattacttcattccgggtatattgagtggaggataattgcagattactgtatgcaaatgttgtataggataagccatatccgaatgggaataggggatctttgcctgcatccaggtagaaagaggtgttccccaaagaagtttgttcggcacccacagggatggtgaagatattcttttcacttccgcttgccgggcgtccggtactggtgtggttgtagtaaatggggatttgtccggtttcctttgggaaggttacgggtaatttgccggaaggcacaaccttgccgaaaagaaggtttgccaatgcgggaccgcccattgttccgggatggaaagcatagagcagtgcatccgagatattcacttcccgtccgatggtaagcggtcgccctgccatgactactgtaaccagcggttttcccgtttcggacaaacggtgcagtaacccggattgcgccccttgcaaattcaggttggcaaggcaatgcgcctcaccggaaagtatggcttcttcgcctacgaaagcaagaataagatccgcttcccgggctaattccactactttattgaattggctggtgaccgtatcgcgtgaatagttcaatcccggggcatatagcactttgatgctgtcgccacttgtccggcgcaatgcttgtagaggcgtttgcgagtatgaggcatcaccgtcaaacacccaggtgcctaattgctcatggggtgcgtccgccaatggtccggttacgagaattgtctttatgttgctctgaatgggtaaagttcccctttcgttctttaataaaacagccgattgttcggccgctgtctgcgccgcttccaggaaatcggggcgatagaatgtctcttttctttggtcggcaatgtatggatgttcgaataatcccaaccggaacttcaatcgcaaaatgtttcttaccgcattgtcgatggtttccatggaaacttttccctcttttatcaattgagggagatacttgatataggtttcgctcaccatctctatatcggtccctgcatttgtagctttcagtgccgcttccttctcgtcctcgcagaatccgtggcggatcatttcggagacggatgcccagtccgatactaccgtgccccggtaattccactcattgcggagcacatccttcaacaggaaaggattggctgaagaggggataccatcattatcgttgaatgccgtcatcagggtagctgctccggcattgacggctgcttcgaaagggcggagataaaggttgcggaattggcgttcggtgatgtaggtggagttgtaatctctgcctccttccgaagcaccatatccggcaaagtgcttggcacaggcagcaatggaggtcgggtggtttaggctactcccctgaaaaccttttatcgctgcaacgcccatttgagagacgagaagcgggtcttctccgaatccttcggctatacgtccccagcgaggatcatgagtgatatctatcatgggggcgaatgtccatcttattcctgcagcggaagcttcggtcgcggcaatccgggcaccggtttccgcaatctccggattgaaactggcggcttgccccaaaggtatagggaagatggttttgaatccgtgtatcacgtctctggcgttgataagcggaataccgaggcgggagtcttctacggcaatgcgttgtacttcattgaagatgtttgggtcggttatgctcatcacggagcctactctgcccttgcgtgtttcagttttaaggtatgggaagttctcacagtgcaattggttcatttgccctatcttctcttccagtgtcatctttccgaggagtgcctcgatacgcttttttgtctccttatccgatttgtaatcagtggaataacagacgtacggatgaagtaaaaggaagactgaagttacataataaaggatgtgtctgaacatatcggtatgtacgtttaaaggttttattattctgtgtgcaaatgtacagaacatgccttttccgatatgattagattttgctgtttaatgatactattttgaagaggaggattctgctgggatatgcgggtatttaccaatcactacagactcgccaggttaaaagctgataaactattggtggaataaattccttttggtacagtaatgagctaaatgttgataatgatttaggcgcggattacgcggattacacggattaatggctgcgctattacactatattac

SEQ ID NO: 6338 - DNA, 11331 bp, Unknown
  gut microbiota DNA sequence
gatgacgcggattttaaataaaatacttctatagcgtagccttttaaatccgcgttatctgcgtcatccgcgtctaaaaaataatataccgaatggcactattcgctaaaccctaatcactttttgctatttcacctcttccagccaaagcaccctgcttgaataatcattctgcttatggtaatctaccttatgattataaggtatctccaacccattcgccatcagataagcaccactaaatgtctttccctcaaaactcagcggatcattatctatccggttcagttcatgcactttgtaaagtttatcgggagagagtcctgccattttcactcgtggcagatgctggttgacaaagtgttctgtcttccaccaatagaacaccgacttatctttttcgggcgttacatacatcatagaagctactcccaatttatcatacggagacattaaacgatagatatcacctagttgcactaccggacggatcgttttatattcagcgatggcattcttacaaagtgtcttctcttcttctgtcatattctttggttgtatttccatacccaggcgaccactcatcgctacgtcaatgcgatattttaaaggaatggtgcggaaagtctggtggttgggagcggcactgatatgcgatgccatggcaatggcagggaagaaatatgaagttccccattgcatatagatacgttgcagagcatccgtattatcacttacccaaaactcatcgaagtagggcaggatgccatagttgacacgaccgccgccgctggcgcaagcctgtatggtaaggtccggatatttagcgcgtatttgctggcatattttctcaaagccacggtggaattcaatatacatgtggctttgattgtctttcgtcagataattggaaccgtgatttaagatggacatattggcatcccatttgatgtagtcgatttccgggtagttactcataagatcatctacaattttgaagataaattcctgtacctgccgattggcaagatccagcactacttgtgtaccaccacgtccctgcaccacgtcacgttcgggagccttaatcacccagtccggatgtttctcataaaattcactggttgtattggccatttccggctctatccagatgccgaacttgacaccgttcttttgtgcatctttcagcagaccttcaatgccattgggtaacttattcttatccactacccaatctccaagagaagaactgtcatttttacgcggatatttgtcgccaaaccaaccatcatccatcacgaacagttcaccacccatggaagcgatatcactcatcatctgatccatacccgcctggttaacgtcgaagtagacaccttcccagctattcagtaaaatcttgcggggaacagtgccatgagcaagcttgtgcaggcgtgcccagcgatggaagttccggctacttccgcttaatccctcattactgtaagttaaagcaagttcgggagtacggaaaatctcatctttctttaatgagtaagctgaattttcctcattgattccggcaaagaaccggtgatattcatcgtcgtgcgtatcaatacgcagtttgtagttaccactgtaacagagggcagcgccaatgacacaacccgcattttcctgtggctttccatccagtgagaacatgacttcggcatgtgaggtgtgcgagtttcgtaccccgtccttattctttattaccttcatgccgggttccaatgcctcttgacacaaacgcccttcgttcgcccatgatccgtaaagatgagatagccagacattgccccggcgaataggtaagaaagcagaggcaaactgattgagtataaccggtttcttttcctgatgtcggatttctgtccatatctcgatgacatctgcatcttgataggctttataatacacgtttacatagaaaggatataccttgtctttcagttcgatggcagtgatttccgcattttcttctttgctcgtttttacctgtacgatttccatctgcaaagtcatgttgccgtcggcatgttttacggctaaagcggattctccgggacagttgagtccatacacaggataagcgggcatgtccggagttcctgtaagatttatattctgcaaatctacctccgagagcttatctccatagtatacatgttttagctcaccaccgacaggtgccgagagtaccagggaggtttcaggggtagatacgcatacattttgtgaaaacagactgccggtcagcagtaacgttccaaacaacacattcattcgttttctgatgctcatgtttttcttctttttagatttctgaatattgataagtgcggcaaagataggcaattccgataagatgaattgatagtgttttatcatatactgatagtctgcctataacagcctgataatatcttgccagcccgatactctgtgatagttacggtctggcacacacatattatgtggttgtgcaaataaataccgttctccatcgaatgtagaaagattcttgggatgatcatcgatcatgatgtttcctctgatgctatccttacggccgcaaaatatcatttgttcccacgtgatgaatggaaaatgctcgctcagccattcttccttttcattcagactttgtggaaactcggtggccgaagatacaatcaacacgttgtatttctcattcagatatttcaatccctctatgcttccgggaataagaggagctgttctgaagaagcctttacttctcacatgtttctcgaaagaaggaaaagcttccagttcggtttttccatacatgttttcaatgttcagtttgatccctgaatccctgtattcgaaaatgatcaactgggcatatacatctgccaatactccatccatgtctaccaagatctgttgtctcatacttttaagttttattaataattaaacatccgtttttcttataaaaagcgagctattacttattttactactatgcggggttttcttgtacttgcggtttttatatattatctattttataaattgcaaaactccgcataatttcaaataatcgttcagtatttattgttttcatgcttaaatataagtatatttgcggtaatatgcaatgtttaaacacatggagatatgcttaaagaagaaagacatcagtacattttaaaccgtattaatcagaattatcggatttacattaccgcattaagttcagaactgggagtgtcagatgatactttacggcgagatttggcagaattggatgagcttggtttattgactaaagtacatggaggtgccattgcccgatcaggtattccggtagaatttaccgataggctgaatacggggatagcaggaaagcagcagatggcaaccaaggtgattccattgttcagtcccggagatattgtgttgatggatggtggtacatccaatctggaagtagcccgacagattcctgtagatgcggaattaagcatttataccaatagttttcctattgtaaatgtcttgatgcatcatcctaatctggaattgattttccttggcggaaaagtatttccttcttctcaagtgacagtcggagtttctgttttccaagcattacagactatacggccggattggttggtgctgggtatcagtaatgtacatccccatcaaggacttaccggaccggatagggaagaggctatgatgaaacgcctcatgatggaacgtgcgcaaaaaaggattatactggcagacagccataagttgaatacggctgaagcttatagcgttgcttctttaggagacattgattatctggtgacggaagatagtaaagttgattacatcaggcagaactggccgaaatcttcctatcaggtactttgagtatctgatcttatccaaggaagccttattctatttccattccctcaaaccggcaatcttttattctaaaatataattctttactctgccgtgtgctccatggaaaaagtcggatgtggaggcgttcatgaggctttaacgttacattgacagggaatatctgtttaccgggagcttttggggcatgtggctgttctgccagatcggtacgtggataaaagtcttttccgtgtgcataggcgaggcgataagaaatttccccttccagagtgaaagaaatccggcggattataagtgacttttcattgctttgtatgatgacttctgcataacgtttgccgtcctcatcaatatcggcaggccatttaccggtttctatcgtgatacctttttctgtttgtatcaggctctttacggcaatgtcgggacattcccggattacaggactttggtgactgatctttttgctgatagccgtcactggaagaaaccgcttattgcttccatatataataggtataacagtagaaactttttccgtatgtttaggagagaagtgaagataaaaacattgattccataatctgccatttgaatagggtagttcgataaccgttttaggtgaagattggggagcatcggaaagtgtcatgccttgtggagcttccaaacgtaaaataccactggagggaattagttttaacccggtgagatcaaaacacaaagttgctttatctcctatatagatagtttgaaaatcaagtgaggtgggatttagaataagtggtgcatcttcctggatataatcggaaagtatgccttgttgtttcaattcctgagcgacgagtgcggcataacatgcagcacctgtagcctgtgtatgcgtgccgtctgttggtacgtatatgcattttatggtagtttcttctcccagttgctctgtaaaattcttggtcagtgtggtcatgtctaccaaggggacttgcttctcacgcgccacgtgtttcataactcgtacatagtttaaggttgagtcatcgggggcaatgccaatgtcatgacagcctttaggactgatcgttcccgctttggtgaaataacgtctcacgattggagtgatgaaaaccggattagcacccagtgcttcagtttcgtctacatactgttcaagaaaagtcttgtaagtagtccatggagccgtcccccgtccgtctgctccatcttttccctgttctttttcgtcattatgtgcaaactggatgaatacgtaatctcctggattcagattactttttactttatcccacagtccttcttctgtgaatgaacgtgaacttcttcctccacgggcataattgatgatccgtacatccgaagtaaagaattcctgcagcatttctccccatccgcgtgtacgggtggtattttctacatagtcggccattgtggaatctccgatggtatgtactgttagtttctgggcatggatgtgtgctgtactgataagagttgtagcaagtagtagtattatctttttcatggtatttttagagtttcatatgaatgcctgcaaaaataaatatatgttttgttgggagcaacaggggaaacaaataatgcactaaatgtggcaaatactccactaatttaatgccgttttctcttcttttactgacgtatgggcataaaaaaaggagtaccgctgtactccaacctttgttaaccttaaatctaatactatgaaaaacacagtgcaaagatacgtactttcaggataactgcaaattatccaagaaaaaaagtatgtttaataacacttattagtgaaaatccccgctttctctatttattttaagaaaaggcggggactattttaagaaaagtggtattagactttttctttcagcatatcttccattttcagtaattcgtcacgatattgtgccgcttcaatgaagtcaagtttcttggcagcttcctgcataagctttctggtacgttcgatgctcttttccaattgcgggcgagacatgtattgtacaatcggatcggcggcaatatgagcagagctttcttgttcgatgtaggggcggggagtgatcgtcgctcctttttcgatataactgtcttctgttggagcatttgatgcaaatacattcagattcttccctttcttgatttgttgaggcgtaatgccatgttcttcattatatttcagctgcttttcgcggcgacggttcgtttcatcaattgtcagtcgcatactatcggtgatacggtcggcatacatgatgaccattccgtttacatttcgggcggcacgtccggcagtctgagtcagcgagcggtgagaacgtaggaaaccttccttatctgcatcaagaatggctacaagtgacacttccggtaaatccagcccttcacgcagcaggttgacaccaataaggacatcatagatgccttcacgtaaatcactcataatctttacgcgctccaaggtatctacatcgctgtggatgtagttacacttcacatcgttattcagtaagaattctgttaactcttccgccattctcttagtaagcgttgttaccagcgtgcgttcgttcttctcgatccgtatctggatttcctccatgagatcatctatctggttatggctgggacgtacttcgattataggatctaacaatccggtaggacgaatcacttgttccacaactataccttccgactggataagctcatagtcggcaggtgttgcactcacataaatcacttgttttgccatttccgcaaattcttcgaacttcaacggacgattgtccatggcagccggaagacggaaaccatattccacaaggtttattttacgtgcgcggtcacccccatacatggctcgaatctgcggtacacttacatggctttcatcaatgacaatcagaaagtcttccgggaagaaatccaataaacagtaaggacgactgccagccttacgcccatcgaaatagcgcgaatagttttctatgcctgaacagtgccctaattcgcgtatcatttccatatcataggtaacccgctcctgaaggcgtttcgcttcaaagggacgtccctcattttcaaaccattgcacttgcttgtgcaagtcgtcttcaatctcgtgaatggctcgcagagtggcttccttagtggtcatgaacagattagcgggatatatcttatatgcatcaaagcgggcgatggtaacaccgcttatcggatcgacttcttcgatgctgtctacgtcatctccccagaaaatgatacgcagcagattatcggcatacgccagataaatgtctaccgtatctcctttcacacggaagttaccacgattcaggtcaatgtcattgcgtacataaagactgtccaccaaacgacgtagaaaaacgttccggctgaatgcttttccttgctgtacttctatcacattgttatagaagtcggacggatttcccataccatagatgcaggatacagaagacacgaccactacgtctttccggccagagagtagggaagaagtagcagcaaggcgcagtttgtctatttcatcattgatggcaaggtccttttctatatatgtatcagaagacggaagataagcttccggctgataataatcataataagaaacgtagtattctacggcattattggggaagaaagacttaaattcactgtaaagttgtgcggccaacgttttattatggcttaatattaacgttggtttattgatgttggcaataacattagctatggtgaacgtctttcccgaaccggtgacaccaagtaaagtttgtgccggaactccctgaagtacgccctcagtgagctctgcaatagcttccggctgatcaccggtgggcttataggcggatgttaattcaaatttattcattttctctccttatggtcggcaatattcgggaaaatacttgagataaacaaaatttttttattcctttgcaggaaataagaattaataataaccatcaatgtaatacaacaaagacatgatttggaatgaaagcatcgaatgtatggatcgtgaaagtctccgtaaaatccaaagcattcgcctcaaaaagatcgtggagcatgtttatcacaacactcctttctaccgtaagaaaatgcaggaactggggatcactccggatgatattaatagcatagatgatatcgtaaaacttccttttactaccaaatatgacttgcgcgataattatcctttcggactttgtgccgtacctatgagccagatcgtacgtattcatgcctcgtccggtactacaggtaagcccaccgtagtaggatacacccgcaaggacctttcgtcttgggcagaatgtctttcgcgtgcttttacagcttatggtgcggatagttccgacttttttcatgtagcctacgggtatggcttgtttacaggcgggctgggtgctcatgcaggcgctgaaaatataggtgcttccgtaattccgatgtcaagcggaaacacggaaaagcaaattactttaatgcatgattttggttctacggtactttgttgtacaccttcttatgctctctatctggctgatgccattaaagattccggtttgccccgcgaagaattcaaactgaaaataggggctttcggtgcagaaccctggacagagaatatgcgtaatgagattgaagaaaaactgggcattaaagcctatgacatctatggattgagtgagattgctggtcccggtgtaggttatgagtgtgaatgtcagcatggtactcaccttaacgaagaccattacttccctgaaattatcaatccgaataccttggaaccggctgctcccggtgagacaggcgaacttgtattcacccatctgaccaaagaaggtatgcctctgttgcgttaccgtaccaaggatcttactgccttgcattatgacaaatgtacttgtggacgtacgctggttcgtatggatcgtattcttggccgtagtgacgatatgctcattatccgtggtgtcaatgtattcccgactcagatagagtctgtcatccttgaaatggaggaatttgaaccgcattatcttttgatcgtggatcgtaagaataataccgataccatggaattacaggttgaagtgcgtccggaatactactctgatgaaatcaataaaatgctggcattaaagaaaaaattggccggtcgtcttcaaagtgtcctgggactgggtgtggatgttcgtttggtagaacctcgcagcatcgaacgtagtgtgggtaaagctaaacgtgtgattgataatcggaaactttaataattacgaattaccgattactaattacagcgattttgtaattcataattggtaattcgcgatttgtaattcataattagtaatttgtaattcatttattatggtagcaaaacaactttctattttccttgagaataagtctggtcgtctgacagaagtgactgaagtgcttgcgaaagaaggtgtcaatctttccgctctctgtattgccgagaatgctgattttggtattcttcgtggcattgtgtctgaaccggataaggcatataaagctttaaaagataatcattttgctgtgaatgtgacggatgtggtgggcattaattgtcctaatattccgggctcgttgtcaaaagtcctgcgttttttgtccgatgagggtgttttcattgaatatatgtattcatttgccaatggtgaaacggcgaatgtcattattcgtcccaacgatatggaaaactgtattcgtgtactgactgaaaagaaagtagatttgcttgcggcgagcgatttgtataaattataatgactgttttttcagactgttcattatcccggttcgtcgtgaattgattggcgtttgtcggtcatttcctggtttttgaaaaattaaggttcgtatcattggtttattcggtgcgaacctttatctttgcacattatttgaaaagctaagaatgaagaagaatatcttaataactttgcttgcggcagtgttgctctcctcgtgtggagaatacaataagctgttaaagagcaccgactatgagtataagtatgaggcggcaaagaactacttcgcaaaaggacagtataatcgtgctgcaacattgcttaatgagttaattgctatccttaagggtacggacaaggcagaggaatccctctatatgctgggtatgagctattataatcagaaagactatcagacagccgcccaaacattcgttcaatattttaatgtatatcctcgcggtacgtttaccgaactggcacgtttccatgcaggaaaagcattgtatctggatacccctgaaccccgtcttgaccagtctggtacttatgccgctattcagcaattacaaatgtttatggagtacttcccgcaaagttcaaagaaggaagaagctcaggatatgatatttaagttacaggataaattggtgatgaaagaatacctttcagccaaattgtactataatttgggtaattacctaggaaacaattatcaatcttgtgtaattactgcgcaaaacgctttgaaggactatccttatacaaaccttcgcgaagacctgtctattcttattttgcgtgccaaatatgaaatggccatatatagtgtggaagataagagggcagagcgttatcgtgaaacggtggatgaatattacgctttcaagaacgagtttcctgaaagtaaatatatgaaggaagccgatagaatctttaaagattcagagaagatattgaatgaagataaacagagttaggataatattaatttagatatttatggattacaagaaaactaatgctcccagcagcacggttacccgtgacatgatggagttgtgtgcagataccggtaacgtgtacgaaaccgtatctattataggtaagcgtgcaaatcagatcagtgtggaaatcaaaagtgatctttccaagaagctgtcagaatttgcttcctataatgacaacctggaagaggtattcgaaaatcgggagcagattgaaatttcacgctattatgagaaattgccgaagccgacattgatcgcaacgcaagagtacgttgaaggtaagatctactatcgtaacccggctaaagaaaaagaaaaattacagtaaatgaaattactgcaaaggtgtgcccgagtaaagtttacttaggcacacctttgttgctttaacaaagaaaaagaactatgatacaacgaattcaatctgtctatttattaattgtgacaggcttgctgatagcagctatgtgtttgccggtagggcaatttatagcttcggatggagttactgcatttgtttttaa

SEQ ID NO: 6339 - DNA, 8638 bp, Unknown
  gut microbiota DNA sequence
ccggatgttgcaagttcgtatgacggtattcaacagtattttattgattggatattatgcggcatttttcgtatttatgtttatgttgaaagatgatttggaggcaatgtcttttcaattaggttgggcactgtgtctccccgcagtttctattgttttgaattatttgtctttccgggctatttatcgtgatgaagtaatggtgaaagcagcggatagtttcagattgagaaaataagagaaagcagataaaagagaaacgtcccgggatttcgtacagaagtctcgggacgctttcttttatcttgtattggggaatttcttttttctgtattgagtaatctattcttctgtattagggaatttattttttgagatcaaacagataggttattttcgctactatagtgccgtgtgctgaacgggagaaatagtctttcttggtgcttttgtaaaaatcggacagggcatagtagtatctgccctctactaggaaattaccggctttggtacgtagttccaatccggcaccaccagtaataccataatcaaatttgttttctacattcttatcgtgttgctcaggagtagaggtatagttgttccatgcgtcattctttttcctggtatcactgataaaaaagcctatttgcggacctgcatgaacgaaaaactgcactccacggtctctgccgaatgccagatgtgccagaagcggtatttctacataattcatcttgcgtatatattccagttcggggtgatcttcatcaaattcactccaaccatgttgagaaaagtttagttcgacttgtgcaccacaaatcatgctgaagtatttctcggagatataacgtgctgttaagcctccgttgatacccatcaggcttttttgccggaccgtaggagagaagctgacgctattgatattgataccgccgttgaagcctactgcaaagttctggcgttgttcgccaatctgtgcatgactgggcaaagcccatgcggcaagcaacaaggcagcccctatactattttttatcttcattgtctttggatttaaaacttctgtaatcaatcataatccagttttaccaactcataattcttggtgaaatgtacaaagaatactttcttgttgatgaatccaccccaattgtttacacgttggaatttgaatccggtctggataggtaccagatccatgcgttgcatgttcttttctaattcagaaccataacgcgacagaccttttaggaagaaatagccggtatcgaagcccaacattccgaatttgggatagcgttcgtccatttccttaccataccatctgcgataactctttgtgaaattgatggcggcaggtaacaggttgttggtatagaatgatgaatagaagtaagtatccagttcgaagaatgcttccaagtgatcttttgtataagtttgccattccggataaccgaacaaatgaatattgctttccggattatcgcgaaccaacaaagtcaattggggaagtatctttatcaaagtcatgttgtttcccgaagtgggaatgaatatattttcccggtcggtacgtaatacagttttcagagattctaccgttgcatcctctttcaatgatttcataggaatggaacggtttttcagttcatctttcagacctttgataaattctactttatcttttgtgcccgtgctggcttctataaagattacgttagcatttgggaactgacgtacaaagtgatcgtacacttcagaataaaggtatgattgaggagtattaatctgataaatggatgggttgcggaatacgttgttgtctttggaggtaaatggtactaccaggcggatatcattcttctgtgcaaaatctgccaaaggtttgacttgctgctggtgtaacggaccaaagataatatccatatctttcatttcttttttggaaagaatggggttcagagacgcattctccgggcctgagttgtaagtgtatagatcaatggaaactccactgcgtttcaagctgtctacggccatgaggaatccttcgtagtactctaccatgcgtgccgcttcacttttggaaacatccaggaaaggaaggataagagcggctttgatagtgctgaaacgttctgtttcttttttattttcgctgaataattcactgttgctgggtgctacctgtggttgcgcgggtttctctacttgtgcggtaggataaggaatacataagaaagtaccttttttaatcttatcttcaccttgcaattcagggttggcagctattaattctgcctctgagatgccatattcacgactgatgctgtatacggtttctttccgttttaccttgtgcatatcccggcaacgtgattgtacggggccttggatagtggggatggcagcttctgtaacattttcagtggtgactacatcggcttcgctggcagaaggtatgcgtattacctgtccgatgcggaagttttccgcactcagtccgggattggcatcacaaatggctttggcagatacaccgtacttgacggttagccgatagagcgtttcaccttgtgctatggtgtgaaaggtctctgtctgagtattggcagctgtccgtggaatacggagagtgcgtcctacgaatattttttcatcacttcctggatttaactttacgatgtccgactgtgtgacaccatacatactggatatggaataaaggctttggcctttttcaatggtatgcagaaaatatgactggttctcttgcgcaattgcaccgagactgcatgcgccggcaagcagcaaggagcagaaaatccggttaatcgttctcattcgatatcgttggtttacgtttacaatttcccaaagtagctgcaaaggtaagaattttgcctaaaattaacgaaaggaatgcgttaagaaataatattgtgcattttaaaactgaaaaatcccatgtatccgctgatattcgcttggaaaccgttatttttgcaggtattatgcgatgcggattgttttcatatatcggttgtgcagcaatgttgctgcttggatatttaccggtgtgggctgacgggggaaagacagaactgttggatatgtctcccgtggcaatcttgctttctgaaaacggagcaattcctgaagagaaagttaccatttcgccagatgatacatataccggtgctgctcctcttgaattccgattcgtgtggagagacgaagattccggaggagaatcggacgaaacggtaaatctgcgttatgagtggaatttttctcgcgacgctgctttcaacgatatctttctgacacgttttgatgctgaaactatttatagttttcaggagtcaggtatgttttatgttcgtctgattataacggatattgagacggaagaaacgaatatttccggtacttttatgattcgtattaccgaatcggaacttaaagtgccgaatgctttttcgcctaatggcgacggagtgaatgatgtgtttcgtgtaaagtacaagtcgctggtccgcttcaatgcgtatattttcaatcgttggggacaagaactttaccgctggggattacagaatattgatgcaggatgggacggtactgcgcatggaaagaatgttcctgaaggcgtttattttatagtggtagaagcggagggagcagatggagttaattacaagattaaaagtgatattaatatattaagataaatgacagaagaaacagaatacatcaatgtatatggtgcgcgcgtgcacaatctaaaaaatatcgatgcggaaattccccgtaacagtcttaccgttattacgggactgagcggaagcggtaagtcgtccttggcattcgatacgatttttgccgaaggacagcgtcggtatatcgaaaccttttctgcgtatgcccgtaatttcctgggaaatctggagcgtcccgatgtcgataagattacgggattgagtccggttatttctattgaacaaaaaacgacgaataagaatccccgttctacagtcggcacaacaacggaaatttatgattatttacgtttgctttatgcacgtgccggtatcgcttattcttatctttcgggtgaaagaatggtaaaatacactgaagagcaaattcttgatttgatcctgaatgattataaaggcaagaaaatttatattctggctccattagtccgtactcgtaagggacattataaagaactgttcgaacaggtgcgtaagaaagggtatctctatgttcgtgtagacggtgaaatcagggaggcattgcccggcatgaagctggatcgttataagaaccatgatatcgaggtagttatcgataaactgattgtgacggataaagatgatgttcgtctgaaaaatagtgtggctaccgcgatgcagcaaggtgacggtttgttaatgatacttgatttacagtccgaaaatgtgcgccattatagcaagcggttgatgtgtcccgttacaggcttgtcttaccgtgagccggcaccccacaatttttcattcaactctccgcaaggtgcttgccctaaatgtaagggattgggagttgtgaatcagattgatgtggaaaaagtgattccggatcgggaactttctatatacgaaggagctgtcattccattgggtaagtacaagaatagcatgattttctggcagattgccgctttattggaaaaatatgaagctaccttgaagactcctgttaaggagttgccggatgaagccattgatgaaattctctacggttcggatgagcgtattaagattaaaagctctcttatcggcacttcctccgattactttgtaacgtttgagggagtagtgaagtatattcagatgttacaggaaaaggatgcttccgccactgcgcaaaagtgggcggaacaatttgcaaaaactactgtatgccctgaatgtaaaggagcgagattgaataaagaagcccttcatttccgtatccatgataagaatatctatgaactgtcttgtatggatatcaatgagctttacgactggctgatgaatgtcgatcagtatctggataataaacagaaacaaattgctgtcgagatattgaaagaaatccgcacccgtttgaaatttctgttggatgtgggactggattaccttgctcttgaccgtggttctgtaaccctttccggcggtgagagccagcgtatccgtttggctactcaaatcggttcgcaattggtgaatgtactttatattcttgatgagccgagtattggcttgcatcagcgggataatcagcggctaattcattctctgaaagagctgagggatatcggtaactccgtcattgttgtggagcatgataaggatatgatgatggctgccgattatgtgattgatatgggtccgaaagccggacgcttgggtggtgaggttgtttttgcaggaactccgaaggaaatgttagagacacatacgctgacatcacaatatctcaatggtgaacgtgagatagaaataccccaaaaacgtcgtgaaggtaatgggcatagcctttggttgcgtggtgcacgggggaataacctgaaaggggtggatgtggaatttcctcttggtaagttgatctgtgtcaccggtgtatccggtagcggaaaatctacgcttatcaatgaaacattgcaacctattctttcgcagaagttctatcgctcgcttcaggatcctctggaatacgatagcatcgaaggattggaaaacatcgataaggtggtaaatgtggatcagtctccgttgggacgtacaccgcgttctaatccggccacttatacgggagttttttctgatattcgtaatttgtttgtaggattaccggaagccaaaatacgcggttataagccgggacgtttctcctttaatgtgagtggcggacgttgtgaagcatgccagggaaatggttacaaaacaattgaaatgaactttctgcctgatgtatatgtaccctgtgaagtctgtcatggcaaacgctataatcgtgagacattggaagtgcgcttcaagggaaaatctattgctgatgtactggatatgaccattaaccgtgcagtggagttctttgaaaatgtgccgcagattctgaataagattaaggtgatacaggaagtcggtctgggatatataaagttggggcaatcttccaccacactttccggtggtgaaagccaacgtgtgaaattggctacggaactttccaagcgagatacgggaaagaccctttatatccttgatgagcctactaccggacttcacttcgaggacattcgtgtactgatgaatgtacttaataaactggtggacaaaggtaacacagtgattgtcatcgagcacaatctggatgttatcaagatggctgattatatcatcgatatgggtcctgacggtggtaagggtggggggcaactcctcagctgcggcacaccggaagaagtggcgaaaagtaagaagggatatactcctaaattcctgaaagaagaattaaaaggataaattatgaagatcaataaaacaaatgcggcaaggcttttggacaaggccaaaattgcatacgaactgattccctatgaagtggatgaaaatgatttgagtgctattcatgtggctgatagcttgggggagaatatcgagcaagtattcaaaacccttgtactgcatggtgacaagaatggtcattttgtttgcgtcattcctggcgaacatgaagtggacctgaagctggctgctaaggcttcaggtaataagaagtgtgatcttattccgatgaaagaattacttcctttgacgggatatattcgtgggggatgtactcctatcggcatgaagaaaccttttcctacatatattcatgaatcttgtctcaattatccttatatctacataagtgcaggtcagcgtggcctgcagcttaaacttgatccaaatgatttaattaaggaggttcatgctgaagtttgcatcctttttcatgactaatttcacttttttacaggttatttcagcaaaatgtatatatttgcatttaataaacgaaaatcaatctaattactaatttaaaaacttatatctatgttcaacaaacatcctaaaggtctggtcgccgcagcactcgccaatatgggcgaacgtttcggattttacattatgatggcagtccttactctgtttatctcagcgaaattcggtttgtccgaaactgtgaccggatatatttattctgctttttatgcatcaatttatatattggcattggcaggcggtctgattgcggataaaactaaaaactttaaaggtactattttggcaggcttggtcttaatggctgttggttatttgataatagccatacccactcctacgcctgttcccagtatggcactttatttaaccttaacctgcttcggacttttagttattgctttcggtaatggtttattcaaaggaaaccttcaggcattggtagggcagatgtacgataatcctgtatattctaatttgcgtgatgctggtttccagattttctatatgttcattaatatcggtggcttttttgctcctttcattgctattggcgtaagaaactggtggttgaaagtgaataactttgattacgatgcaacgttacctgaactttgtcatcaatatataaatcacattgattcaggagctgagatgccggctcaggctatggaaaatttgacaactctttctaatagtgtgattctggatggacaagctgtaacagatcttcatgcttttgcaaacagttacctggatgttttcaatcgtggtttccaatatgcatttatggctgctattgttgcgatgttgatttctttggtgatctatattattaataagaatcgtttcccagacccagcacagaaagctgtagcagctaagggtaataatcaaactgttagcaaagaggaaataacaatgagtgcaactgaaatcaaacagcgcatttatgctttgtttgcagtgtttggagttgtaatcttcttctggctgtctttccatcagaatggttattcgctgacttattttgcaagagactatgttgatttgagtgttattaatattgatttgggctttacacaaataaaaggtgctgagatattccagagtgttaatccgttctttgtagtcttcctgacgccctttattatgtggttattcggctcattgaagaaaaaaggcaaagaaccttctactcctatgaagattgctattggtatggggatcgctgcattagcttatgtgttcctgacagtattttcattcactttgccgactaaagaagtattaggtacaatgtctgctgctgaagtaagtgccattcgtgtcactccttgggttatggtaggtttgtattttatcttgacggttgccgaattgtttatttctccactgggattatcattcgtgtctaaggtagctccaccgcatttgcaaggcttaatgcagggttgttggttggctgcaacagctgtcggtaattcattgctgtttattggtggtattctgtatactactgttccaatgtgggcttgctg

SEQ ID NO: 6340 - DNA, 77241 bp, Unknown
  gut microbiota DNA sequence
caaaagaaaagataacaggactataaattatagaaaaaggttgtgccaacgttttgacacaacctcataagaatctccagattcatctacaagagaaacctgttagggaataaaggagaaagatatgaaaccatatttaataatggaattattaagaatggaaatattggaagactcgattatcaatgatcccaaatggataggatggaattagatgcaatttaagttcaaaaatccagtatggtaaatgcactaaacgaagagataattctatttcaggtcgcactcgagagaaatattatagatatctcagctattatctcttgggctgatgagtacattcttaataataaaataaggagtcagttcccatactctcattatatagaaagctgaatgatagatgcaaaacttgatatgttcctttctttttcgcctaaagctttaatgttaatatcattatgctataagcaaaacttcgttttccggttgggggctgtccatcccgcagttgcaggctgaagagcccccaactggaaagcatgcagcctgcaactgtgggacgaagtttaactatgggtaaaagaacaaaaacaataaagcaaagcatgattttcatacgaccttcttcccatccttcttgttgctcctaacctacataattcatacgtaggagttaagaagtctttttgaggaataacacaaagatacactctattttcttctaaaaggaaggcatttgcagagatttgcgtaagacatacagaaaaggcccttagagtctggttactaactgattacaattaaaagaacgtcttaagcacctattttgggggtgtaggataaaatttacctacaccattctacatcattagctacatcatctattcatttgataatcagacaaaaaatatcaccggtgtaggatgtaggaaatagaggaatctttttctaatagaaaaaagcgtttaaaaagaataggagctattggctctaactcctactatgaataatgtagactaatacagaaatccaaacagccaaagaggaatcatagatattttcaattcttgtgtccagttattatatggacagcaatgcaaaatatctgctattttcatgcaaaagtaattatcaagttaggaacaaaataagaaatgtttttgcaagaaaagtgttctttgcaaaagacgtttcttaagaaaaaacgttttttacaaagaacaatatcgcttcccctacacactcctgaaaacaaagaatgggtgtcactcttatccatcgagtgacacccattctctttatatagaaataaattttattcttcttgtcctgcaaattccatcagatacgccttaatgaaaccatctatcttaccatccatcactccattgacatccgaagtctggaagttagtacggtggtcttttacacggcgatcatcgaatacatagcttcgtatctgcgaaccccattcgatcttcttcttcccggcttccaccttggcttgttcggccatgcggtgctgaagttccttatcatacagaatggaacgtaactggcgcattgcattctcgcgattcttgggttggtcgcgagtttccgtattttcaatcaggatttcttcttcctcgcccgtatacgggtccttgaactgataacgcagacgaactccggattctaccttgttcacattctgaccaccggcaccactggaacggaaagtatcccatgagatattggcaacattgatgttcacctcaatagtatcatcaaccagcggagttacaaaaacagaagcaaaagaagtcatacgcttgccttgcgcattgtaaggagatacacgcaccagacgatgtacaccgttctcgcctttcagatatccataagcataatcacctgaaatctcgatagtgcaggttttaataccggcttcatcaccttcctgcaagttagaaatgacagccttgtagccattggtttcagcataacgcaaatacatacgcatcagcatacttgcccagtcctggctttccgtaccacccgcaccggagttgattttcaacacacagtccatctggtcagcttcatcacgaagcatatttttcagttcaagctcatcaatggcaacggaagctttggcataagcttcatctatctcttcctcggttacaagttcgtccttatagaaatcaaaagccaattgcaattcatccgataatgtctttatttcattataaccggctatccactgttgcaaacctttcactttcttcatttgtgcctcagccgtcttctggtcatcccaaaagcccggagcctgcgtgcgcaactgttcttcttctacctggatcttctttccttcgatgtccagatagcggtagagtgcctcggtgcgctctttaatgcttttcagttgttctatggtaatcataatctatgaaaataaaccttcttatttaaaatatttactttttgagtgcaaaggtatgaaaaaaacgcatatttttgcagttatcaatctaataagtcagcttatgaacaaactattccgacaaattggtttaacgtttatcctactggtagcgataagcttaggaagttgtacttcgaagtacagctacgaaacagtacccaatgatccgctgaaagcgcgtatctacactctggacaacggtttgaaagtctacatgactgtaaacaaggaaactccgcgcatacaaacgtacattgcagtacgtgtaggtggtaaaaacgaccccgcagaaacgaccggattggctcactatttcgagcacctgatgtttaaaggtaccacaaacttcggtactcagaactatgagattgaaaggcctttgctggaccagatcgaagaacaattcgaagtttatcgcaagacaacagacagccttgaacgtaaagctatttatgcaaaaattgacagcatctcctacgaggcttccaaatatgccatccccaacgaatatgacaaactcatggctgccatcggtgccaacggaacaaatgcctacaccagtttcgacgttacttgctacacggaagatatccccagcaatcagattgacaactgggcaaaaattcaggcagaacgttttgaaaattgcgtgatccgcggtttccatactgagttggaaacggtttacgaagaaaaaaatatgtcgctgacccgcgacccacgcaaagtttacgaagcagtactttcttctcttttcccacaccatccttatggaacacaaaccgtacttggtactcaggaagacctgaagaatccttcaatcaccaacatcaaagaatattataagaaatggtatgtgcccaacaacatggctatctgtctttccggtgattttgatcccgatcagatgattgcaaccattgacaaatattttggtggtttgaaaccaaacactgatctgccgaaactggatctgccgaaagaaaccccgattacagcacctgttgtacgtgaagtaatcggcccggatgctgaaagcgttgcccttgcatggcgcttccccggagcggccgacaaagatgtggaaacgttacaagtggtttcccagatactttataacggacaagccggcctgttcgaccttgaccttacacaacaacagaagacgttaagttcatattgctatcctctgaccatgagcgattacagcgcactgttgatgcagggacgccctaaacaaggacagactctggacgaagtaaaagacctcatgctgggtgaactgaagaaactccgcgacggcgacttcgacgaaaagatgctggaagccaatatcaacaacttcaaactgtatcagatgcagcagttggaaaacaatgatgcgcgtgccgacatgtttgtacagtcattcgtaaacggtagtgactgggcagacgaagttaccgccctcaaccgtatgtccaaactgaccaagaacgatatcgtagcctttgccaataaatatctgaaagatgataactatgccgttatctacaaaagacaaggtaaagacccgaatgaaaagaagatgccgaaacccgaaatcactcctatcgtgatgaatcgcgacaccgccagtaccttcctgaaagaaatacaggcaagcgtagtgactcctatcgaaccggtattcctggactattccaaagatcttacccaactgaaagcaaaatcggatattcctgtactctacaaacagaatacaacgaatgatattttccagttgatttacctctttgatatgggtaacaacaatgacaaggcactcggtaccgctgcccaatatctggaatacctcggtactgccgacatgactccggaagaggttaagagcgaattctatcgtcttgcgtgctcattctttgtatctccgggtagcaaacgtacttatgttgtactctccggcctcaacgaaaatatgcctgctgccatggctctcttcgaaaaactgttggcaaatgcccaggtaaataaagaggcttatgcaaatatggctaacgatattctgaaatcccgcaaagacgctaagctgaatcagatgcaaaacttctcgcgcctggtgtcttatgctacttatggtccgaaatctccggcaaccaatctgctgaccgaagctgaactgatctctatggatccgcaacagcttgtggaccgtatcaaacagttgagcagcttcaagcaccgtattctttactatgggccaagcaatcaggatgacctgcttgccatcattaataaagagcatcaggcaccggaggctttgaaagaaattcctgaaggaaataactttgaagcactattgacacccgaaacgaagattttcattgctccgtatgatgccaaacaaatctatatgtcgcaaatctccaacaaaggagagaaatttgatcctgctgctgaatccggtcgtcaactatacaacgaatacttcggtggcggcatgaattccatcgtattccaggaaatgcgcgaaagccgcggtttggcttactcggcatgggccggtatgttgaagccaagctatttgacagatccttatatgctacgcacacagattgctacgcagaatgacaagatgatagacgccatcaatacattcaatgacatcatcaacaatatgcctgaatcggaagctgccttcaaacttgccaaagacggcatgattgcccgtatgcgtaccgaccgtaccatcaagatggatgttatctgggattatatcagcgctcaatatctgggacagaacgtagatagtcgtatcaagctgtataacgatgtgcagaacatgacgttacaggatgttatcgactaccagaataaatggatcaagggacgcacctatacatactgtatccttggtgacaaaaaagagctggatataaatgctttgaaaaaagtaggtccggtaattgaactgaaacaggaagatatcttcggatattaatatatctgagcagtaaaacagggaagggttgcattgtcatgtaaccctttctttttttataatttctaccggttctatttataaatactctttattacacaaaaagtccaccctccccgcactgtgattacgtacatttgccccgtattctaatttgtatcacatatctaaaagagtataagacagaccatgaaacgtttattcatctttattatgggagtaatgatggctgtggtagccacgtcccgcacgttcgacatgaaacaattgggggctgatgccaaaggcatcaagccatgtacgaaactgattaaccagactattgaaaaagcagcttcggaaggaggtggaaccatctatttccctgccgggacttatctgactgctactatccacatgaaaagtaatattacattgcatctggaatcaggtgccattgtgcgcttctcagacaggttcgaggattatctgccttttgtaaccgcacgttgggaaggaaccgttatgcaaaccttatccccactgatttacgctcattcggcagataatctgaccattaccggacgcggaacgctggatgggaacggactgaaatggtggttatgggaatttgagacacgtaaggtgataaaagagaacggtggcaagctaccttctctggataagttacagcaaatgtgggtggatgccaataaggacctggaaatatccgattactataagccttctctggaacgtaaaatgttccgtccgccttttattcagttctacgaatgtacgaatatccttattgaaaatgtgaagatcatcaactctcctttctggacagtcaatccggccttctgtgataacgttacaatacatggagtaaccatcaataacccgtcaagcaaccctaaagggccgaatacggacggtatcaatccgagttcctgccggaatgtacgtatctccgactgttttatcagtgttggagacgattgtattaccatcaagtccggacgtgatgccgacgggcgtaaatatgggaaagcatgcgaaaacatcacaatcaccaattgtatcatgctttccggtcacggtggagtggtcatcggcagcgaaatgtcgggcggtgtaaaaaggatagctatatccaattgtgtgtttgatggaacgaatgccggtatccggttaaaagcatcccgcggacgcggtggtgtagtagaagatatacgggtagacaatatcgtaatgaagaatatacaaggagatgcctttattttcgatttattttatgaccgtttatcgaaagtagaaccggtaagcgaacgtactcctattttccggaatatccatttaagtaatgttacgggaaatgatatcaagcggataggctatataaaaggtattgaggaaatgcctatatcggaactgtctttctccaacatgaacatagtagccggaaaaggatttcaagcagaaacagccaccgatatccgttttaacaacgtaagtttcaccgtagaagaaggaccttcactcaacatccgacaatgcaaggatatattcctgaatgacgtgcggacaaagcaaccgatagccggtcagccggtagtggatttagaagcaatagaaaacctgtcaatcattcattgtgattccacacaaattgtcaggaaataatagaagaaaaacaaatagaccactcaaaaaaaaatctataatatggcacaccgtttcttaaaactctcattagtctgtatggcaatcatagcaagtacagacttaaaagcccagcaagcgccggtcttatggtacgacagcccggctgaatattgggaagaagctctccctttaggtaatggaagactgggagcaatggtatatggaaatccggtaaatgaagaaatccaattgaacgaagaaacgatttctgccggtgctccttacaagaactacaatccggaaactaaaagctatctgtctgaaataagacagttgatctttgaaggaaaatatcctgaagcccagacattggcgggtgagaggcttctctcgaagaatggttttggcatgccttatcaaacagcaggcagtttacggttaaggtttcaggatcaggaaggttatacaaacttccgccgggagctggatttggaaaaagccgtcgcatcaaccacttatacagtggatggcgtcgactacaaacgtgaagtattcacttcatttgcagatcaattagtcatcatccggctgaccgcttcacaaccggggaaactgacattcaccactgctctaacatgcccgcaagatgtcgatgtcacaacttccggcaaagacgccatgactatggagggagtgactaaaggaaatgagtttgtaaaaggggcagtccgcttccgtacagatttaaagctcaacgtacagggagggaaaacctctgcaaatgattctaccctgatagtaactcgtgcaaacagtgccacaatttacttggcgatatccaccaatttcatcaattacaaagacatatccggcgatcctgtcaaacgcaacaaagtatacttaaagaatgctgggaagaattataccaaagcacttcaggctcacataagtgaatatcagaaatattataatcgcgtatcgttgaatttaggccgtaccgcccaggctgacaagccaaccgatatacgcgtcaaagagtttgccacagccaatgatcctcacctggtagccctatacttccagtttggacgttatcttctaatctccagttcacagccgggagggcagccggccaatctgcaaggcatttggaatcagaagctaaatccggcatggaaatgccgttatactacgaatatcaacgccgaaatgaactactggccggctgaagtaactaatctgcccgaaatgcacgaacctttcctgcaaatgataaaggaactctatgagaatggtcaggaagctgctcgcgaaatgtatggttgccgtggatggatgttgcatcataacaccgatctgtggcgcatgaacggggcggtagacaaagcatattgcggtccctggcccacttgcaacgcttggttatgccatcatttatgggatcgttatctgtattcgggagataaagattttctggcccaggcatacccgatcatgaaaagtgcttccgaattctttgtcgatttccttgtcaaagaccccaacacaggttatatggtagtcaccccaagtaattcaccagagaattcacctccacaatggagaacaaaagccaatctctttgcaggcatcaccatggacaatcagctagtatttgatctattcacaaatacagaaagagccgcacggctattagagaaggatgagctattctgcgatacgatcctctcactcagaaaacaattgcctcctatgcaagtagggcaatacggacaattgcaggagtggtttgaggactgggataaccccaaagatcatcatcgccacatttctcacttatggggattctttccgggattccagatatctccatactcctcacccgtactctttgaggctgcacgcaacaccctaatccaacgtggtgatccttctaccggttggtctatgggatggaaggtttgtttctgggcaagatgtttggatgggaatcatgcattcaaacttatcactgaccaactcaatctggtctcccccgaaatccagaaaggacaaggaggaggaacctatcctaatcttttcgatgcacatcctcctttccaaatagacggaaacttcggttgtacagccggtattgccgaaatgttaatgcaaagccatgatgaagccatacacttgctacctgctttgccagatgtatggaaggacggtgaaataaagggacttcgggcacgcggaggctttgaaatcatttcattgaagtggaaaaacgggcagatagaatctgctgtgatcaaatcgactctcggaggcaatcttcatctacgtgtacatcaggagttggctatggatggaaaaagtttatctgttactgacaacggtaataccaatcctttctttgccaagcagcccataagccgccccttgattagtgagaaagctcctttgaaaggtattgagctaaagaaatcatacgtttatgagatcgctacccaagcaggagaaacttatacttttacgaatgtccggtaacaggcaaccggacattctttgtcaagagcatatttacagaagattaacggacgggaggcatagacctcccgttttactttcggaacagaccgtctgtttgcctcaaacacatgatcagtatgcctcaaacgtatcgtctgtttacctcagatgtatcgtccgtttcgctggggtaaatcagtgaaacgccacacctcagcaagtgaaacggctgggcttaaaacggttgaagtgtggcatttaggttgttgaagcgtggcatttaagctgctaagctgtggcattggggaagtaaacatgtggcatttcaaatgacaagccatagggataaaaaaagaacggagaagcaatgcttctccgttcgtgctaatttaaaattgaatattaaatagatttacgaatacaaatatacgacatcagaaaggcgatgtcaagtatattgggatttttctcactttccaacaattattttatagcaatcgttgttcgctgcaaatcttcttctttagagcttcctcccaccataatatcataattacccggacaaactcttactgtattggattgatcgtcccaccactccaattctttatctttcaggtcaaactccacattgacggtctttcctgccggaatagatacacgcttgaaagcacgcaaggttttgatgggtccttctgcatctccttgttttctaagataaacctgcaccacttcttctccgttacgcttgcccgtatttgtaacaggtacagtaagtttcaaagactgtccggctgtaagttcattcttgtcaagtacggttttaccatagccaaaggtggtataactaagaccgtaaccgaatgggaacaaaggcacatcctgcatatatctgtaagttcttccggtcatgttataatcttcaaagtcaggcaactgagacacattgcgatagaaagtaaccggtaatttccccgccgggttataatcaccgaacaatacctcggcaacagccttaccaccttgctgaccgggataccatgcctgcaagatagcttcgcacttctgagtctcaggttccaaaccgataggcgatcctgaacagttaaccagaataatctttttacctgcacgatgcagagcatcaattagttcacgctgaacggcaggtaactcaatatccgtacgatctcctttcttgaaaccgggaagatttactcccatctcctctccttcaaggctgggagatataccgctcgcaaaaataactatatctgcatccttcacacgttcaacagatttccttatatccacatctttcttaaatccaagatcaaagttcaactgtgcatcacttctcagatactcaaaatcaagttccagatcatacgatttaccagcctgtaccttcatcgcatgagtagatttccttgcaccatgcttgtttgagaaacttttcacttcttctccgttcacacgaagtcttccgctcccatagcaataaacctcaagaacaatttctcctgattctttaggaataaatgcactgttataggttgcggagaagtccgtcaaattcactcccggagcaaacactgtagcccccgaagtacaaaagcggaaaggagtggtgacttgtgttgtggtcaccggttcgccttcacgcttcaggttattccagtaacgagccgtgaacccgggacctttgtcagacttacactggctgaatgcactctgaatcagagttctttccacccatgggcagccttgctcatagatcagtttatcatcagtgccaagcaaattccgcactccatcaagaatagtgacggtgtgcgccggcattccgttataatttccccattgcatcactgagtcattcgcattcggccccataacggctaccgtcagtccgccacgtttcaacggcagaaagttatccttattcatcaacaatgtcatggattcacgggccatattcaatgccagagagtcatgagcagcagaagctactacggagaaaggtatcttgatccaggatactttttccggttcatccatttcccccaatgcaaaacgggctttcatcagtcgcttgacagacgtgtctacggtctcttctgaaattaatccttttttcacgctctctatcaaagtcttataactggaaccacactccaagtctgttccactgatcaccgccgcggcagaggctgactctgcatcgggatgggtgtgatgaccacggtcgttgtagaagtcagctattgcaccgcaatcagatactactataccgttgaatccccattctccacgcaatatctgcatcagcaggcgatcacttccacagcagggatcaccttcaaaacggttgtaagcgcacatcacttcttccacttttccttctttcaccaatgcttcgaagggtggcagataagtttcatacaaatcacgtggctttatattctccgcattaaaagagtgacgattccactccggtcccgaatgtacggcaaaatgcttggcgcaggcatgcagtttatcatattttccatcggcaggtccttgcaaaccttttaccaccatcacgcccatccgacttgtcagataagggtcttcaccataggtctcaatacccctgccccagcgtggatcacggtagatattcactgtgggagtccacatggtcaaaccctgatagcgttcacggctatcctgagatgcatagtaggtattcttcgcacgtgcctcatccgacacggcattgaacacttcgtacaccatttccgggttaaaggacgctgccatacctatcggctggggaaaaaccgtagccaagcctgcccgggcaacgccatgcagcgcctcattccaccagttatacggtttaatacccaatcgttccacagaacgggaaccatccatcataagatgcgccttctcttccagcgtaagttccttcaccagaagttccgcccgcctttcaggagataaagaagcatccttgtaggatggctctccgcaacttgccaaagcaaggagaggcagtaagtaaaaaagtttttctttcatcatttctattctatatttttacaaaaataatatatcaaaggaaatagtacgacaaaaactgcaagattttaaatccgatggaaatgaaatcctgcagttttctcaaagctctataccaaatacctattattgctgtggcagtccatagccatttgtcacttttcctttggattgactgattgtttcataaggaataggccagtaataacacggaacactctcttccgatgtaatgcccggaagaatattgctcagatatatatcaatattggcagcaagagtgcttccccactctgtcttcacatatccttccgcttctaattctgccgcagtctcactatccggagcaatatattcaaataaccctttgatagcggtattatggttggttccatttacagacaatcctaactcagcaaaatccaatacaccacgccatcccggaaaaagtacaggatcattttcatccgtacagtcataagtcagtttggcacctgcaacctgctttgtccagatgtaagcgggtaagatgttgccattctcaaattcatgataacctttagtcttcagattttcggcaagggttgacatctcattacgtacttccattgctttttgtgagaatttaccactccgaaccagatcgtaactggtatgcccttcaccgaaaagttcaaacttacgttccatcagaatagcttctttcagtgcttcaccggacaaaccggaaatattatgcaaatcatctccaaaagctctttcacgaatctgattaaccaggcctatagcttcagtatctgcatccaatcctgctttcacttccgctaacatcaagatgacatcagctacacgcataatcggtatattgaaacccgcgcccatctgaggaccgacaaagtaaggattttggcggcaaatatcccatttgttcaagcaaatacctccatcaatcttagcacccgccttaaaagtaaatgccaactcattgcctttaccatccagcccggtaaccaccgcactgacatcgcgacgtttatcagcgttatcataaccaccgtaatagaaactcggcaccatacgtataccggcaaataccttattcggggcagtattgttaccaccgttagagccacgaccgaaatcatagcaatacatacggcttgtagcttgattttgtacacaacctatttcaaagatagcttcaggactcatcagaagatccattccgtattgaaaatggcgttggaaaggattgttcgcatagctacgctcatccgtagtaaccagtttggtagttcctgcattggttgaaagagctttctgtaaatagtcttcagctatagtgtaatagttcttgtaatcggaacgacgggcataagcgcatttacgtttagcatccgtgctgagagtttcgaactgtacacttccataaagttcaggcatatcagtacggattgtttgatagcctccggcataaagagccattttgccaatcagtccatcaacaaatgtcctcgtaatacgctcaccgttcaaaccgccttcacctactttatacatatacggttccgctgctttcaatttttcaatcaatgcatcataaatatcaaaacgtgaagtcagcccgtaatcatctacataattattctcatagccatacggtacatcaccacaatgtttaatcaagtcaaagtaacataatgcacgtaatgcttcggcttcacctttcagatgtgtccagtcagaagtcctgcctgctgcgatatcatcctgataagctgttttggcagcaatcaggtcagcggtctttccggcataggaaatcacattgtacagagcattgaagctacctttcatgtgatcacaaggaatctgttcgggaaccagctttgcattgatattattggaagtattattctcggggaaatattcgatatccgaacggtaatggtcgttccaatcgtatgccccattacacgattcacgataaagtgcataagctcttgacaaagtcttcagagtttctgcgggactggaagttacaaactcgtcatctgtattagaaggagaagaagtttccagaaagtcactgcactgtgcaaacaagacgcaacaggctgacgcaaatgccatttttatatacttattcataatttcatcttttatttaaatggttagaagctaagatttacacccagtacgaaggaacgggcacgcggataagtaccccagtccatacctaattgaggataggtctttgtagaagtagacgtacttacctcagcatcaattccggaatatcctgtaattgtaaagacattatagatacttccgtaaacacgcagattactgatacccgccttctgaagcatactcttcggtaaagtataccccaaagtcagtgtattcaaacgcagataagagccgtcttcaatacccaatgtagacacatagccattctcactgtatgccagtggtaacttagcattcgcattggcagcattcagctgttcaggagtggtcaatgcaaccaattcgccattcactacatcatagattttatagcagtcctttactatagagagcttattctcgtaaacggcaccttctttataaccataaagtgctgccaacttatttacattataaatttcattaccatagctccagttaaaatacaaacctaaatcaaagttcttataagtagcattaatattaaaaccaccggtatggacaggtgtcatatcgccgataacgtccacgtcatcatcattgataataccgtcatcgttcaggtctttgaactttgccatacccgggtaggccaactgtcctgcagggcgttcgttcataccattgtgtaaatgatagttagggaatacagcagaagaaacatccgcaactccttcttttagagtatacaccccattttcataagtgaaatcgtcggtagtatagaagccatcagcagtcaagccacgtaccaagcctacagggcgcccttctttcaagacataatctgatttcgggaaagtagatgaagtagcccattccgtaccataaagtccagtgacattatcagccagtttgtccactttaccgcgattgaagttaatattaaaaccagccgttacattccagtccctcgttttcacgagtacaccctgaagagcaatttcaatacctttgttgctggtctggcctacattggcgtaggttgaagtgaaacctgtgatacccggaatagccgttttcatcaacaagtccttggtggtattccaataggcatcaatcgtacctgtcaagcggctattaaagaaaccgaaatcaacaccgatgttacgggtaatcgtagtttcccacttcaggtccttgttcgccatatctgcaccaagtgaataagaaggcaagaaggcaccattcacggctccctggtatctcttgtcactggtagcctcccaattctgtgaccacaaactggaatttataccatcgttacctacctcaccataggaaacacgaagtttaaggttatccagccagtccacatcgttcaggaatgcttcttcagacatacgccatcccaaagcggcagccggaaaatatccccaacggttactgggagcaaatttagatgaaccatccgcacggaacgtaaccgtcagcagatagcgttccataaggttataattcaaacgaccaaagaaagaaaggatacggctcggcgtagaaacacttgaagagaaatcccccactcccttagtactatcgtattgattgatcatggcaaatgcattctctttcgtaaagtttgcagggaaataagttcctgaggctttcagcccgtcaccacccgaatcggaaacttcatgaccggccagtatattcaaacgatgtatcttacctaaagtaaagtcatagctcaaagtatttgtccaacggagtccccagctattctttttctccagattcgcgttacctgcatataggacctcaccggtattatcatccagatagttatttatgatggctcccgtccattccttattctgattccaagtctggctgagagacaggtcagtatgataggttaatcctttcacaattccccagttcagcgaaagaataccacgcaatgactgctgagcattcggtgcatacttatcattgatacggtttaccggattatatctgtcccactgactctgtttggcatagttctcaatcataccttcattcattgcggatagatcacccaaaatatcttctgttgcaattggacggaagcgataagaagacgacaggatagacccgctaccattcgtaacaccttcatcacccatctttttaatattggtataacgggtatcaagactcaaatcaagattcttggcaatcttttggttcactttcaacgaaacattggcacgtctgtagtaagaagcgagtttcataccatcctcatccatgtagttaacaccaaacagtactttggtcttttcagtaccacccgtaacagaaaggtcatgattatgagaaaaagaatctccataaatctttttctggatattatccgtctttacattacgatagctttctataccaccgggattggtagtcgtataacgtcctattccatacagtttctccaatggttccatatagctgttaccaccaaccgaagccgcacttgcccagctatatgccaggtagtcataaggattgagcgcatccatatacttagtcggtgtattgaacttcgcataaccattgtagctgacaacaacacgtccttctttagccccctttgtggtaacaagaattacaccattagcaccacgggcaccataaatagccgttgatgaggcatctttcaaaacgtcaatcgactcaatctgatcgcccggaatatcactcaacgaaccactgactccatcaatcagcaccaacggatcattgctctgtgagatagaaccgccaccacgtacacgaatagaaacagcggcatcgggacgtccatcctgcgttgttacatttacaccagccagcttaccctgcaaagcctgagctgcattggcaacaggcatagctgcaatttgctcacccgaaacagaggctaccgatccggtaagatccttacgttttaccgtctgataaccgattactacaacttcatccagaatctcagcatcttcagccaatgtcacatgaaccggctgccctgcaacaatagatactgtttgcgtctgcattccgataaaacttatttccaattgtttggctgtacccggcacggcaagggagaatttaccatccaggtctgtaattgtaccgatagaagcgtcgcttactactctgatattagcaccaataacaggatcacctctgctatcgagcacaacacctgaaacactacgactctgtgcaagagagataaggcagatcatactcatcaagagagtagcagctgtcctttgaacaagtctttcaaaattcataagtaatgtgtttttaatagttaatgattaaaatgattcactccgcaaaagtagccaacctgtgtcatagcaacggaataaaatcaggtaacaagagtgtactttttcaaaatgggacaaaaaggaggtggactattcgggcgaaatatcgtttttttcggtcaaacaaatcctatacttttcatttattcccttttttctatacatttgttctgcactattcaaaacagtactatgagacgactgattatctacttcttatacttaatgataccgatgttttcatcggcgcagcccatctgccagattactgattttacagcagagaacggactaccccaagatatcgcatcagcagttttacaagatcagaaaggctttatctggatctgtacccgtaacggactcaataagttcgacggatatacattcaagaactacaaatccgcgccacataaagaatatacactatccaacaatcggataacctttatttcagaaaccgcatatggcgatatctggtgccagacgtatgacagcaaggcttatatattcgacacgcatcttgaaatcttctatgatgttctgcaaacagtagataaagatatgcaaagaagaaactttgttcagaaaatatttcccctaaaagaaggcatagcctgggtgacatgcgacaagggttattgttacagaatcgatgaaaagagatataaagaaaaagacggaattacactctatagcacattcaatggttttttaaaaggcgagcacatcttcactatcttccaggattccgataaggatgagtggatattgacagacaaaggtatatccattataggcaacaaaaagatcgacagtgattttcctttccagtttattcaggaatacaacggtacaatttaccttgcttccgcttctgaaaagatagcctattataaccaacaaactgaaagcataaaatttatagagtttccttaccccatcaacaaaataagctctttagacataaccaaccacgggctactcaccatatccactgataatggtgtcatcctgttcaatccggaaaataagacttctcagctaattgatatccgtactcccatgcaatcctccaatgaagctatctccatttatgaagataaagagggagagctatggatattccccactactcccggagtgatacgctttaatccgacaacaggtgaaaagcaatacctctttacacccccaaaagaggtcgtgaattatggcagagagaacaaaaacaccatatttgaagataaacaaggtactttatggctgattccccataatggaaacttctgttattatgataggaaaagtaaagaattgaaagctttttatacagacccggacaatcctcaatcgctatttgccccgcttgttcgctaccattatcaggacagacaaggaaactactggctagccagcgccagaggaataaagaaaatgtctttctatccacaaatttataatctgaaaggaatagacaggggattcgaaatccgtgctttccttttggatagttcacaacgattgtgggtagcttccaaaagcgaatatgtcaggatatgccaccctgatggcagcctggccggttacttgtcttcacagggaaagataggtaaagataaagtatcattcaatgccagtgtttacagcatctgcgaaggaaagaacggaacaatctggataggaaccaaaggaaacggcctattccaactcacaaagaaagccgatggaaattacaacatacaaaattatgtgtatgactctgaagacctatatagtttgagttacaatgacatatttaccatatattccgataatcatgacaacatctgggtaggatgttacggtggtggattaaatctgctacaacaaacacctgagggaaaagtgtattttatcaaccacaggaataagctacaaaactatccgttcagcacctgccataatatccgctatattacaggtacggaaaatggtatcctgttggtaggaaccacctttggtttagttacattctcaaatgactttgcacaaccggaagaaatcaagttctacagaaatatacaaaacaggaacaatccttttagtctgacaggaaatgacattatgcatatatacaaaaatagccataaagacatctatatattgacattcaccggaggagtcaacaaaatcacatccagaaccctacttagcgaaaacattgaatttcagtattacaccgagcaggaagggctaggatccgatatggtcctatccatgatagaagattcccaaaagaatctgtggatagcatcagaaaatgctttatccaaatttaatccggaaacagaggcattcgaaaactatagtacaggatttctcagacaaaagatgaactttagcgaagcgatacccaccataaacgcccggcaacaattgattttcggcacagatatgggctttctggaaattgttccggaacaaatgaagaagagtgattatgtacctcctatcgtctttacagatctgaaagtcaacggaaagaaatcaactgtctccaccgatgatttgaaagagatagccttacatccttcggaacgaaatattaatgtacaattttcagcattagacttcacaagaccggatgacatacgctatgcctatcgtctggaaggtcttgaaaaagaatggaattatagcgataaaaacaaatcagcaagctatatcaatctacccgcaggcgaatatcgtctccaagtgaaatcaacaaacagtgacggagtatgggtaaacaatatccgtacactttccatcaaggtcattcctaccttctgggagactccttgggctttactggcatatcttgcagcattcatccttctcacaggggtaattctgtatatcttctcttacatctatcgactgcgtcaccaagtgaatatggaacagcaattatcaaatatcaaactgaaattctttaccgatatttcacacgagctacgcacaccattgacccttatctccagtccggtcagtgaagttctggaggaccagaccatttctccttccgtgcgggaacacctgaccgttgtacataaaaatacggaacgtatgttgcgtcttgtcaatcagatactcgattttcggaagatacagaataagaagatgaaagtaatggttgaacaaacagaattgattgctttcctgatgaaaattacagaaaatttccgtctgatagctgaagagaaacaaatagacttcacattcaaagctgatcaagaagaagtatatatatggatagacagggacaaagtggaaaaaatagtattcaatctgttatccaatgcattcaaatatactctacctgggaaaaccgtaaagattacagtacagaagtcggatcagcatatccgcatttccattattgatgaaggtatcggtattgctcctgataagataggttctcttttcaaacgctttgagacactaagcaagaacaacaatattctgcaaccttcatcaggcataggtttatcactcgtcaaagaattggtggatatgcatcacggagatatagaggtcaagagccaaccgggaacgggtagcgaatttagtgtaactttacctttggaacgtgaagtgtttgagaaagatgcacaggccgaattaatccttgctgatagttcggacaatacagaatatattaccacaactgtagagaacggcatagctgaatctggaaacagctcggaagaggattttttatccattttaatagtagaagataatcgtgagctgagaagcctgctcagaaatatactatcaaagaaatacactatcctggaagcagcaaacggagaagaaggtttgaaacttgcatcggaagccatacccgatatgataatcagtgatgtaatgatgcctgtcatggatggattggaaatgattaaacatatcaaggaaaacaaagatatctgctatgttccaatcattcttctatcagcaaaagcatcattggatgaccgtatcaccgctttggaacaaggtatcgatgattacattacgaaaccattcagttcttcgtacctcaaagcccgtattgcttctctgtttaccaagcgtaagcagttacaggaaatattcatgaagcagttatcagcaaacaatgaaaccgataattctaaggaatggactccttcggaacccgaagtgatgccgcatgataagttattcatgaaagaagtgatggatttcctggaagagcaaatagataatccggatctggtgatcgacgatttcgccaacaagctactgctaagccggagtattttctaccggaagcttaagtccattgtaggaatgcctccggtagattttatcagggaaattcgtgtaaaaagagccgcccagctgatcagaagtgatgtatacaacttctctcaaatagcttatatgaccggtttcagcgatccgaagtatttcagcagatgcttcaaaaaacacatgggagttactccaagtgagtataaaaactccattaataacgaggagaataatccggatcagtaaaagacaaagttctttatagcaagtccctgactctgtccacggaacaggaaataaattttggacttatctttcactgctccactgacctcaaaggcttgcttctcccattctcccggagtctggttctgatttatcgggcaagtggctatcaacttcccatcgagacttccctcccttatctcaatcactgttccgggagtttccgcctgaagttcgatagttactttttgagggttctgcttaaagcacatattattgaatacgagccagtttccatcccgtactccggaaataaactgcatagggcgttttgctaccggacgtactaatttcattccttcacgatcatcatactgagaaaagtctatctcggtaaatgcatcgtagtgatttcccctgcgattactttctaattcaaaataatcaaaatcggcatagccgccagtagcacctttattcaagttataacaacataaagcatgacggatacccagaaatccccagaagttagaaactccttccggccccaaacggttatattcaagattatccagactataataaaacagtaaagatccttgctttgtcacttcagtgcgcaggtatatcttatcagttttgacaggaagactatcgacaacagtctctccttctcttcctccctgcctcatttcaagccaaaagccatccgccttcttccgtactcccagttggtacatgactctccccattataccatttccagcaaaatccccttcacggagtccggtcaaatctaatgaaaccgttccggtactataaggcccagacactttctgtgtcagagaattacgcgcccattcaaatccctttgcatactgcgcataaatcctaaaatagccgggacgatccgtcaggctccatttatctttctggggtacatgattgaattcccacacatgagccagttttgaagaactgaaatcatccgaatgttggggaaatgtaatctcttgcttggccttgactgccggttttctataagttaccactccttttcccggtttaccttccgggcctaccaccggccaatcctcttcccatttcatcggatacagcatcacacacctacccatataatccctgtcctggaaagtataagcccacgactcgccttcaagtgtctccacatatccgccctgatgtacaccggcatcagcatagttgatatcatcatcaataaggacctttgtttcatacggaccgtaaagattacgggagcggctaatcatctgcaccccattgtatcccaatgccggattaaatatataataccaaccattccttttataagtgtgacatccttcaaaaagatattcatatcccttgggagctgttataatcagggtaccctcatcgttaggatccagtacaccggttccatcatctttcaaacgtgtcaggtatattttcgtctttccatgtgtgacatatttcttaccgtcatcatcaatgaaaaatcccggatcatacaaacgcttgtcaaacttatgcattgaatacggcccttccggtttattactcttaaacattacaaaaccatcatcggcaatattaactcctatataataggtgccatcatgatatttaatggaaggagcccaacacaaacgactatacgcggtctgctcattctccatcctatattgaggacggaaagtgatgctgtcgtaggcatgccctatgatacgccaatttataaggtctttagagtgacagataggaatacccggcatagcgacgaatgaggaactgaccatataaaagtcttcacctacccgtataatgtcagggtcgggataatcggcattaatcaccggattggtataagtaccgtctccattgtcagacgacaaagaagctgtagtttgtacgggaacagtgcacgactgtaccatgagtatgcaacaaagcattaacaacgcggaaaagccatccgctatttttcctgtagtaatagataagttatacatcttacataaatatataaagtgaggatgcaaatatatgcggtacagggccatcaagaggggataaaccggtaatatacgtgcactttttaggcacacggatatataaaaaactcccgattaaaagttctgactcttaaccgggagctttttattttcaatagataggtttattatatctttattcttcgtacatcttatctatcacttccttgtaattctttgcaactataggacgcttcaacttcaaagtattagtcagttcgccacgttccatactgaaaggttcgggcaaaagtgtgaaacgtttcacttgctcatagtgggcaaactgttgctgcaaggtatctatgcgagcacggaacagaccgagaatcttaggatgttgcagcagttcttccatattcttatattcaatgcctttttccttggcataatctttcacaaaaccatagaccggtacaataagggcagacacaaatttacgctggtcggcaataatggcaatctgatcgatataacgatcaatagccagtttcgtttctaaagcttgcggactgacatacttaccattggaagtcttgaacaagtccttgatacgctcagtcagataaagttggtcacccttcagatagccggcatcaccggtatggaaccaaccatctttatcaatagcagcggcagtagcctccgccttcttataatagcctttcgtgatagtctttccacgcagaagtatttcattctcgtcaccgatcttcacttctacatcaggcatcacggtgcctacggaaccaatttcataaccctggttaaggaaacaagaaacagtagcagtcgattcggtcagaccatagccaaccaacatattgatacctaccgaatgaacaaattcacagatttcatcaggtacggcagctccagcagtagggaaaaagttaccgttctcaataccaatcgtctttttcagtaaagcataaaccgtcttttcgtagaatttatatttcagttgattcatcaacggcggagttttacctttacgcagataatcgatgttgtgtatcttacccaccttgatggcatccagcatcatagctttcttcaaccctgtttcctgagcaatcttctcctgcacaccggcatatactttttcccagaagcggggaacactgcacatcaatgtcggacggatttctttaatggtagtctggatatctaccggacggaggttgatgcaaatctgcacacctttatggatacaaagatatgtccatgctttctcgaagacatgtgtcaaaggaaggaagttcatggacacatcttggtcactcatatctaccagacggatatcatggatacggaaggcctctatatagttagaatgatgcaacatcacccccttcggttcaccagttgtaccggatgtataaagaatgttggcaaggtcatcatccgatgcacgggaagtacgttcttccactatatcgttgttcggcaaaccttttcctgtttccaggaattcgtcaaaataaatagaagtcatgtcacgagggtcgcgtactacagcacggtcgaaaatgatcaattgctgtaatgattggcaaaagccaaatacactgaaagctgcatcatactggaattgctcgcctacaaagatataacgtatctgagcatcattgataatgtactgcgcttgtgctggtgaactggtagcatacagaggtatggtcaccgcacgattagcaaatgccccgaaatctacataaagacattccggtttattctgagaaaagattcctatgttttcttcctcctgcactcctaactctacgagtgcattcgcaacttgtcgaactgtctgtgagaattgattccaagtaatgggtatccactgcgacgtttcgtaatccctgtatttcagagccaccttgtcgccatacttctctgcccgtcgatgtacgaggacagataaatgatgataagtcatattattcatatattggtaaatacggcacaaaggtagtggtttcatttgaaactatttctatattgagaattaaatatttagtatatatttccgcaatactagtactatcctactataaaaagaagtgattaccctacatttttgttcgtttttccaaagaaatacaaatatatgtatatatttgcatccgatagtttttaaatatcaatacaataacttaacagacatgaaaaagattctagcattagtcgccatattggcgataggtttagggagtatcaacgcacaagataacctcagatggggtgtcacggcaggtatgaatgtaagcagcctcaacgtaaccggattggacagtcgcgtaggtttccatgcaggcgttaaggctgaattgggactgcctcagtttacggaaggtctttatatggatttcggagcgctactttcgctaaaaggcgccaaagttgaagcaggcagtatggctagtttcaagatcaacccgtactatttggagattccggtacatattggctataaatatgctgtaaatgataatttctctttgtttgccaatgcaggtccttacattgcaatcggtctgttcggcaaagcaaaaattaccgccgacggcagtttggtagatggaggttccaaggtttccgaatcagagaacgtgtttggcgatgacggattcaaacgttttgaccttggattgggactgaaagcaggtatagaaatcagtaagaagtatcagttctccatcggctacgacttcggattcattgaagctgaggaattgatgggctgcaagaatagaaacctaatgatttctttaggacttatgttttaatgatatcaagaataaaaaaaggcgttgaataacgcctttttcaacatactcaatccttatatttacaattacataaaccaaattaaagacttaattacatgaaaaagattttagtaatattcgcattattagcggtaagtttcgcaagtgtaaatgcacaagagaacctcaaatggggagcaactctcggtatgaactccagtaatttttccggtgatgcattcagtagtaaagtaggattccatgccggagtcaaggctgaagtgggattgccacaaattgccgaaggagtatatttggatttaggtgccctattgtcactaaaaggtgcaaaagttaatcttggttcctacgatatcaagtataatccttgctatttagaaattcccgtgcacatgggttataaatatgcagtgaatgaaaatttcgctgttttcggcaatgcaggtccttatgtcgctatcggtctctttggcaaagttaaaacagatggaatcgaatcatcagatccttctgataatgtttttgatgaagatggtggtggcatgaaacgttttgatctcggccttgggctgaagttcggtgtagaattctgcaaaaagattcaggttgctttcggatatgactggggattaatagataacgccgatcacatagataacaagaaccgtaacatgatgatttccttgagctatatgttctaaaaatattaaatgctcttccccccttccgcactctgcccctctctatattaatctgcagcaacagtggaaggggatttttatcctatcgattaagcatatttcagtatttatccgtaagtttgcatcacaataatttaactgattgagatatggcttacgatataccgacaatggtttctgaggcaaccggagttcttaaatctctgattgctatcccttctcttagccgcgatgaagaaaaagcggctgattatctacagaattatatagagttgcaaggcatggcaaccggacgaaaaggcaataacgtatggtgtcttagtccgatgttcgacttaaataagcctaccttgttactgaattcacatattgatacagtgaaagctgtgaacggctggcggaaagatccgtttaccccaaccctggaaagtaatggaaaactatacggattgggtagcaatgatgccggtgcaagcgttgtcagtctgttgcaagtctttttgcaactttgccgcaccacacagaagtataatctcatctatctcgcttcctgcgaagaagaagtttccggaaaaggaggtatcgaatgcgtattgcctgaacttcctccgatacattttgctattgtaggcgaacctaccgagatgcaacctgccactgcggaaaaaggattaatggtactggacgtgaccgcttacggaaaagccggacatgccgcacgcaatgaaggagacaatgccatatataaagtattggaagatatcgcctggttccgcgaccatcattttgaaaaagtatctccattattaggtcctgtaaagatgagtgtaacgcagatcaatgcaggcacgcaacacaatgtaatcccagaccgttgtacgtttgtggtagatattcgcagtaacgaatgttatagtaatcaggaactgtttgccgaaatacaaaaacatatttcttgcgaagctaaagcacgttcgttccgcttaagttcttctcatgtagaagaaagacacccaatagtacagcgtgccgtggcaatggggcgtgttccttttggttctcctaccctctccgaccaggcactgatgtcattcccctctctcaaaatgggaccgggaaaaagcagtcgttcccatacagcagatgagtttattttcattcaggaaatagaagaagcgatagggttatatctgaaactattggacggagctatcttataattcgtcagtttctactttctttcataacacatgaacagcctttcctatttaggctgttccatttaatcatgctctttatcgatttaaaagcgtacggagagccggaattttctttttaagatttcctttttggatatatagtactttttctctaatattgtatcatctttgctttgaattactaatcctaattagaatgatatcacacagatttctttttctcctgttgctgttgttgcccatccataattcggtggcacaagaagagacatttgaaccgttgtttgaaaacattgatatcactaaaggactacctcataatacagttcaaaagatctttcaggattccgaaggctatatgtggtttgcaactaaagatggactatgccggtatgatggctataattttattgtttactgcgagtcattagttaaagaatctatttccaacagtaaggtacgttgcatagctgaagatgctcataaaaatatatgggtaggaaccgacaatggccttaattgtataaatcttctcagccagcatattctttctttcttccctaacgaactttccccactaaaaagcaataagattaatgaactctattttgatccctccacccatttattgtggattgcaacagataaaggaattacatggtatgatacagattccagaaaatttatagctccggaaaaccacagagctttcaatgaggaaaccaataccgtagggaaatatggtgacaaggaaatatatattggtacacataatggattatacatttatgatattcataccaaaaatgtacgacgcatccagttagagcatggaggtggcaatattaacgtactttctgtctggcaagatacagcaggagacacttggattggaaacaatttagctttgttggctaaagtacccaaaggtggaagcgttatctcacttcttccattcggacaggtacgtatgaacgacgatcagaatatctgttgtattatagaacaaaaagagattctgtggttgatcagtaaacggcggggaatcttcttttataataaacagaccgggcaattactcaagacacggaatacctattctctgaatcctctcggaacagatgtgaaagaaaggatcatgcttaccagcggttataaagataataatggaaatatttgggtgggatcatattatatgggactctttctccattcacgttatatgaatcatttcactcacatcccaatcgaacggactggtaaagcctccactggaataatcggatcaatggtacccgatgggcaaggaatatggcttggaagtgatgatcttggaatcacttattacaacccggttacgaggactcaacaatattatgagttatacaacggagagactcctctagtggaatgtaagcctctgttaattcataagggtacgttatgggttggtacagaatctcatggcatccacctttttgatttgaaaacaaaacaactcatcggacattatacagctacttcacaaaccgggcgcattcccggaaatcgagtgaactgtgcattgcaggattccaatggatatatttggattggttttaacggcggtccgggtggcatttgccgtttcaacgaacagaatgaaagctttacgactttctatccatcaaacagttctcataaggtaagagacgtgtattttatctatgaagcttccgataatgagctatggattggtactcgtaataatggtctgttctgctataatatcgcagagaatgttttcacacctattcctgttatgggtagagaagatttgtctgtcagttacatttataaagacaagaaagatcgtatttggataggaacattcggacaaggactggtctgtatggacagttcgggtgaagtgaagcaggtattcaatacaaatagcgatcacattggtaacaacatttgcggtatactggaggataatgacggtcgtatctggatcagctcattttatgaaatagcttattataatgaagaagaccatacatttataagatatgatgcttacaatggatttccattgttgcacgtaaagtctatgtcttgttttgtttcagaacgcaatttgctatactttgggggaagtaacggtttagttgaagtcgttccaaaagatgtgatgcatgttaataagaaggctcctaaggttgttctgacagattttctagttcataatcagtcaatagatactctatcccgtaaaaatatacgtacccaccacagggttgaacttaagtataatcaagataatcttacttttgctttcgctgcattaagctatatctatccggacaagaacctgtatcgttaccgattacaaggtatcgataaggaatggaatttagccggtacacaaagacaggtgacttatagtaacctgggagcaggtgaatatcagttccaagtctgtgcttgcaacagtaatggaacctggtctgaaccgtccaatctgctttctgtcattattaaacctgcaccatggcgtacatggtgggcttatctggcatatacgattgtaatacttgcattgttggccttgttcttttactacctgcgcattaagatgcagttggaacacgacttagagatcaagaatatagaaaagaagaatttagataagatgcataaattcagacttgatctttttacaaacttttcccatgagatacgtactccactgacactgatttccggttcattgactgacctattggcatccaacactccttcacagatggaaaaaggagtattacagggagttcaacgcaatgtcatgaaaattatgaagttagtaaatcagttgatggattttcgcaagcatgatgaagggcgtatggaattattagcatccaaacaacacctgattccttttatcaaggaggtgatacttgcttttagcgaattgtccagaatccaaaatcatccattaaagatacatttacctgaaacagagctaatagcctggtataatcctcagctactggagaaagtcttttataatgtcctgatgaatgctttcaagtattccaatgaagaaagtgtcatctccctaaacgttgatgtgataactttgaataagtcaccctatcgggaacgggtagatgaacgggtaaaggaagctatacttatttctgtattcaatgaaggagatattattccggaagataaacttgaagaagttttcgaacctttttatcggcttaaaaacacaaagagccagcagggaacaggaatcggtctaagtttcaatcgtatgatcatgcgcctgcatcatagtgatatttgggttgaaaatatcgacgacacaggtgttgtattcaaattcctgattccaataggtaaagaccatttgcgggaagatgagttatgtgatgaaacagaacaggaacatcgtttgattctgactccttcagtcgctcccaaaacagagcctgctatggaacgcccaaaggtggaaaaagagcttagaactttgttagttgtagaagataacaatgagatcagacagtatctgaaaagtaagcttgccactatatacaatgtattcgattgtgataatggccatgaagcattagaaatcatacaccggagagagatcgacttggtcatcagtgatgtaatgatgccggtcatggacggaatagaactctgtaaagctataaaaagtaatattgagattaatcatattccagtaatcttactgacagcacatgtatcggacacacacgtaaaagacggattgtcttcgggtgccaatgattatgtattcaaaccgtttaattttgatttattattggcgcgtattcaaaacttattagataacaatgaacggttacgacaatctttccagaaaagaatcagtccgaaagatatgaacgtagaggtaactgactatgatgagcaatttttgcagaaatgctatgactttctgcgaaagaaccttactaattcagaactaaccattgaggatttcgggaaagagttaggagtaagccgtgtacatctctatcgtaagataaagtatcttacgaatttatctcccagccgtttcattctaaatgtaagacttaaagtggcagctgatttgcttcgtcaggaaggtgtttctgtttctgatgtctgctatcaggtcggctttaataacctttcttattttactcgcacttttaaggaaagctatggtgtttcaccatccgactaccagcataaataattgaataaatacagaaatatccgattattaagcgattatatcatgttcttgtatcatttgtgttaatatccgtaacatagcttcaaacaaaaaagtagttctgcgcatacctttgtcagcgaacaatcggagttaaatccggctattctgaaactttaaatgatacgatatgcaaaagacactttttagtattctggttttattagtctgtataagtcatccgtcaaaggctacgtcttttatatataatgtaacagactatggagtgaaagccaattcaggaagatccgagacagcttccttacagaaaattattgacttatgttccacaaatggaggaggtacggtatgtatacctacaggtacttatatcagtggaacattatttctgaaaaacaatgtaatgctctttttagatcgtggagccgtactgagaggaagttcggacctaaatgagtatcctgaacttagaactcatcgtaagggacttattcatgcagaaaatgtccataatacaggtatttgtgggagtggagtgatcgatgcgaatggcaatgatactgtttttcatggaggtgccaaatccccagaccgtatttatgccgctaattttgaaggatgttcacaaatagatattcgtaatgtaagcctgatcaatgcctcttattggactttgcgtatcagcgattgtgaccatgtacaaataagagggattacaattcgttctaccagctattttaataatgatggaatagatctcgatgggcgaaatattaccgtatccgattgtataatcgattgtattgatgatgcgatatgcttgaagagctactacaaagaacgcccttgtgaaaatattgccatttccaattgtattgtttccagtaattgtaatgctataaaattgggaacagcttccagaggtggattcaagaatattgccatatccaactgtgttataaagcgcccggaacaaaatgattattttgattataaaaagtatactatacctggtgtaacagccaattatacaaacaattcgggcattgcattggaaatggtcgatggaggaacaatggagcagatagtgattaataatatcaccatgttcaatacattgacccctatatttattcgttacggacaaagacatagtccgctggttggtacgatgaaaggaatagtaatcagtaacattacggccacaagcaatagcctgatgagttgttccattacaggtattcccgatcagtatgcagaaaatataaagttgagccatataatactgaattgtcctggtggcggacgtaaagaacatacactgcgcactatccccgaagtggaaaacagctatccggaaaataagatttttggtgcaaacttaccggcatatggcttttttatccgtcatgtacgccatctgaccttagaagatatacaatttaatttagacaataaaggtgataggcatgcgctgtaccttgacgattgccgtgatattaccatagataaagtgaaaacgatttcgcacctgagcgaatctgcctatatcaggacaaataatgtggaaaatcttatgatcagaggattctcaacagaaaatgctctaccgtcttttttggaaaacagcggcaaatcttccggtataaagttgattggcaatgatttcagtaaggtatcccagttgtacaatgaagaaatcgggcaagaggtaaaagaagccggtaatctatttgaaaacaaataaaaacttaagtatatatgaaaattatgaagcgctatattcaagtaatattcatctgctggttatccataaattccataactgaagtttacggaaaggacccgataggcatatctttagtaaagtggagttttcgtacacagactgctatattatgtgatatggcaaaagaaaacggagctgtagctattgatatggtagatccggaaaagtgggacattgtgaaagagaaaggactaaccgttgccatggctgatggtatagatatgggaatcgaacgaggattttgcgaccggaggtggcattcatcactaattgaaaactataaacgcttcattcccctattagcagaaaaaggaattaagcaagtggtatgttattctggaataaatacggacttatcggatgaagaggctttggaagcatgtgtggaaggattaaagcccctattggatatcgcagaaaaagcaaatgtgactttggtaatggagttactcagtagccgtaatactgaagagattttcacaaaacagcgtttctcttattatcagtgtgataatccggaatggggagtagcattatgtaaaaaactaaactcaccgaatttcaaacttttatatgatgtctggcatatgaacgatatgggacgtgatataatgagtgatataaaaaaatatcattcttatatttctcattatcatattgcgggcattccagaacggaaaggacttaaccggacagactcctttaattatcaacagttcatgaaattgctgaaaaaggtcggttaccaaggttatgttggattagaacccgacaggatagaaaagaatttgaaaagtactattcaagaaagtataaccctattaaaaaataaataatgatgaaacaaatctctttaatgatcacatctgcggcgttgacatttgctatgaatatctgcgcccagcaatcaccttgggataaagcagatgccatcgtgcagagcctagatcctgtgacatttcccgacaaaacttatgtcatcacggactttggtgcagtcggagacggaaaaacattgtgtaaagaagcctttgaaaaggctattacaatttgtagcgacaacggtggaggaaaaatcactgttcctgcaggtacttactatatgaatgggcctctggtcttcaaaagcaatgtaaatgtacatctggaaaaaggagcgatacttgatttcagcactaatgaaagtgactatttaccggctgtcattactcgttgggaaggtaccgagctgttcaactattctccgctgatatacgcatatcatgtgcagaatatagctctgacaggtgagggcaccgtaaatggaaatggctcaaaaaaattctcaccatggaataatattcagacagtagaacaggaaatgcttcgtaagatggggcgtaccaatgtaccggtttatcgtcgtatattcggcgaaggctataaacttcgtcccggttttatcgaaccttttggctgtgctaatgtaagaatagaaggcgtcactatcatggattctccgttctgggtgattcatcctattttctgtaacaatgtaattgtccgtaatgtaacagttgacagtcataattataataatgatggttgtgatccggaatcctgccggaacgtactgattgaaggttgtactttctccacaggcgacgatgcaatagccatcaaatcaggacgggataatgacgcatggcgcatcggtcagccgacggaaaatgttgtgatacgtaattgttctttccgctctaaaattaatggtgtatgtattggtagcgagattgccggtggagtccggaatatctttattgaaaatattacaattccgaagtcctccaatgccatctatttcaaatcgaatcttgaccgtggagcttacatacaggatgtatatgtacgtaatgtacaagcagatacagtacgtactgccctgatacgttttgaaccgaactataaaggggaacgctcagctttccatccaacgttatttgactcattcttgattgagaatgtaacctgcaagcaatccaatgaatgtggtatttacatggccggttttgcagaacgtcctcttcagaacattgtattgaaaaacgtaacaatcggtaaagtacctaccccctactgtttccagaacggagaaaatattcgatttcaaagtgtaaaggtaaacggtaaaaagctggatgaaaaaccgactcccaaagaattggtgaagcttagagtactttaatctgtataactttaatctaatcacatcatgaaacgatttatagcagggctgttgatgagtggattaatgattccacagttgggggcgatcgtccctccatcttgtttcaatgatagtcatgatataacttcattaacatcctggggaccttattcaaagcgttatgcaggaatttcgcatatacctgacataaagaaaggaatacgctttgacttttctgtaatgcccggttattaccgaaaccggcagttggttccgcatgtcctttttgaatcgtcctattatccatggaatataaatccttccatgaatcgcattacctatcgctatgagttggagtggaaagaccgggtatttacagatgttacttattatatattggatgaaagcagcacactggtaggtatacgttgtgtaaacaatacggagacttatcagaatctggccctgaatcaaatggcctatatcgattatccggaagcacacccacaggtgaaagcttcaggagcttctcgtttgcaatggtatagtgcgatagattatacagagaatgaacctgcttttaaaactcctcagtatggactggtgtatgacgggtggtacagaaatgaagaacgtagcagtttttcactggatgggtccgttttgggaaaaggatttggaaaagacgcgggcgatcgggtaagctaccggatagatataccttcaggtatggaagatggggctataggattcagatataaagttgaaaaagggaaaactgcaactttacgtttgaaaggactgactgatgaagtggtaaaattcaccggaaccggagattttacaattctcccgatctcctattatggcagaaagagtggtgaatacattctggaacttatttccgaaggaactgccgagatttgtttggacggattctttatcgggactgctgaagatatgggcaaactgaagttcacccccaccgcaataccttttacaccaataattgaagtgggaaacgagaagcaggatttcatattaaaatatgaagattgtgagaatttctatggagtagcctggaattataaagaatcgtttatccgggaagtgctgaatagtgaattagagtcatttttccgaaagaaaacacacgatcatttagccagaaaactgattggtgacaaacaatggcactatacaaatgcttttttgcgaccggtagtattagctcctcattcagaacaaacactgtatatgttggtatgtaccggcagccgtgagaaagtcagacaagatttagagctttttcattccactcctgaaaagtttgtttctttagctcagtctcagcaaccggtaaaaccagaggaggccctgctacccggaggaaagaagtatagttttgggcatcagttattgcaggccgcattactttccaatgttgtttatccggtttacactcagaaagaatatatccggcattttacacccgggaagaattggaatagcctctatacatgggaccttggcttcatcgctttaggcatgattgatgtggatataacgaaagccttcgaatgtatcagagcttatactacaccggtgggaagtgaatctgcttttattcatcatggtactccattgcctatccagatgtatgcttactatgatttgtggaacaatagccaatcgcgtgaagtactgaagtttctctatccgaggctgaaacaatactttgattttatgttaggaaacaacccgaactctactacgcgcatgaaaggctccggtctgctccgaacctgggattatttttataattccggaggctgggacgactatccaccgcagcaagcactacgcagtgataagagtcaatatccgtttgtaacccctgtagtaacttcagcgtattatcttcgtgccgccaaaattttgcgtttggctgctaaagagatgggattgaaagaggatataaagggctacgaccggattatcaagaatctttctaaagcactgcaaacctacgcctgggatgaagagagtggttatttcggatatgtgactcatgatgcatccggagatgccaaagcaattttccgatacaaggatcagtccaacttcaataagggattagacggagtaaccccgctggcagcaggtatttgtacccctgagcaagtagacaggttggtgggacatttgttttcaccgaaagaattgtggacatcttccggtctttcaactgtcgatcaatcggccccttattatcaggcagacggatattggaacggagcagtctggtttccccatcaatgggttatatggaaagctcttttagacataggaaaaggtgaacaagcctatcagatagcacaaaccgccttagacaaatgggaacaagagtgccaggaaagttattacactttcgaacactttataatttcctcaggaagaggagctggatggcatcaattttccggcctttcttctccgatactaaattggtttgctgcttattataagcccggcaaggtgtcaaccggctttgaaatatggattgccgagaatcattttaatacagattattctcagtatcgcgccaagatttcttttgacgattctacactgcctcatgagcgttgtatgattgtatgtatgaatccggatcatacgtatgaagtacaattcaatggcagaccggttaaaagtaagtcttatcataccggaatggtggaaatcaccctcccgaatagcaataaaacaggagtacttaccatcagtgctcttaaatgatatcgatgttaatttttaattttatggagacacaacctatgaaaagtaaaaaaatcattttaattcgtagcctgtttacagtccttttctgcctgtcggcagtgatgctgtttggtcagcaaaataatacaaaacaaccgagggcaaaacagacagcacaagttggaggacaacataccggtcagaaaatagtgacaggtgttgtccgtgatgacaatggagatcctttgattggtgtgaatgtacaagcggttggtacacaaacgggtgtcataaccgatgtaaacggaaaatattcaatacaggtatctgccggcgcaaaactgtctttttcttatattggattccagacacagactctgtctgtcgatacgggttcggtactcaacgtaaaaatgtccgaagacgctcaatccttggaagaagtagtagtcatcggttatggtcaggtgactaaaaaagatgcaaccggagcagtggcaaccctgaaagccggaaacatgaacaaaggtgcaatcaccactcctcaggatatgctgacaggaaaagtgccgggtttgctgattgttccgggcgatgggcaaccggggtccggtaccaccatccgcatccgtaacggctcctctctatctgccagcaattctcctttgatagtgattgacggagttactacatctgatgatgccggagtgggtatgtcgaacgtactgggagcattaaatcccgaggatatagaatcattcagtgttttaaaagatgcttccgcaacagccatctatggttccagagcttctaatggggtcattatcatcactacgaaaaaaggaggaagcaaggcactgaaagtggaatacagcagcacatacagcgccaacgtaaattcgggtaaagtaccggtccttgatgccgatgagttccgtgcctatattgacgagtattatccggaaaacacgttatccggggcagcagttcacaaagccatcaattatacctatccggatggtacaataggatattataatacagactggcaaaaggaaatctaccggataggtctgtctaccgaccagaatataggaatatccggaggaggtgataaatatcctttccgcgtatctctcggatatactgatcagaatggtaccttgaaaggttccaatttccagcgctttacccaggcagtcacatttactcctaaattcttcgataagcatttaagtgtgagtatcaatctaaaagctacggagaataagaataaatatgtatctaccggagccatcaacgctgccgcagcatttgatcctacaaagccggtgcacttttataatgccgacggctcgattgattacaataaatataacggttattttcaatggctgaatccggatggttctatcaatcgtaatggctcggagaatcctgtatcacgactcagtggttactgggatgagacccaagtattccgttctttcggtaatatgcagcttgattattcctttcattttttaccggaattacgtgccaacctgaacttgggatatgattacacgaaaaatgatggtgataaaggtaattatcccggatcgtacagttcgtatacagatgccatcttgcctccgggacaaggaaggtataccgattctaaatcgacccgcgagaactatctcttggatttctatttgaattacgtaaaagatataaaggcaattcgcagtaagattgatgtcatggccggttattcatggcaacattttaaaagagatgaccagagtcagacctactccaatccgttagaaaattatgaatcggtatttatttcggaaagtgcagctcctaaagaatattatttgatttcactttttggacgtttgaattatacatttatggacaagtatctgattactttcacattgcgtgatgacggaacttcccgtttctctccttctaaccgttggggcctcttcccttctgtagctttagcgtggagaatgtccgatgaagcttttttcaagaaattcgataagctgagtaacttaaagctacgcgccagttatggtgtgacgggacagcaaaatattggttcagattactatccttacattgcaacctataatttgtcaaccatcacttctacttcacaatatcagatcggagataaattctatcagatattgaaaccggaagcttataatgaaaacatcaagtgggagtctaccgccacctggaatgtggcattggattggggattctttaataaccgtttatcggggagtgtcgacttgttctacaaagagacctccgatctattaaactccattcccattcccgccggttctaattttacgaataagatgaccgccaatatcggtaatttggagaataagggtgttgaaatcaacatcaatgccactcctatcgttacaaaagacttttcttgggatatcggtgtaaacgctacctggagcaaatcgaaaattacgaaactgaccgccatcttcaatccggactacgtgggagtgcccaccggaggtatcagcatgggaacgggtaataacatccagatacatagtgtagggtatgctcctaatacattctatgtatatgaacaggtatacgacgaatatggtaatccggttcaagatgcatttatcgaccagaataaggatggcatcatcgatgacaaagacctcgtacttaaacacaaatcgcgcccggatgtattcttcggattcaatatgttattccgttataagaattgggacttcggttttaatgcacatggaagtattgggaactgggtattcaacgattacaattccgcacgctgttcagccgactatacattcagcaacggccaaacagtacgcaatatacctgaatttgttgtgaaaacttcaaagttccgcaatcccattaccgtcactcaggcaaagagtgatttattcctggaaaatgcatctttcctgaaggtggataatatcaccctgggctattctttcaaaaaactatttaatagtaaacttggaggacgtgtctcattcactgcccaaaatccatttgttatcacaaaatactctggattagatccggaggtaagtagtggtattgacaataatgcatggccacgccctcgtatctttgtattaggtttgaatcttaactactaaaaaatgatctgttatgaaactaaaatatattttactatcaatactgttcccggtaatgacgattctatttgcgtcttgcttcgatgacctgaacactaccccgcttgatcctaagttgtatacggcagataaagcgtattctacccctgaaagttacatgcagggattagccaaattgtatgcagcacttggcctctccggacaaagcggaccagccagtgcggaaattgctgatgtggatgccggaacctctccattcttacgtacattctggtacatgcaggagttcactacagacgaggtgacattcactcagtccgacccgggatgtcccgaactctcttacaatacatacagcaccttgaacaatccgataatttcaggtctctattatcgtctcttgttcactattaccatgtgcaatgattatctgaaacaaaccacagacgagcgtttgaatgaccgtggagtagatgatgctctcagagctaacatacagtattatcgttccgaaacccgttttctccgtgctttgatgtattatcacgctatggatatgtttgggaatactcctttcattacagaaaacgatccaatcggtacttatttgcctccacaacgttcacgtgccgaactctacagtttcattgagagcgaacttctggaattatcagacgatccgcatatgaccgaaccgagacagaatgagtatgggcgtgccgacaaggcagctgtctggatgttgctgtcacgcttatatttgaatgcagaagtgtatattcagacacctaaatatgatgagtgcatgaaatatgcccgcaacgtgatcagtgcaggatatgatttatgtcccaactatgcagaacttttcatggctgacaacggtgaaaatacagatgcacgtaaagagatgattttcacgatcaactttgacggacgctggactcagtcttatgcaacacaattcctggtagcaggttcacgaggtcccaacgatcctaactttacccaaacgagtggtatctcaaagagtttcaaaggttctcgcgctacattgactttcgtccgtcacttctacccgggaattgatgatttcctcggaacaatggatgaggtggttgatgacggaaacggatcattgggaaagtatgtaaacaccttggataaccgggctattttctttaccccgacttgccatttgcctatgtccaaaaatgccggttcgagcaccttcatttatggctggccttcctataaatggaccaacctgacacgtgaaggcataccgccctcatatacggatgaaaatgggaatgtgatttctttgactgaatatccaagtctagactatcccttgatgcgccttgccgaagcctatctgaactacgctgaagctgcggtgagaaaatccggaggaacatgtacggatgcattggctctggaaaagctcaacgaattgaggcatcgcgcaaaaatacaggccgaagatctgagctctttcactctcgattatattttcggtgagcgttcccgcgagctttattgggaagcattccgccgcacagatctgatccgctttggtaaatattccgggaatgattatacatgggaattcaagaatggaactttccccggttctgccgttcccaaatatagagaactgttccctatacccgcttcagatataggtgccaatcctaatctgactcagaatccgggctatgacaatgccgtttccaatcaataacctctttaagaagattaaatatgaaaaagttagtttattcaatagttagcataatttctcttctttgcctggcgtcttgcgcacaagatgagaaactaatactggaccctgataattttgttgccagttcctggaaacagacctttgacgatgtgtttgttctggataagaatgctgccgagacagacttggccgtcattgagtggacccctgcccaatttggctacgatgctattatttcctacgccattcagctggctgtaaaaaaggaaggagtagatataaatgatctgacatacacaacgtttgcaattaccaatgaaaacaaatatacggtgaaagtaaaggatctgaatgccgccttattgtcggccggagccatcaaacgccgacctacagacattgtaatgcgcgttgaagccaccatcagcacagcctatgcatcattgacatcctccatatccgaattcaatgtgactacgttttccagtgatcccgacttactttatgtaataggtgattataccgactttacaacaaataatgcagaagtattatattctcccggctggaatggagagtatgaaggatatgtatatttacccaaattagaccaaggtataaaattggttgaagaactggcaccggaagttgaatggggagcaccggcttcattcactccgggtacaagccttgctctgcaggcaggaggaaacgttattgctccgggttcttttgcaccgggttccaataaagaggaaatactcgatggaccgggattttataaaatggtagttaaaatcacggagaacgcaaagaccatgacactttacaaattctataaagagtttttcgtgtgcggacagcgtaatatgagttatcctcaatgggcaaattccatgtcagctcaaaatcctgaagaaggaacaggagctgttctgacatacgatccggaaggaaaagtatggactgccaagcatgtgtatgttccggaatatcagacagacggaagtggtgtacccaatacctctaagtttgaattcaaattcagagcgaatgcagtgggcaaaacctgggcaaatgctgccaatatgggagctaccgacaataaggtggaaaagggtaatcaatcgggtatcatatccggtacaaagaatattccatttcttgcagcagaaggatattatgacttcaatgtgtatttgcaggaatatcctttccggtatgaactggtccccagtgctgatgagtagttttcaggttaattgagtgattagaatcgggctgtatcgtatatttccgatacagcccattcttttataatactgacattgaaacaattaaaaattatccttatgagaacttatatattgtttatcacacttctgtgcactttatctctaaaagcacagattgtagattgtacaccatctaagccaacaggtgacgatgaagttactgtgacttttgatctgaccaagtgttcctttcagaaagcttctttagtcgattttgaaggaccgatttattcacatatgggagttatcacttccgaaagtccgagtggtactgaatggaaatccagaattgctttgtggccggataagacaacacccgacaaatgtaatattgatgctgttaaactccagaaagtcggagataacctctggcagcttaaaatcaccccgtccgtcaaagagttctttatgcaaaacactcagatggaaccaccttacgagtttaaagcagacgaacagttgctgagtatcgagtttgtgttgcgtaatgcggatggcaccatggacgggagggctaccggtgataaaaaatcgaatattaaattactgttgtcccatacaataactccgggagaagatagtccgcgcccggaaggagtacaaagaggtattaactaccacaatgacgaaagcctcactttagtgctgttcgctccgggaaagcaatttgcgtatttaatgagcgaactgagcaactgggaagtgaaagaggattatcggatgaaaagagacggtgactacttctggattactctgaatcatctcattcccgggaaagaatatgctttttattacctggtcgatggtcttttggatatcgcagacccttatgccaataagatactcgaaaggaagttcgacaaaggaatatctcccgtcgcatatcctaacctcatggaatttccggaaaaatgtaaagctgatattgtatctgtgtggcaaacggcaaaaccggaatatccatgggaagtgactgattttaaaggcgtacgccaagaccgactgacaatttacgaactcctgcttcgagatttcacacgcaacggtgaatataaaggaaatctgaaactggcccttgagaaactggattatctgaaatcattgggaatcaatgcaatcgaattaatgcctttctgcaagatagacggaataaccaattggggatatcactccaccttcttctttgcaacagaaaaagtgtatggaacagaagaggattataagaaatttatagacgagtgccacaaacgtggaatagcagtgatcatggacattgtattggatcatgcatatggtacttgttccttagtcagactgtatgctgatcctccgggaaataccaaagcacagccggcagcagataatccctggttcaatatggtttctcccaatactaaatattcatggggagccgatttcaaccatgagagtaaagaaacgcagattcttttagacagcatttgcgctttctggctaaaagagtataaactggatggtttccgtttcgatttctccaaaggttttaccaatactccgggagatggttctgcatacgatccggatcggatccgcattataaagagattatcggatgaaatacggaagcgaaaaagtgacgcttacctcatttacgagcatttagctggcgatcaagaagaaaaagaacttgccgaacacgatctgatgctatggggaaagcaaaattctcctttcagcaatgcgatcaatggagttcagaaaggtagttcgtttaagggagccatggcttcatctaaaggatggagtaaaaacaaccgggtaacttatatggagagccatgacgaagagcgtgttgcatacaatgcttcagtgaatggaattggagaaattcgaacggaattagaggtacgtatgaaaagatgtggaactgccgcagcctttttatttatgatgcccggtcccaagatgatgtgggaatttggcgaaatggggtacgacatctctattcagtcaaaagaaggtacggacgaacttagttccagctatgaaggtgaaacgaaacctcctcattgggagttcctggaggttccggaacgaaagaatttatttgagacttattgcaaattactaaatttcagagaacagtatgcccatgtgatatccgacggagaattcgtaggaaatgtggatgagacagactggcctatccgacgtattgaaataacacatccggatcttcactttgttttagtaggcaacttcggtactgccactaatatatgtatcccaaatttgaatagcggagaagactggtatgatttcatgaccggtaaatccgaaacaggaggtcccttctctttgcctgccggagagttcagactgtatataaacaagcctgtagaaattacttccatagaaacgataccggaagaaaaccggcaaatcgctattgcccctacaattgcccaagaggatgtttggattttattatccggaattgtcaaagtgcagattattgcaatgaatggaatcatagtagacgagcagacaaccgcaaaccgtaccttcaatgtcagcaaattaaataaaggatactatcttgtacgtctgacaggagaaaacgggaagcaaacaatggctcatcttattaagcaatagaaacgacttactttgagcaagcataccgggaaggcagattaagagtaccttaatcagatattgttccattacgaagaagcgtaagtttcactttagaggaacatttgtttccttactgtggcacaaaagtttcttgcctaagaaacgtttgtttcttaaccgagaaacttttgttccataggcaaggcacttttgtttcaataggaagaaataaaaaggaaaggcgtaatcttacgagtataccttgcgcttgctaacaggctgaaagcactgaaaaccgtccacgaccagacatctcagtataaacgccttacacacaagggcctatagacgatgaaagagatgaaagcgcagaacggcacgataatacaacacaaagaagacttgactcagcggttcaaccacggttccggattcagtttctccttttctttgcgcaactggaagtgaagcaccgtacgtccattgtccgcaccatccgaaaatacttgtccgagggcttgccgggtagtaacagtatcccccgtcttcactgaagcagaagccaggttacaataaacggaaatatagtttccatggcggataagaatattaaaaagtccgttcagttggaaaacagcagctacctttccgtcgaagatagcacgcgcctgtgcaccgggcttaccttgaatatctatccctttattatccagtttcacattgcgaagcccctctacggaatactgaccgtagcgactggtgatgatatatggtccggtaataggtattggcaatttaccacggttgttgacaaagctaccggacaattcccggtctgccttatccatcgtataggtttcgagaggtgccgctttcttggcgatggctgcttcggaagaagaagttgcagccggtttcgtttcttttgcagcagcctttttgcgggcagccgcttctttacgcgcctcttccgcagcacgtttacgggctttctcaatttcttcggctatcaagcgatcaatacgcgcattcagctggtcggcttccctacgcttcttgttcaactcattttgcagcccacgctgcttcttctgtaaattagcaactaaggttttcttctccttctcctggttttccaacttttctttttccacttcacgctctttcagcaaactggctttggctttctttacctgttgaagttccgtcttcttttgattgacctgctcttgtttcttcagaatctcttcgccttgcaggcgctgatagtcggcatactcacgcacatagcgcaaacggcgataagtttgcgataatgttttggcggaaagaataaacaaaagtttgtcttggacggaacggttcttatacaaatattgaactgaagactcatatttcttcttcttatccttcagatcattttcgaggcggactaactgacgttccagtttggaaagttcacgatctatagtctccatatcattattaatggcgaggatataccgttttcgttcctcaatctgcccggtaagggcggcaagaccattcaactggctaccgacatctttctttgtagtgttcagaagtgtttccgactcggctatctgcttttgcaaagcgccccgtttactttccaactccttaatcatcttgttggattgggcgcaaagtggcagagccagacaaaaacaacttatgaaaatacaaagaaactgtctcataacttagccagcatctctaaaagttcagtccattcaaccttagtatatctggaagacacctgagtcggagtcagcgatatctctttgtccgaaaagtcggtgagaacgatttttcctttttccaaagaaggaatccccaactccttgcctgtcaaagaagctttgccaccgggtttggcagcctcaaaaagcatcttctccaaatgggcaaagtcggccttcttgggcaaaacgtctttcaattccttacgagtagcctgtacataacgttttcccatgcggtccactaccaacacatcgtcgggagtaatctccaatcgtgccacttcactgcggaggataggcatcagaagggaaagctgcatacgttcaccgcttacaagcttcatggtaccgttcactgtaattgtgcctcccttgttaggaatggtcaactgtactttagaagataaaaagcgcggttctcccaacgaagaagtcactttccgggaagtcttacaaccggaaagacctactaccagggtcaggagaagcatgagaggcagcatacgaatactgcctaccgttctgtatttgctgtgtaacgttctcattcgggtatatatttctttttctcgatcttctttttcaatgtcttggactcactacccacttcctgagcttgcttccaatacttcaaagcaccatccacatcaccggtcatataatagatatcacccccatgttcaagaatggtatcactttggtctttatcattctttattgcatcgtctatgtagaggcgggcttcggcatagttgcctttctcaaacagaatccaggcgtaggtatccagataagtggggttcttcggttcggatttcaccgttttataactcatttcctccgctttgtccaagtcacggcgttccagcgagaggtaataggcatagttattcaatgctcccagatttgccgaattgtaaaccaatgcagagtcataggctgcataggcttccgtattcattttcttggtatgatagatatcgcccatgatggcatagaagttcgaaacgaattctttatcactcttttccgggatgttttccaatcctttcttgcaaatggcaagtgcatcgtcagtgcggtcagcctgattataggctatggaaagatagaaatagaactccagcatatcgggattagactcgataccggcctcacaaagacggattacttctttataatctcctttctgtactgcctcaccgagaagtgtcatgcgggcagccgtattcgtcggatcaatgtccagcactcgttccagtacaggcatggtctctttattcattttcttggcaaggagatattgggcataaagcatcggcatctgtgcatcatcctgatcttgttccataatacggtcaaaaagattgatcacgcgggtactgtctctacctgcccgttcattttcaaccacaaactgacgcatcacgttcaactttgtatcagaaggcactttcttattcagtaaaagggtatccagttgttgctcgtagagttctttctgtccggtttgttcgtaataagaggccaatgaatacatcgccatggcattatccggttcggtagcaagcactttcttgtatatgttataggcttcgtccttcttgtcgttctgcatataaacatcacccagtatcacctgatagcgcatatccatcggatactcttccaccagactctctatctcacggaaagcgctctgattatccttcttctgtaaatagatacgaaatttctccatactgagttgctcgttctttcccatcttttcttccaaacgattcaaggtggtaatcacattatcgtactcttccagacggttgtatatatccaacaagctgtacagaggatccatcctatccgagaaacgggttgccatgttttccagcagattcgtagctttctgcatctcattctgttgctgatataagctggccaatccctggctataccaataattatccggatcattttccacagccttttccaatgctgcctgtccttgcggaacttgtttaaggtacatatagtactgcgaaatctcgtacaaagccgatgaagcattcggattaatggtcagacaatgctgcaataagtcaaaggcagcactataatcgtctttcatcttcaagcgggaagcttccaggaagaagtaatcgtatttacgctgttgctcgggcgtaagcacaacctgcgccttggttcctttccgctgtttttttcctccctgacgggaagtaccacacgatataagtatcgcgcacaatacgaaaagagatactattttaaatttcattttcattcagtcagttagtagaactcagccccttttagttttttaattctttgatttttaattcctcaactctttcctgtatggccgaagccgcctgcaccacgctccgtatcatccagcacttccacttcctgccatgtagcttgttcgtggcgtgctattaccatctgcgcaatgcgttctccgtcttctatcacaaaagtctccgatgaaagatttacaaggataatacaaacctctccacgataatcggcatcaatcgttcccggagaattcagcaccgtgatacctttcttgatagcaagaccactgcgagggcgcacttgtgcctcaaaccccggtggcagggcaatatataatcctgtaggcaccaggcaacgctgcattggagctaaagaaataggttctgaaagattagcacggatatccattcctgcggacaattcggtggcataagccggaagcggatgtttcgatttattaatgatttgtacgttcatgacattaattacaaattacgaattataaattacgaactgccgctatttcagtatttaatagcagttcttcttttttaattgggcgaaaatacagcttttaaagcaaaatagtgatacatttgcagttaaataataacaaagggcaaatgtcccctcttttttgccatttataatttgtaattatcgccatgaattggaacaccctcatatctgccaaacgtttcgggcttgaagagtttcaccaggagcgtcacgaaaaccgttcggaatttcagcgggattatgaccgtctcgtcttctccgcccccttccgccgcttgcagaacaaaacacaagtttttcccttgccgggtagtatcttcgtacacaaccgcctaacgcatagtctggaagtttcctgcgtaggccgttcgttgggaaatgatgtcgctaaagccattcttacccgtcagcctgaattgaaagattcgtatttacccgaaattgggtctatcgtatcggcagcctgcctggcacacgacttagggaatcctcccttcggtcactccggagaacgagccatctccactttcttctccgaaggaaaaggtatgcctctaaaaggacaactgtccgcagagcagtgggaggacctgatacacttcgaaggaaatgccaatgctttcagattgcttacccatcagtttgaaggaagacgcaaaggaggattcgtattaacctattccaccctggccagcatcgtaaaataccccttttcatcgagtttagctggtaagaaatcaaagttcggcttcttcaccacggaggaagatagtttccaccggatagctgaagaactgggtatgaaaaagctgaatgaaactccactaaaatatgcccgtcatccgttggtttacctggtagaggcggcagatgacatttgctatcagatgatggatattgaagatgcccacaagctgaagatacttaccacacaggaaacacaagatttacttctttcctatttccccgaagaacgtaaaacgcatatgctcaaaacactgaagcttgtcagtgatgtcaatgagcagattgcctatctgcgttcctgcgtcataggactgctcatccaagaatgtacccaggcctttctgaataatgaggaaaagatattaaagggggaatttgaaggaagcctcatcaagcatatttccgaattgccatccggtgcttataagcacagtgcagatatttcgttaaagaaaatctatcgctcgcgtgatgtactggacatcgaacttgccggtttccgcatcatcagtactttgctcgatctgatgatcgatgccgtctgctcaccggaaaaagcttattcacagttgctcatcaaccgggtatccggccaatacaatataaaagcgcccgtactctacgaaagaatacaggcggtattggattatatctccggcatgacagacgtttatgcacttgatctctatagaaagatcaacggaaacagtttgccggcagtataagttgtgcttcaggcacaattatcatctactcggaaagaacactttattagctccggaggtaagtttgcaagcctccggctcattctcgatgaatgactggatatggcggatacgcttttctgccagaatctcatccacagcaatcagaattcccgtttcttccacatcgccaaaaccatagttaatggcagtaccgaacatacgcatcgtcggactcaaactcatataagcatttaccaacggcggaatattatagcctaacttacgtatctcgcaattcagtatcttatagtcctccttaaatgtcttcttacaaaacaaagcagccaaatcggcctctttagcttccatttcaagcggtttcatcggagtaatcagattatctttatcctcaaagtgcttcttcaagaaataaagaatcatgtcgcgtccctgacgatgatagctcggatacatagtcactttaccgaaaaaatacttcacattcggcataactaccgttaacgcacccaaaccatcccataggttatccagcgcaaacaagcctttgctaccggcacgggtagactgatactctaccgtaacaaatgaacgtcctaactcaattgtagtgggaaggtactctttcaggaacttttcagagaaattgaacatgtgggctgtagccagaataggggcaccctgttcatcgaaccgaacgtccgtaccaaggatataacgataaccacctaatatttcttctgcttcagggttccagacaatcagctgtttgtagggattatccatgatatcgtattcatcgatatccagcggttgtcctgtacctccacctgctgcacggaaagcaatctcgcgtaaacgcccgatttctttcataatattcggagaatcctgagctgtaatgatataaatctgattatggctcttattcgtcatacgcagacgcttctcttcggtcagttccgctttcagaagttccttactaataggttcaataatctcttccatatttttttgttagtagttctcttattaaaactaagttctataatttataaacgatatcttttacgtaagccgcccactcggcaggagtttttgatttatcaaaagtctgccaggaaataggtttcccgatggtaacagtaaacgttttatgacggttcttcaacatctcgtcggcaaggtagagcatggctatgttaattttgatgcccaaaaatttgcagacgttagccaaattataaaaaaagttcgaattccggccttcaaaatgaatggggacaacgtcgcgttgtgcctgcacactctttacgataaaggtcttcttccaatccagatcacggatcactccattctgacgtcgggagcacaatccggcagggaacataatcaactgatcattcgatgcaaagcccgcttccaccattctcggaaaatcttttgcctgttttcctgtcttattaataggtatacaaagaggagctaatccttgcagattcatcagcaggtcattcaccatatacttcaccttacctttatagaaactacccaacacatatcccaaagccacaccatcctggcctcccaacggatgattagagacaaaggtatacaatccttcagtcggtagattctcttctcccttcactacaatattggcatccaaaaattccaggcaggcttttaagaagtctacacctaccttatccttcgactcgcgcaggaaaacattcagttcttcctgatgaacgattcttttcagataagaaaccacgaatttggggatatacttatagtacttcggagccttttcccggagcactttatcaatatcaatcaaaaataaagagtcgtcagccattctttttaagatgaaatgattgcgcaaaattaactcatctttttaattatacgcaataaaattggtgaaaactgcacccaaaaacaaacaaaaggcacccaaaaactatcaattgatagtttttgccctaaagattgctcaaaatgcgtccgtcagagttagggaactttcgtaaaattgcaacatcaaaagtcaaacaaacgaataattataataaaaaaggagaacgatatgaacagtattacatttcaaaaggatttgctcggagtacaagacgatttattacgttttgcatataaactaacctccgatcgtgaagaagctaacgacttactccaggaaacctctctaaaggcattagataatgaagataaatacatgcccgacactaacttcaaaggatggatgtacaccatcatgcgcaatatctttataaacaactatcggaagctggttcgcgaccagaccttcgtagatcagactgataatctttatcacctcaatctgcctcaggagtccggatttcaaagtaccgaaagcgcctatgacttgaaagaaatgcaccgtgttgtaaatgcactgccacgcgaatataagattccattttctatgcatgtatccggtttcaaataccgcgaaattgcagaaaagctgggattacccttaggaacagtaaagagccgtatattctttacacgccagaagttgcaacaggaactgaaagacttcagataatctgtgttgcaggataaaaacagttattaccctatacaacctaaaccgataacgttcagatatgaaaaagtgttcatgaagaggtcagagactacttgcatgagcactttccgaccacccgaaaactatcaaaacaccacctgaaaactatcaattgatagtttcccccccaaatattgcctgaaatccgtctatcagaataagataactttcgtaaaattgcaaagtcaaaaggcaaaacaataactattgaaaaggagaaatgattatgaataacagtattacattccagaaagaattgatcggggtacaagacgatttattacgctttgcatacaaattaacctcagaccacgaagaagcaaatgacctactccaggaaacctctctaaaggcgttagataacgaagataaatatgcacctgatactaatttcaaaggatggatgtataccatcatgcgcaatatctttatcaacaactaccgcaaggtggttcgcgaccagactttcgtagatcagacagaaaatctctatcatctcaacttaccgcaggaatccggctttgaatgcacggaaagcgcatacgacttgaaagagatgcatcgtatagtaaatgcattaccccgtgaatataaaattccattctccatgcatgtatccggtttcaaataccgcgaaattgcagagaagctgggattaccactcggaacagtgaaaagccgtatcttcttcacccgacagaagttacaacaagaactgaaggattttgtttaggagaaaagaaaaaaatctgcaaaaccaatatatagtataaatttttagttgtgttagagagaatatgggcagaccggaataatatccagtctgccctttctttatatcccctcgctccatacccgaaccgtacttgctccgtacattcttcggtcagaagtacctctgtacggagaaactacggacttggtacggagcaagtacggctcgggtacggtataaatagaacggagtgcctggctgcttactcataccgcgctcagcatcgttgaagttgcagaccagacagggttctcaacttcccgctatttcagtacggtgtttaagcaatacatgggatattcacctactcaatataaagaagaacacaagtcatcctaacgtttttccaaggagggtattcgaagattacattttcttaattaacctgactccaaatattctcccaatcatcctttctttgtgagatttaaaagaaattttcactttgtccttattggaagtagattcaaaaggaatatctattttcatatcataaagatcttctgatttctgaagtcgcatagtaacagatctcagaagtttatcatctatataaatgtcaaaagaacaagactctccatcattaccacaacaagtcattattaactgcaggggagtttgatctgttaccttcatatcaaaagtaaaccaaccatcattccagctaagacggaatttacgtccgacaaattctccaacagcagtattacttcctttcagactatgttctctctcaggttccatttctcctagctgaataaaatcaactgtctgctgttttaagacttcctgctcccgaagataattttgatattcttgctttctcctttcccaacctgtggaatcaaacacatcgaaataaacaatataccgttcattatacaaagtataaaaaggagctaatacaatgtctgacggttctccaatattttgagttttgaacaaaaggctatccagagatattctccttatccattccgacacaggtttattatcagttattaaaaccggaatatctttcatcggatcgattcttttattacccaacttacctgccaaaacccaaggaccgtattttattgccattctattgggattatcaggagtaggctccgtataaacaggcatatcaaaattaatttcaataacatcgcccttcttccattctctggttattttaaaattagtacccggaacaagcaaggtattcattttcttcccattcacttttatttctgttttctccgtcgtccaataaggaattcgaagcaacatagaaaatttttcagatttggatggggttactgttatcctgatattcccatcccgttcatagtttccttcctgtttcagagtgattcccttttcctgccatgtcaaaactgatgggatatacagattcacaaatatattattcttcttgtccttgaaataaatagcttccccataacgggcatgattctcaaatccggttccgacgcaacatgtaaaagtttcaaatgcactactataacctcttttacttccagccactaacggaagataataagtagtcatccctgtttccggattttgagaagccagaatatgattatacagagccttttcataataatcactgtatttggtatcaccagtttccagaaggagcatttttgtcagtttcaacatattatatgtattacatgtttcagccgttctatcactcaggcggcttgacaatattcctttaggtccgaaatgttcaccatctccatttcccccaatacaataagtatgattttcaattactgtttcccaaaagaagtgagatgtgattttatctttttcattattggtaagcagatgtcttctttccacacctaccactttaggtatctgggtattcgcatgtaaccctgccaaagaatcaatctggcgcgaaagaggagaaaggaactgttgatgatcaaaccaatggctcatttcaagatacttcatatcaccggtgatagaataaacattgaccaaaacctctagcattccgccatgctcacaagctaatatcttctgccattgttcatcgtccaatcccttaaactgattgtacgcccagtcagacagatgtatcaaaaccgacttagctttctcatttcccgtatagacatgaacatcataaagtccggcaaacaatttatgtagaataaaccaaggtactatcgctccattcagatcaaagcctgttgagtaaatttctccctcgccaacctgcatccaaatactatcttcaacactaccaatatacccagttccttttacatcctggcatctttttaattcatcaataacatagtccgtacgttctttaaacttctgttctcccgtcgaagcccacatcatggcacatgcggacatataatgtcccaagcccctgccacctcctctttctgtttcccaacctccatagttatccgccttcggtggtaaacctgcatttttatgaaacctatgtaataatcgatccggttcaagactcaacaaccattctgcgtccaatgtctgagcatgtttaaaagggcttggcagcaatctgatttgattcaactgaaaaggttccagtgccatccgtatattgtgcctatccttacataaacagtaatttgctgtcaaaagaagatatatgagaagaagaaaagctctcgaatgtgtcataatacaattaggttttaaaaagcacgaaagttccgaatacgatgaaaagtcatataattagcatcatgttgccggggtggatttccggttttatctctccaagccgtacgggagacaaaaacaatgtcttttccatcaaattgccagtcgacatattgaaagccatacaattccggttgatcgcatgtcagcaccgtatctttgatacaccactccgtcaaattatccgagcacatcaaaacctgtgtgttacgtatagcaccaccatccatgttgtgccggtctttttccaatataaaattggataacgtccaatacttcttactttttttatcatagcgaatggtgaatttcttgcccgctcccggaagtttaatgaaatctttctccggattaaaagtcataatcttaccgtcctctgaaacagaagtcattgcagccacgtcatccggtccataggccacacgcaggatatctttgacttctccctctcgggttactaccgcattgccttccaaccatgcggtagctccttctttccacgacgaatcatatcgtatctcgttactaaaattccactgtccggcgtccagcagatcggcttcacaggaaattgaagtcatcaaagcggagaaaggtccccagccccattcttgtcccatattttccatagcacgccagtattttcctttatgacgaactactgggaccggagcacagtgataaaagccacatcggataagcccggacttttcatctttaggttctgtccaggagcgtccaaagtccaatgacctacgaactacaaaatctccataccccattgtaaccttaggtgatatacctatcagatacaactctttgccacggttaaatagtgtagcccaagtcagagattccagtttggcgatcggagtccaggaattaccacgatccccggacctatagatataagtatccgaaagctttttgccaaaataatcgtgtgaagcaatataagtaccatccggcatgataacaatgctgggtgatcctatatattcatgagatatcgccggtgcattatgtattacaactccgggaggaagtgtgtcaccttcctgggtgattcctgcccaacacaggtttgtaatcagcaggcagccgactatcatctttaatgttcttttcactttcatacctactcatgttttgctatacgcgcattatagattgctcctgtccagttacccggtacgcctttaaaacggattgttatcttttccttacctttccagaaatgctccggcaacgaatatactccttcaaagaactgattcggtttattctgataaagatgttgcctggccagtaccttaccgtctacataaatatcaaattccaaatgagccgtttcgcctccccaataggtgacatgtaaatcttgaggaacatcgggcaagaccttcatatcaaattcaaaccaaccaccaatccaggccgctctccactttttccggtgcgaaacaccattaccaataccctccccacggaaattatgatctctctccggttgcatttcacctaaagtaacgtagtcaaccgttatcttatccagatcctgcaaccgctttaattcatttttataggcttcctgcatatccttccattcttcagtagtaaacaaatcccagtagaccatataatgttgatgatgcatcccatagaaaggaattaaagacatatctttcggttctccaaccccttttgtcttaaatcgcaaaggactatcagataccttctccaaccacttgtccactggctgattattggttactaacaccggaatatctttttccatatcaggttcctccgttcccaactcaccagccagcaaaaccggtccatagaaaatacccacccgtttttcattatcaggcatagatacggtataaaactttattttaaaggtaatttctattttatcattatctttccattcccgctcaatagaaacatagctattattagaagcctcaaatgaaacagaacttccattcactttgatacgcatggactccgcccattccggataacgtagacggaatataacagactgtggtttttctgttttaactgtcagcacagttttatcagaagaagggatatccgtatcctgggtaacaatcatcttccggtccgtccaattcaattgcgaagggatgaacagattcacccaaaggctggaatcactgccttcagaataaataaagtcaccatacttcacgtgattttccataccggatccgctgcaacagcaaaatgattgaaaaggagacaaataacctttcttaccaccagaaatcaaaggcgtatagtaagtacacattccatcatccggattctgagaagccagaatatgattgaacacggctctctcataataagcactatactcaggaagcgactgccaggaaaataaatgccgcgtcagtttcagcatattataagtgttgcacgtttctgtattggaagtgcttaagcgttcattcaattgtccgggggttccaaaatgttctccatcactattacctccgttcacataagaatgattctgtaccaccgtatgccaaaagaaagaagcaatcgcagaatcacgcttactaccagtcaattcatacaggcgtgcggctcctataatcttaggtacctgcgtattggcatgctttccttccaaatcatccactcccaccgctaaggaatccatgatagctttatgattatcgaaccgttgagccaaagccaggaacttttcattctttgtacaagcatataaattagccaatgcctcattcatgccaccaaactcacatgccaacactttctgcatttgttcttctgtaagatgctgaaaggtaccatacatccaattggccaatttttcggcaacagccaatgcccgctcattatgagcgtattgataagtatcaatcagtccggccagaactttatgcattacatacagaggtacccagcctccattcaggtcgaatccctgtgaatatatctttccagccgaaacctccttaaaaatccttttaccatccggtgtagccgccagatagccatcaccatttgcctgttggcaactatccagttcattaatagtgtattctaatctttgcaggaaacgttcatctcccgaagttgcatagtacatggcacaagctgataaataatgccccaatgtctgtccggctactcccagactttcccatccttcatatttaggagctttaggaaccaatccggcttctgagcggaatccactaagaaaacggtccggttccaattccagcagataagcagtctccttttcctccgcatgtttaaaaggtcccttagttataacgacctcccccatttcaaaaggttttgtcggtaaaaccggagtatctacttgttttgccacttgctggcaggacagtaacaagcacaaggcacacacgccataaaagtatttctctattctcatgatattatattttatttactacgaagttcatacatcgtctcaccaaccgaacgtgcagcacgtatcagttcccagttgggagcatcatatacattaataaaaccaatttgatagttctctccatctccgcgtccggttacagcctggtcattgtattggaaccagtgtgtaccaaccagataaggattcatcacggcatcctgcacataatgtttatacaagtcagcccggttctcctgactgcctccataacgtaacccgccatgcagcagaccacgatccaaccctccgaaatggaactcaccgattatcatcggaaaatcacgatccttggaaggccgaagcgaatatgccgaataagtatacctgttgaaacttacaacatcacaatatttggctgcgatatctacaatccattgttgcacggcattcccggcaaagtctccataattaaaccggcaacccaaatacagtttgtgaggcgcttttgcttttaatgcttctttgacagaacgaaaataagcattcgccatatgacttgtgaagtcaatcaaatcatttgtagccccggcatagactgaatcatttttcatccaatcttcccaagtagcgaactcacttccccaaatagtattcagttcagccaaggatgcatatttctcaatcaaacgattcttgaacacttccttcgcataaggatatctcccttgtaaagccaaagtagccagataagtattattaccccaacccagttcattatcaacaaagtatccgatgcaccattcatcattggcagctgatgagccggcaatggtccgttcaagacctttccgaaattccggtgagaacggatcttgtatgaaatgcccatattgcgtatggattaccgccgtataaggagtctttcttgtacggatcacctcttcattagaccagtttgcaatggtattaatattccaactctttaaccgtcggtttgccttatcaatcattttggttttataatcagcaccccatttccgatacatattcagtttccaataagaaagctctttcctgtcgttgcgctcagaaacaaacaaagatgaatccaccgaagccgggagattcaagggacgataaaacttctcacgccctttgacattcgtctcgtctcctccacctacgcaagtgatgccatgcgaccaaaacagatatccctgcgggtcaaccaaccaccatttaccctgatatttctctacgcgaaaatgtccggtagcagccaattgaggtccctttgcccaacccccataaatatcccagcttttattgcacggataatttttcatatcctgttcctctcttttatccgctttcactatttctccgacaccggatatcttaccaggataacgactatgaacatattgcccgaattcatccacaaatggaagtaaatcttcatattccttgcctgagtattctttataaggaatggtcagcatcacattcttcaccacgacctcatctcccgactggatacggggaaagtccaaggaaaaacgatggatagattccggacgataaccacaccacaatcttgtagcaccaccgggcaacccattcattttgggaaacaattccaattgctgctttgaatattctttgcgtaaaatcagagtttcaatctttttcgtactccgtgcaggtacataccccgcacctgtactccaataatcgccatccaaatggcactccacgaataactcatgatctgccaggttctggacttcacaaactaaatgtacaaaaggggagaagtcccaggccgtttctcccgaagaaaaagtcacgctcgccccttgccgggttgccgtccaatgcaacgtcttgcctccggaaactttttcaagtccatacgtatcaatactaccttcttttaataattcgggaagtagttttctgttattctgtcctactgcccatacagagcaggtgaatactattacgattgataataagaatgttttcatggttattctttcaatattctgtttttaatcaagtttagttcaacccatcaggtaagtagaaatcaaaaggggcatttctatcgcttcccattattccgtttctgtctaccttcaattcagctacttgtatcgacgaacgacgatagatataaggcaacacaccggcttcatccaactttccggtctcgtcgccccagcctccctctttctcccatcccggatgagtgaaataaaagacatacgccttatctccggtcactaccactcccggatgactggcacggacattgtcatctttgcgctcccctctgcttcccaatataacgctttgcttctcccacttctcagcatcctttgagcggtacactccaaagccattccactggtctatcagcatccagtaatattctttataatagaacacaaaaggcgcttcgtgaggaacatcaccaatcgtaatgcccggtacgttcgtccaatgatacaaatcgtcgcttacagcttccaccgtatagcctatacgcgaattcttataccacatcccccattttccatccggtttcttataaaccgtggcatccagcaacgggtctgcatcggccaaaggtatcaatccgcagaagtcccagttccacaaattacgacttgaataatgagctatcttgcctatccccgaccatgactcgtgcactccccggatataggtgacaaacaaatggtatactcctttatcatacactacatgaggagcccaaaacgtatttcttccgcgctcgaattcaagatccaatgcacctacataattccagttctttccgtgatccgtgctgactgccacgccgatcctggttccataacaccaattggttccttgcgtagggacattagcccgccggttggtgtagaacatataccatgccttctcctgttcgttatatatcaccatcggatctgctgccccgtcatgaatgggatctctgaacaaaggggctttagcgactctcatctcttctttagccgctgattgagctttcagatccatatcagtccccaatatcagaccacctactactatgagtagtaacaataatcgtttcatctatatagcgtttttataattccttattggttctgaaagaggttgcgggcaatccctctttattatagagattaactgccggattggagtcccacgcatgccgcgctgataaaggcttcttcactgcatcgctccaaaccagcacatcattaccctcgataaccgcctttgccggaacatacttaccatcctcacccgcaacttcaaatgtgcgtaaatttttgccgtctttactcatcagaccgcttcccgtacttttaaacttcatgcgtatcttgtttccttctatccggaatgaatcataaaccggaccttggaagacacccacactatctttgtaaaccatctctttggcacgcagataaaggcgctcgcctacaggtttcttgttattcggatggatatcataaggatcgcctacatctatggaaacagccatcccgacattaggcaattgcaaagattctgcctgcgcctcccggaaatactggcaactgcctccgctgatattaggcaattgtacaagcaggaacggaagatagccttgttcgaaacgtatgcgccaatcggtaatcatagttggctgcaactgtttatacaactccggctgaccggaattcccttcaccctgataccatagaaaaccacggataccataaggtagcagaggggcaatctttgtattatacatacaagtgatattattggagtaaccccttcccaccggaagcttcggctctatctcaccattgtacttccattgtcctttcaaagaaatgcgtacctggttatcagcagaatgtaaatacggatcactagcctcatcacccaaacgtccatttccccattcggacaacagccgtacggcaatcacattcttaccctttctgagcagtttggcaggaacacggtaacttctcacaccatcccatctttcacgccctacttccactccgttgaagtaagtgacgtctcccgtcataactttccctaaatgcagaatcaagtcttcacccagtgcctccttcgaaagtgtgacttcttttcttagccaaagcagttgataaccgcccaaacctacacgcggaggatataccggataagcctcctctttccatgccttgtcattaaaagaaagtttatgagcaccttgtttcagccccacttgtgtagtctgaacaatcttctcacgttctctatccttctcaactcccaactggtggagagctgcccaatcttcatcactcttataaatctcttcaatcacccggttcttaaaagcgggaatcgtataaagcatttccgcactaatccatgcttcgcagatagtaccgctccaggaggtatgaatgatccctaccggtactttcttatccaaatgcagagcacgtgcaaagaaataggctactgccgaaaatcccttcaccgtctccggggtacataccttccactctccacccgtcaaatcagcatgaggagttctgcttacaacttcgggagtacagaactcacggatatccgcataattggcatccttaatcacttcatcggcagacaagacagcaccaaccctgtaattcatattcgactgccccgatgccagccatacctcgccaatcattacattcttgaacacctccttctgtccaccgcaactcacactcaatgtataaggacctcctgccggcagtggttccatcttaaccaaccatttacctgtatcatcagcaacagtttcatattctttttcactcatgctgattcggactgttgctccggaatcggcccacccccagaccggtgcatatatcccctgctgaagcaccatattatctgaaaagatacgagctacacgcatagaattgctttggctgtacgccttcgggcagaccagtaacatccacacgatggaaaagaataaagctgagcttacacgtttgtataccataattctatttttatttattttacctatcttatctttaaaagaagtattcgaagaggcacatccttttaccttagttcattgactgtacttcccgacttatacaaatcccatactgagacgcttcgttgttccaacaaggagaaacttttgtttcaacaaggtggaactatagtttcttcatgatgaaacctttgtttctccttgttgaaactaaagttcttccctgttgaaactgagtgagactcttactcctgattcactccatactaaaagcctcttcgaataccactatttccaaccgggattctgaacaagtttgggatttttatagatctccgactgtggaattggatagaaatacatcttgtcatcccaaatacgatccgcagtcacactatattcgaaagaatacttgtcaccggccttactgatagaaacacgcttgattttcgttgtctcctcccctatcttccatctgcggatatcccagaagcgatgatcctcaaaagctaattcagccatcctttctttacgcaaagcctggcggaactcctttttcgaagatacatcctcagaagtcagtgcagcaatccccaaaccacttctgccacgtaccatgttgatcgcgtcacgggctgaaagatttaactcatccgtaaccccttccggaccataagcttcattcatagcttccgcataaatcagcagtatctcagcatatctgaacaaaggcatggaatgcttagctgtagtagtgctattggcagtcaggcttacactgatattcacgaacttactcagatagtatcccgttttggttgcaccttcctgcggaaggccgttaaggccgttcggaagtacgtcaacttgtttgccataagccgttttcccgccatgatagagtacggtatatgccaatcgggggtctctgttggcataaggttccgattcattcatctcctgcccttccttcatatcgtatgcatcaaccagattctgagtaggacaattgccactctttcccccctccaggccgattgggaaattcaatttctccagttcgttggtatcaccaattcttttaatcagaatcatttccggttctttataattatcggcacccagcagtctgtcgaatgacactaaagacaaattccaacttccggcggcatctataatcttcttggcagctttagctgtttctatccattttgcagggttagtctcggcatccggattattcaacgggcttgcagcatataataaagttctcgctttcaatgccaatgcaaagattttagatacacgtccggtttcattatcatagtctgcattgtagactgccggcaaccttccatcctcggtaacctcgtcacactctctcacgataaaatcaacaatagtttggtaatcaaccggaacctgattgtttgcttcttcctctgtcaggactttcgttatcaacggaatccggttatagcgctttaccaactcaaaatagtaatatgcacgcagagccttaacttcccattccagatttcggtatttacgcatcatcttggcatagtctttcttaaactcaaactctttccagtccttgcccgtaccattttccaggtagtcattgcaagcccggatggctttatagtaatgcccccatttatcatctacagtacgtattgcactccagcttccgtcataaaagcggtgaatagttgaagtgggccatacatactccgcttcatcacaagctgccgaacgcaaagcaccgtctacatcatttaaggcacccggaagataggcatagatgccggtcacaaagtctgtattggaccaagtggtattgaagagtttattctgatcgtaatctgaattctcattgtaatccagaaagtcgctgcatgaggagagcaacatcaccagaactcctgctaaaaatatatgctttttcataatctatatctttttagttacattaaaaaccaactgagaaaccaacctgaatagatgccggaataggatgagaaatacccattgcttcaggatcgcacacatctacgtgatcgaacagaatgaagtcggaagccctgacataaagctttgccgattgcaaaggtgttgaggccaatgcctttttagagaacttatagtaaagctcggcatgacgcaatttcaagaaagatttattggtcagccacaatgtattgtcattaaagttattggcattcgttccttgtgacagtctcggaaacttggcgttcggtgtctcaggtgtccaacggttattgtaataatattcagagatagaagtattgcccgtcaagggacggaacaaacttgccgtagatgcaatagcggaatagttcccggttccctgtatcaaagcatcgataccaattcctttatattccactccaagattaacagagtaataaatctcaggtatctggctactataaccgatagctttcttgtcgaactcatcaataattttatcaccgttcaagtctttgaacttgatatctcccggcttcaccgtggacattttctgcttcggactgttggctatgtcctgttcatccttaaagaaaccgattgcctcataaccgaaaatctgtccaacaggtcttcccgtagctttcatccattcgtaaggggcatattcttcacccatttctatgatcttgttacggttgaaagtaaaattagcacctgcgttgaaacggaaatcttttaattccttatgataattcgctccgatttcaatccctttattctctacctttccgatattctgataggcattagtagcacccagcacagcagagatatcaccaggggttaccagcatatccgttctcttttccttgaacagttctactgttaaatcaactgactttacaaaagacatatctaaacccagatttgccttagcaactttctcatacagcatatccgtcgttggcaatctaccttctcccaatccactggcaccattgtattcaccgcccagaatatagccattagcccaaccatacttacgattccacatcaaagcctcaggcataatatccgtaccggtaagcccccaggaagcgcgcacctttaaaagatccaagaaagcaacatctttcaggaagttttcattagaaactatccaggcagccgagacagccggaaaatttccgaaacgctgagaaggagccaataaattagagccattacgcgaaaaggccaagtcggctacgtatttatcagcatatacataatgtacatgtcccagcatattgatacggttacgagtattgtgctgtccgttcaagatagtctgctctcttgaagccgcaagagtcacattcagtttatggtcgtcccaggtattagcataatttactcttccccataagttaaagcggctccactggttacctaaagaagaactgaacgaagcggcagtactctctcccttcaatgtataatcttcggaagatgagggattggaaacattaggcactgcataggcatagttcataccatagttatcccaatactcacaaaagttatcataggcaatacgcgcatcaaccgaaagtccttttaagaacataccaaggtcttgcctgatggccatatcagcaaacaaaagccgttgatgactcctcgcatatcctttggctgctacttcagctaccgggttccgggtccacacgttgcttccaccccagtcaccataaggagtcttaacgggaaaagccgccgccggagtattatacagcattgacatcagatctccggtcaaagggttcggcctgttatgttcggacaacataccactcatcttgaatgataacaaggtggatttagtcagatctacatctacattggttcttatgctcaacttcgaatacttaagttgggaggaatactcatcaacaatattctccggcttaatgaaacctttgtaggagagataatccacagaagagaagtatctgacaatttttccgccaccactcaatgttacgaaaacattatccgtagaacctgatttgctcaaaacttcatccatccagttcacattaccatagtgaggatcattattcttaattccatccaattgtgtctgatcgtacatcggactcaaaccgtcattcttcatcgcttcattcattgccaatgcataggtataaccatctgcaaacttcggcaagcgattcagcatattaaaatgatgttcataattcacactgacatcaatcttcttcttagaaccggtcttggtcgtaaccaacatgactccattagcaccacgcaaaccatataaagccgtagctgccgcatcctttaatatctgaacgctctctatttcttcttttgtaatcatactcagatctctttcaaagccatctatcagcaccagaatagaattatcacgtgtggaattcaaaccgcgaatcatcgtagtcggtacactttcccatacagtaccgccattctgcaatacagtaagtcccaatcccttaccatacaatgcgttcagaggattggtcgccgcacttttcatgatctcttctcccgtaacttccgatattgcagcagaagactcttttgccttcaccgttacgccatagcccaaattcagaagtctttcccctttagcaacaatagcgctatcttgttgtgcatatgcgcttagacaagagaacatcaatgcacacgataatttatatatatttctcataatcttttacttctttaattgtgatttacaagtagcatattaccatccgggattctgagttaaatatcccttgttcatctctacaaatgggaagggagacaaataccatttcggagtgaagaaaatggttccatcctcaccatcctgaataaatctcttcttaatagaaaatttctcataagaataagtactattatctccacggcgtatacggattccgtgcaatatcttacggaagtcttttgcctgtttccatctgatcatatcatagtagcgcacttcctcaacaccaaactctctggcacgctcgtccagaatttctttacgcatctcatcctgagtaagccccgacttcaaccccggcagtctgacacgtgcgcgtacatagtttacgtactgataggcatcgctcgtacgtcccacttcattcagggcttccgcatagctcagatagatttcaggtaaacgcaaatagggccattggtcttgtttacccgccatgtgttctttatccaaaatgtatttgtaaacggcaaagcctgtaaatgccgcaccatcactggcaaggtcattggcaggaccctcacgtccaccaatccataactctgccacatggtccataccgaattccgcattattcaccaggcagttttcgtacaaccggggatctctgttcgcaaacggatcttctgctatgtaatggtctttactttgtctatcccagaaagaagcatcgaacggagtaccatctgcatatggaaagagattcacatactccagtgtaggggtcattgcgccatacgaaccgtaagactgcaaatagtaacaatccgcatcccagtaccaagaaaccgtggcacgggcacgcgtatcaatcagcaactcaccattcgcccttctataatatgcatcctgataagcttggcggggattagatggattctgaactaaatcccagggatttccttcctgctgattacgtgtcataaacaggtcacaggcatctaccacatcatcccacaaagacatatctttaccaccgaaccagacatgccgttcagcaactgacggagcagaggatgcttccggatgataaggttcgctatcattgaacaaaggacttgcaccaaacaacaagatcctaatcttcagaccaagggcagcagctgctgtaaagcgtccggcccattgttcttgttcaccggattgtaaggcccaaggcaatactgcataggcttggtcacacaaatctgttataaagttcatcgtttcacgagcggtagcacgtggtaatttaaaatcgtcattcggatcgaaagccttggttactaacggaaggcctccataattgcgaaacatatcagcataatggcaagcgataatcatttttgcctctccttttaaacgttctttctcactatcgtcaatattaggagtctgaccgatattctcaataaataaccaggctttacgaatcccggtccactgttcctcaccgttagaataagaataaacggcagccgaataatcagaggtagcattgaactgaccggaatagtacaggccacttacgccgtcccaactcaaaccactggtgaaacaatctgtcaaggcatccacagcccccatattcattctatttcccttcgcactccagttcaaaggacgtccataataaagtgaagtataggcgttccataagaatgcacgggcataattagcatcattaaacaccacatctttatccacatccacgctcggcgccttttccagaaaagcatctcctaccttgaattcatccgcacaagataccagtgcagcgaataatataaggattaatccattaaatatctttttcatgtcagtcatagttttagaagcttacatttaaaccaaaattaatcacacgcattaccggatattgcggtacgccactggacatagattccggatctgatattttcagcttatcaaatgtcagcagattataaccggtcataaatacacgcatcttttccatccctatctttggcataaacgggaggcggaagttataaccgatttcaatgttcttcaaacgcaggtaacttgcatccttcacccacaactcggaatcccgatagttattcttcacaccgtcaatcgtggcacgtggcaatttagccgtagctgccgtttccggagtccaacgatcagtaaattgatgactcatcagagacctgtcgtaagtttctccaagaggtttacggaaagtttcttccagaacacgggatgtttttgtagctcctacccacagcatact

SEQ ID NO: 6341 - DNA, 76755 bp, Unknown
  gut microbiota DNA sequence
gacaaaagaaaagataacaggactataaattatagaaaaaggttgtgccaacgttttgacacaaccccattatagccattttgctacaatttcttctgtcttatcccatagttccttcatctgtacatgatgaaagaatttctctgagagctgtttaggatggcaacttacattcaatgttccggtacgttttcccgcatcttcatccagtaacaaactgatggccgtcgctgctccctgacgaggcgtacgtatgaaaggccggaaaaagatatccgtcaacggatcaaaccacatatgcatcgtaatgatttttgtggaaacaatacccggatcagctgcattgacaataattcctttttctttcaccttcttcgatagagctattgtaaacagagtcaatgccaattttgtattactataaatcggaatacgccagaaagcgcctttctttccacgcaaaaagaagtcaggaaaatccagtttaccaatggcataagtacaggacaccatatttacaatccggcttccctttcccatcaatggaagcaatttacgggtcaacaaataaggagctacataattgacacttactgtacgttccaatccatcttcggtgatacaacgtctcgtttccatggtgccagcattgttcattaacaaggtgatagcttctccacgctgaagaagttcattggcaaaagaagccgtagaagataaagaagcaagattgaccggtactatttccaatgctatatttcctgtttcccgcattattaactgacgtttctcttctgcgatttcaggatcacgacacgccataatgactttatatccggcggtagcaacagcgcgtgtaatctccattcccataccgccatccgctccggttataactgcaagtttctgtttcattatccttttgcttctatttttgtaatttcccgcttcaaaccagctggaagttcttcgttcaaatgctgatggcatgccatttcaatggaatacattcgtgcaatacagtaattactatgtttacaattacagattgctttctcctcttcacgcatacggttgacaaagcccggttcattaagcaaagcacgtgccatctgtactgcttcaaaaccatcattcagtacctcatctattttttcacgcgaaactaaaccacctacatataccaacggcatctttatttctgcccgaaatttcagcgcatcttccagaaagtaagcctctttgaaaggaacggtaggtatcatccacttccctaccattcgtactccatacttcagccaccagcaattcatataatgagtcatagaatgaataggcatctgaccacgcatcacatacataggagccttacttacaaaacctccacttagtaccaatgcatgagctcctgattgctccaggcgttttgccacctgcatagtctcatccatttccattccaccacgaaaaccatcgcgcatattcacttttaccaatacagccatgtcggttcctgcagctttcattacctcctccattaccatatccataaaacgcattcgattctccaaggatccaccgaagcagtccttacgccgattggtataaggagaaagaaactgagaaatcaaatatccgtgtccggcgtgtatttcaacggcatcaaaaccagcttcacgagccagatttacagcatgaccatacgcgcgtgccatctcaggcagctcctctttcttcaagccacgaacaaaagtaggtgagtaaagattgaaaccgctggaagctccgacaggagtaacaccacagatgcttttgtgcgacatattgccacaatgtcccaactgtatagccgcagcagcaccttcggcatgtacagcatcggtcagcttttttaatccggggataatttcaggccgcatccataattggcggtcgaacgacaaaccactttgggtgacagctgcataggccacagtagtcattccaacaccaccagccgcaactgaacgatgatagtcaagcaacatttgcgaaggggcattacccggacacatactttcaaatgccgctgagcggatggtacgattccgtaaagtcagcgggccaaaagttacaggagtaaataacttgctcatgagtattattaatgatttgtgatttataagtgagagaaattaatatagaaacggaaaaacacgtttccggtttcctaccgcatctccaaattcttctttatagcgatgccagatagcattggcacgaggaactaggttagccactgtccaccataggaagaccagcccggaaagcgaccatgtcaatatagcccatcctgcccattctataatttcaccaaagtaattggcagaagtgacataacgatacatcccctgcgacggcagataatgctgcgtatctcccggtttacgaagatggcgaattacataatccgaataccagttgattcccattccggtgaagaacagcaatactccaagaataaactgtggagtcttcagccagtccagcgtataaagagtttcaggagccagataaaaaagccattctccttgcataaagccattcaggaggttgaacaacattcccatcatcataatagcaagcggcatacggctctttcccttcaacaggaaaggaaatacaaaggcacgctggaaataatgcaattggaataagagaaagaaaattaaaggaacaattgaattatatcgtgctgaattccaccaaagtaataacatcacaataaacacaggtgcctccatcagcatccacgccaacttattattgatagaaatgccccaagatgcagttcggaacattccatatcccgctttgacaaaatatagtgcgataaaaacaaacagtgcgatgatgctcattacaccaagaaatagttgaaaagtcccttgttccatacttgtttcgatttaagtacgggcaaagatatataaaaaggaggaaaaagaaaacttcctccccttaattagtttacaaagacgttagcgaattattaaaaaaacaatgaactttaaatcaaagtgataagttcgcaatttacgtcagaaataagtacaaagttacttacaaaaggaaacaagatgagacatagtcgtatatttagggtatctcagtcccatacttagggtatctcagtatgatacttagggtacctcagtcgcatactgagatagggttattatacgcctctaatagtcaactagttacaaaaccgcttttagaatcaataaatcagaacaaacagtttagaaaaaacggtctcattactgatgggttatgaattaattcaccacagattacacagattgacacaaattctattttactgattattagattaataaatctgtgtgaatctgtgtaatctgtggtgagtcttattcattcctataccgttttactcctatttatcgcttcttgataggtacataagtcgtatcttcgagtacatttttgtatgccggacgaatgatacgcttaccttcaaagttcaattcttcattacggtgtgcacaccaaccgacaatacgagccatagcaaacaacggtgtaaaaatttcctgcggtaatccaatcatttcataaacaaagccggaatagaaatcaacgttactcgataccgttttcccattgttctttacgcgaccgaaagtttcgatagcacgttcttccaagagctcaaggaaagcaaactcacgctctttccctttttcccgggcaagatcacgagccagttctttcagtaagatagcacgtggatcagaaatcgtataaacagcatgtccgataccataaattaatccggtcttattataaacttccttattcagcatacgggtaaagtaagtgtcgatctcatccacacttgtccagtcctgaatattctcctgtaaatgatggaacatatcagccacctgaatatttgcaccaccatgaagcgggcctttcaacgaaccaatacctgcggcaatggatgagtatgtatccgttccggtagaagaagtaacgcggactgtgaaagtggagttattacctcctccatgttctgcctgaagcaccaacaaaaggtcgagcgtacgagcatccagctgtgtataattacgtttcagcatataaaggaaattttcggcaatagaaagattttcctgcggatggcgaatatgcaatgaacgaccgaaagtggcatggcgcaacatattatatgcataagcaataatggtcgggaacttagaaatcaattctatgctctggcgcatcaggttgtcgcgggaagtatcatcggcagcagggtcaaaacgatacatctcaagtacactgcgtgccaggatattcataatattattcccttccagttctataatattcatcttagtcttctgctccaacggcatattatcattaatcagttcacggaaagaagccaactcttccttatcgggtaaattaccggacagtaacagataagccacttcttcaaatccgaaacgtttctctttaacaaaagcatgtacaatatcttctacatcataaccacgatagaacagcttacccgggataggtttcaagccgccgcccggaacacgttcataccccactacattaccaattctggtgagtccaaccaaaacacccgtgccgtcttcattgcgcaaaccacgctttacatcaaatttggagaataattcggtatcaatccgaaccgcttccttcatatcctcggaaagcttataaactaaatattccttcttcattttcgtatcgttttaatcgttagtattatttttcaattctttccactatctcccgagtaaaggcagaagtagacaacgagacgccaccgggcatgaagcgcgccaggtcggcggtagcacgggcatcaaggaaactttgttccaaggcatgttctatcaaggaagcagattctttccaatcaaagtattcgagcatcattacggcagacagaatgatagaacagggattcacaatatctttgcctgcaatattcggtgctgtaccatgggtggcttcaaagatggcatgtccggtctggtagttaatatttgctccgggagcaataccgataccgcccaccatggcagccaactgatcggaaacataatctccattcagattaagagtagcaatcacagagtattcttcaggaatcaataatgtattttgcaggaaagcatccgcaatacaatcttttatcaccaaccttccatcagccagagcttctccaaactcacgttcagccaactcatagccccactttttgaaacctccttcggtaaacttcattatatttcccttgtgtaccaatgtcacggaaggcagattattctcaagtgcataccggcaggcagcacgcaccaatcgttccgttccttcttttgaaacaggtttcacaccgaaagaagatgtcttggggaaccgtactttcttcacccccatctcatcgtgcagaaacttatagaacttttcagcctccggtgtaccggcttcccactcgatacctgcataaatatcttccgtattttcacggaatacacacatgttcaccttctccggatgacgaaccggagagtgaataccctgataccaacgaaccggtcgcaggcatacatacaagtccaatgtctggcgcaatgccacgttcagtgaacggataccaccaccgacaggggtcgtcagcggccctttgatacctaccttgtaatcacggaaagcttccatcgtttcatcaggcaaccacaggccacatttttcaaaagcccgttcgcctgcccacacttccatccattcaatttgccgttgtccactatatgctttttgcacggcagcattcacaatagcttgcatagaaggagttatttcaactcctaccccatcacctgtaataaaaggtactgtaattttatccatctttctatcttgcattaagagcagaaccggcacggaaccagcctatctgctgttcattatacgtatgttgagcttcgaagctatccttcgtaccatcttcgtggtgaaggataatcttaagattacggccgggagcaaagtccatcaatccgattaccgaaattaaatcatgttcctgaatcttatcataatcggctttatccacaaaggtcaatgccagcataccttgtttctttagattcgtttcatgtatacgggcaaaactctttgccaggatcacacgaacattcaggaaacggggctccatagcggcatgttcacgactggaaccttcaccatagttttcttcggctactacaatggaagaaatttcttcggacttatacatctttgccgtaccggaaaccggaccgtacgtattagtcaaacgattccagacactgttagtttctccattgaaagcatttacagcacccatcagcatattgtctgaaatattctccagatgtccacggaaacgaagccacggacccgccattgaaatatggtctgtagtacatttaccctgtgccttaatcagcaacggcatattaagtaagtcggtcccttcccaggcagggaatggttgtagtaattgaagccgttgcgaatggggattcacattgatttccaccttttcactgctgggggctatatacccttcgctaccttcggcaaatcctttcggtggcaattcttcacccacaggctcagagagttttaccttttcaccttcacgattcaccaatacatctgtcagcggattgaaacaaaggtctccggcaatcgtcagtgccatcgtcaattcgggggaagcgacaaaggcgtacgtattcggattaccgtctgcacgtttagcaaaattacgattgaaagaggttacgatagaattcttgcgagtagggttatctgtctcacgtttccactgaccaatacagggaccgcaggcgtttgccataattgtagcaccgactttttcaaaagttcctatcataccatcccgctctgctgtagcccgtatccgttcggaaccggggttcacaatcaggggagcggctactttcaggtgcttctcttcaacctggcgggccagggaaacggcacgacttaaatcctgataagacgagttggtgcacgaacctatcaatccgacttccatcttgcgcggataaccgttaaccaatactttttctgcaaattcagaaataggcgtagcggcatcgggagtaaaaggaccattaatataaggttccagccttgaaagatcaatctcaattacccggtcgtaatacttctccggggcaatcatgatgtcggcatctgcacgaagatcacccgccacagaatcagccatttctgccacttcttctcttcctgtagctttcagataagtagccatacgatcatcataagggaaaagtgacgtagtggcaccgacttcggcacccatattacaaatagtcgccttaccggtagcggacaaagaagccgtgcccggtccaaaatattcaatgattgcatttgtgccacctttaaccgtcaggatgcctgccaacttcagaatcacatcttttggagctgcccaaccgcttagttcacctttcagatgtacaccaatcaagcggggcattttcaattcccattccataccagtcatcacatctactgcatcggcaccaccaacgccgatggcaaccatacccagaccacctgcattgggcgtatgcgaatccgtacctaccatcattccaccagggaaggcataattttccaataccacctgatgaatgatacccgcacccggttgccagaagccgataccgtatcgggaagaaacgtcacgcaaaaaatcatatacttcttcgtttgtcttggtagcagtggcaatatcttcccgggctcctctataggcctgtatcaaatggtcgcaatgtactgtcgaaggtacggcaacttgttcgcgacctgcattcataaattgcagcaatgccatttgggcggttgcatcctgcattgctacacggtcagggcggaagtttacataatcttctccccgcttgtagtcttttacccccttctcatcaaacagatgagtgtacaaaatcttttctgctaatgtcagcggacgttgcagtatagcccgcacgtgttccattttccccttataagaagcataaaaggcctttaacatagttacgtcatacaccataatcacatttatttttagttttccaatattgtaaagattacaaattaatataataaacaaattaaaatcgttaaaggtttaacaaattaaagcttttcttcgtgcaaaagcgaagaatgattacctttgcgaaaaaactatgcgataaatgataatttagcagcgaagctattgatattctgactatctcaattcccctcctccagttggaggaggggtgcccaacgggcggggtggtaggtgagaaagaaattccttaattttattattcataggtattttattgttttacctaccacctccccctacgggtactccaccccctccgactcccccgttatcgggggagagcaattcccaagaggaggagaatttgaaatacttcagcctttcactcgccgttaaattatcatttatcattattcatcattagtttatatgagcaataacctcctttctccaacagaccatcttcagcgacaagaactgctcctgcgcatggaatatgaattcgaaaaggaagaattcaaaagacagactgaaaccatgggcatcgcccgcaaggtgaaacggggactctgttggtatcctgccactcccggacgaagttactacaattcactgaatcaattagtaatagaaattacacatacggaagatactgatatagaacataattttgaattcgggcgtcccgtctgttttttccgtaaaggatacgacgaaaagatcacatatttcaattctattggtactatcagctatgccaatgaaacacgtatggttgttgcaatgcccggtgcaggtgctatactggaagtacaatctgccgaaaacctcggagtgcagctttattttgatgaaacatcctaccgcactatgttcgaagcactctccgatgtaattcgcgctaagggcaatcgattggcagaattaagagatattatgttgggaactttaaaacccggattccgtgaactctaccccgtccgtttcccctggctgaactctacacaggaaaatgcagtgaacaaagtattgaactcccgtgatgtttctattgtacacgggcctccgggaacaggaaaaacaactactctcgtagaagctatctatgaaacattgcaccgcgaacctcaagtgctggtttgcgcccaaagtaatactgccgtcgactggatctgtgaaaagctcgtagatcgtggtgtgaatgtcctgcgcattggcaatcccacccgggtaaacgacaaaatgctttcattcacttatgagcgccgcttcgaagggcatccggcctattctgaactatggagtatccgtaaagccatgcgtgaaataggtggcaagcatcggggcagttatgaagaacgtgaaagcgcccgcaatcgtatgagtcgcctgcgtgatcgtgccacacaattggaaatacaaatcaatgccgatctttttgacaatgcccatgtcatagcctccacccttgtcagcagcaatcaccgtatactgaacgggcgtcacttcggtacactttttattgatgaagctgcccaagccctggaagccgcctgttggatagctattcgcaaagccgaccgtgtagtactggcaggcgatcattgccagcttccgcctactataaaatgttacgaagctgcccgtggaggcctcgaatgtacattgatggaaagagtggttgccaataaacccagcaccgtctccctattaaaagtacaatatcgtatgcacgaggatatcatgaaatttccctctcagtggttttataatggagaactacaagcggctcctgagatacgataccgcggtattctcgactgggacactcctatcaactggatagatacttctgacatggattttaaagaagagtttataggagaaacattcgggcgtatcaataaagcagaagcagatttacttcttcaagaattaaaagcttatattaaccggataggtggaaaacgcgtgttagaagagcggatcgatttcggtataatctccccttacaaagcccaggtgcaatatcttcgcaataagattaaagcaagcggctcacttaagccctaccggagtctactcaccgttaacaccgtagacggcttccaaggacaggaacgtgatgtcattttcatcagcttggtccgtgccaatgaagacggacagataggtttcttgaatgacttgcgaagaatgaacgtagccatcacccgtgcccgcatgaagctggtgatattgggcgaagcggaaacaatgaaacgccacaagttctataaggaactcattgaatacatccataccatcacatagactcgccgaaagaaaaactcatcgacttatactgaaatatctttttcccagttgagataatatattttcccagttagagaaatatattttctcaactgggtaaaaataggcttgctttaaattcaactatagaaatcggagaacttaatataaacaccggatatttcggctaatccttttttatcaataatagatttataaagtccccggtaacttcatgctttgttataaaaaaaagaggagcaacttacgttactcctcccattgtcttcttcccgaacttaaatcaggattacggttacaaatatactacattgaaacaccgaaatcaagtattcgggcatttttattcttaatccccaagaaggattagttgttttccggacgcaactgacgaaccgtaacagcagtctgccacatttcgctttcgcgcaactgacgaagttcttcgttcagtttctcacgataatcaggttgagaattgctatcgatagagatctgagcttcattaccagacttaacgcttgcatacaatttctgtactaccggcttaatagcatcgtggaacggagtcatccagtccagagcaccgcgttgtgcagtagttgaacagttagcatacatccagtccataccattctttgcgaacaacggcatcaatgactgagtcaattcttctacagtttcattgaatgcttctgacggagtatgaccgttttcacgcaatacttcatactgagccaacagcaatccctgaatagctcccatcaatgaaccacgctcacctgtcaggtcagaagtagcttcacgttggaaagtagtttcaaacaaatatcctgaacctataccgatacccaatgcaatggtacgatccatagctttacctgtagcatcctgatagatagcgtaagaagagttcaaaccacgaccttcaaggaacatagtacgcaatgaagtacccgaacctttaggagctaccatgattacgtcaatatctttctgaggaactacacctgtacggtcgctccaagtgatagcgaaaccatgagagaagtaaagagcttttcccggagtcaggtaaggtttgatagtaggccatacagacattacggctgcatcagacaacaagcacataatgatagtacctttctcacaagcctcctcaatgccaaacagtgtttcacccggtacccatccgtcagctattgctttctcataagtcttacccggacgctgtccaacgattacgttgaaaccgttatcgcgcaggttgcatgcctgtcccggtccttgtacaccataaccgatcactgcaattgtttcatctttcaaaacttcacgtgctttttccaaaggaaactcttcgcgggtcattacattctcagtaacaccgccaaaattcaattgtgccattttcttttttagttttttatttgtggcttgcgccagctaatgattaataaaattatttctctgtaaatattacttttgaacggcaaaccacctcgctgccattctttttcacttcaatatcgaaagctccgtcacccaattcatctttatagagtgtaagttcatcaccgtaataactctcagctacgtaagccatttcaaaacggcggatacgcttttccttatacatctctatcggaaacaagtccatgatatgttcgatgtagcggatactgttcacgtgtccgttgatgtcgatatcactgtatttagctttcaatgtagctaccggttcggtagaagtcactttgatgcgtgaaggtttctcgatagggcaaggttcatcgcacacataatctacaatgctacctccgtgcaatgccagcaaatcggcaggcttgcgggtattgaggttaatcatagcccacacagaacgcgcataaccaatcttctttccgtctttgtccaacaaggcaaagttacgatctgtgaaaaggcggtatacattctctacccaagtccagatggtaaagtcctcatattgataaggcatttcatccagttcgatggcaaggcgggagagtacccatgtgtagttgtcctcattcagcgtggctataccgaacccacggtcgctggcatggaaaccggcgcaattcagcaaatggtttcccaacacgcccatggtaagacgcccggtaaagtccacatgaaaaggctccgctacaaactgatattttcctatcttactactattctcactcattgttttgctccttttcttttttcaagcgatatttcgtttcacggtcggcaaggtattcgttcacacgctcgaagcaactcgtggtgatagccacacgccctgaacgaacaaactgaagtacacaatcaagggcacgcaactcgtcataaagattggtgatttcttcacccataccattcttctctacgatagcaaacacagcattcacctctacgatacgtgcattatacttgcggattactttcgatacctccggtttttcttccagtatcggggttgttatcttatacaatgcaatttcgtgctgatagatctcatcatccgtgaagtagtgcgcttgaagcacatctatcttcttggtgatttgcttggtcactttctcaatggtgtctttatccgtccatgcggtaatagtgtacttatgtacacccttgatggacgaagccgaaacattcagactctcgatattgatctggcgacgggtaaacactgcggttacctggttcagcaaaccggcgaagttctccgaatgaacgattatcgtatataatgtcttatccatactaaattaagaattaagaacgaagaataaaattagcattccaacaacatctggtttaccgaaccacccggaggtgtcatcggcaacacattgccttcttccataacgcaggcttccaacaggaacggaccatccgtagcaagcatttcctctattgcacctttcagttcttcacgcgtcattacacgacgtgaaggaatgtcgtaggcagaagctatcttcatataatccggattcagcatcggagtgaacgaatagcgacgattgaagaacatcgcttgccactggcgtacattacccaggaagttattattcagcaagatcatcttaacgggagccttctgttccataatggttcccatctcctgaatgttcatttgcagaccaccatcacccataaatacacatacagtgcggtcgggacgtccgaaagttgcaccgattgctgcgggaagtccgaagcccattgtacccaacccaccggaagttacaatgctacgttccttactatacttaaagtaacgggcagacatcatctgattctgaccaacatcagtaaccaatacagcttcatgattcgttgcctcacttacggcacggatcacttctcccatactcaaagatttacttgccggatgcaactcaggacggatcaccttttcttcctctactttctcgtaaggcaagaaactatccaaccattcttggtgagtagcaggtttcagaagtgccgtaacggcagcaagggtttccttgcaatcgcccaatacggcaatatctgtcttcacattcttgtctatctcagcaggatctatatcgaaatgaatgattttcgcctgtttggcatacgtatccaactttccggttacacggtcgtcaaagcgcatacctacggcgataagtacatcgcacttattcgtattgatattcggtcccaagttaccgtgcatccccagcatacctttatttaaaggatgtgcagtaggcaaagcagagagtcccaacagtgtacaaccggcaggtattccggctttttctatgaaagcgcgtagttcctgttgtgcatcacctaactcaacaccctgtcctaccaataccaatggacgttcagcgctattgatcagttcagcagcctggttcacagcctcttcatccatttcgggaacaggctggtaactacggatgtaatccaacttggcaggagcatattcacttttctctacttgtgcattcttggcaaagtccaatacaacaggaccgggacgaccgctttttgcaacatagaaagcgcgggctacagcccaaggcacatcttcagcactacgaatctgatagctccacttcgtgataggctgcgtaatacctaccaggtcaacttcctggaaagcatccgtcccaaggaatcccgtacctacctgaccggcaattactaccaaaggggtactgtctatcatagcatctgcgatacctgttatcgtattcgtcgctccgggaccactagtcaccaggcagacacctacttcgcctgatacgcgggcaaaaccttgcgcagcatgagtagcaccctgttcgtgtcgaaccaagatgtgattcaatgtcttccgatggtcgtataaagcatcaaataccggcatgatggagccacccggatatccgaaaatggtctttactccctgatgttccaaggaacgcatcaatgcttcagcgcctgttattatatctttcattctattaatggataatggaattctatttcatttgtcaattctcggttaatcaatcagtctcactgcacccttatcggcagaacttaccatactggcatacgccttcaaactctttgagacttcgcgttgacgggtgacgggggtcatcgggcgggcagtcagttcttcatccgtcagtttgacgttgatagcacgtccggggatatcaatctcaatgatgtcaccgtcctgaatctttccaatattacctccggcagctgcttcgggagaaatatgtccgatactcaatcctgacgtaccgccactgaaacgaccgtccgtaatcagtgcacattccttgcccagatgacgcgatttgatataagaagtcggatagagcatttcctgcataccgggaccgcctttcggaccttcgtgtgtaatgaccacaacatcaccgctgaccactttcccggcaaggatgccatcgcaagcagcgtcttgtgaatcgaacactttagcaggacctgtaaatttccagatactttcatccacacctgccgttttcactacacagccatcctgagcgatattacctttcagtactgccagaccaccgtctttgctataagcatgttccaaatcgcgaatgcaacctccggcacggtcagtatccaattctttataatagacatcttgcgaacccagtaccagattgaactttccggcagcagcgctcttatatttcttcacagcttcttcgcaaacattcgggctggtaacagcgtatttgtcaattacatccgccagcgtcataccgtctacacgctttacgttcgtatcgactaatccgcctttggcaagctcgctcatgatagcgatgatgcctccggcacgatttacgtcttgaatgtgatacttctgagtattcggggcaaccttacacagacagggagtcttacgtgacagcatatcgatgtcatccatactgaaatctgcctctgcctcgtgtgctacagccaagaggtgaagcactgtgttggtagaaccacccatcgcaatatccagcgtcatagcattcagaaaagcctgacgggtagcgatgctacgggggagcacactgtcatccccatcttcataatatttataagcattttcaacaatcagtttagcagcatccttgaacagttgcgtgcgattggcatgagtagccacaatcgtaccattacccggcaatgccagtccgatggcttcgttcagacagttcattgagttagcggtaaacataccggaacaacaaccacaagaaggacaagcatgttgttctatctgagccacatcggcatcacttacactttcatcagccgacttaatcatagcatcgatcaaatccagatgctgaccgttccattcgccggcttccatcggtccgcctgaaacgaatacagtagggatattaaggcgcattgctgccatcaacatacccggagtaatcttgtcgcagttactgatacaaaccatcgcatccgctttatgcgcattcaccatatactctacgctgtcggcaatgatatcacgtgaaggaagcgaataaagcattccatcgtgtcccatcgcaataccatcatcaatggcaatcgtgttgaattcggcagcaaagcatcccagcttctcaatctcagctttcacctgttgtccgatttcgtgcagatgcacatgtcccgggacaaactgtgtaaatgagttgacaattgcgataataggttttcctaattgctctttcttcatgccatttgccatccacaacgcacgagcccctgccatgcggcggccttgcgtgctgaacgaactgcgtaattggtgtttcatcttcaaatctccttttaattaaaaagccttcctcacatatggtgagaaaggctcctaaattgatatcttaacgtacgaatacatacacaacctttctcacgctcttgattccaggaccacgacgcgaataatatgcaggactgccaggttaatagatgtatgtaagttcataactttatttactttactgttttcgttaatcgtgctgcaaaggtaagggcttttttataaactccaaacaatttgaagaaaaaaatgagattattatgattaatcgtaagaaaaccccgcattaaaatcttattttatcacttattcaaggcaaatctgagtaattcgctaccatgaacaggaattattcaagagggttcgaagcatttaataatctgaaaattacaagagcttactcattcgccaactaaattattcgtatctttgtcccttccaaaaagaaaaaacaggaattactaacttaaaacagtaggaatatatcaatggaaacagtagaaaacaagtacattaccgtagcttataaattatacgctatagaagatggtgaaaaagatttcaccgaagaagccaccgcagaacaccctttccaattcatttccggtctgggtctgactttagagtctttcgaagatcaagtgaaagatctgaaagcaggtgacaagtttgatttcacaatcgcttgcgcagatgcttacggtgacttcgacgaagaacatgtaatcgaccttccgaaacaaatctttgaagtagatggtaagttcgatagcgaacgtattgtagccggtaacgtagtacctttaatgacctctgaaggtcaacgtatcaacggaaccgtacaagaaattaaggcagacgtagtggtaatggatatgaaccaccccttggcaggttgcgacctgaactttgtaggtgaagtaatagaaagccgcccggcaaccaatgaagaattagctgaaatcgctcgtatgatgagcggcggtggatgcagttgcggttgcgatagctgtggtgacggttgcggtgacggatgcggcgatcacgatcaccagggatgcggatgcaatcattaatatagtgattaacggtaagtgattagtgattagcatgctgcgctattatgctgcacagtttccaatcactaatcactcaccactaatcactatttccccgtcattatctccagcaccaatttatccgtctcattcattcctttcgaccctatcttggtcagattacggatactttgatccacgtcttcatcaataataccttctacagaagttacacaacggttttccatagccatgatggcagaaagaacagcggtagatacacctgttgttactttcaacgcacagctgggcttcgcaccgtcacaaatcatacccgtaaggttggctatcatattctgaacagcataagccacctgatcgtaagttcctcccatcaaccaggtaataccacaactggaacctgtagcagcaaccacacagccgcataaagcagacaaacgtcccaaactttgtttaatatagattactgtcagatgactcaacatcagagcacgtatcagttcttcttctgatttatcattttcttcagcgaagacgagtacaggcaaagtggcagatataccttgatttccactaccggaattgctcattaccggaatcatagcccctgccatacgagcatcacaggcacctgatgtataagacaagatatgtgagaagacactatctcccatcactttatgttcataagtgccacgcaacatcttacccaggccatggccataattgccttcaaaagaacgttcggcagccgccttattcaagcgggctgtttccagaataaagctgatctcatccagtggagtattcagagcaaaatcataaactttacgtaaagtcagctccaggcactcttcctctttttcacagcttgccgtatgttgtttctgaaatagaacttctccgttacgttctatatatataaaggtggtatgtcctccggcaatcacagctgttgctttatcatctccgacctcacagcatacttcaatatataatttctcttcaatattctctttcaacgaaatatgaatgcgcttttcctcaatgaaacgtttcccctcttccactacatcaggcgtactgtctttcaacacttccaactgatattctgattttccgatcaacgcccccagcgcaatagcaatgggcaggccaatcattccggtacccggaatgcctactcccatagcgtttttcagaatattagcacttagcaacacatttattttttccggctttgtccccagtgtttctgttgctttagctacgcacaatgccacagcaatgggctctgtacacccaatagccggcaccacttcctgatgtatcaggtcgattatccgttttctctccgtttccgttatcattatttcactgattttaatggacacaaatttagaaaaaatgtttttaatacgtgcgcaaagtcttctatttcaaaaaagaaacttaactttgcgcccgagttttacattattaataaccaaaaactgaattaaatgaagattaaaacgctaacctcgtgtttctttttggcatttgccatatcttcttgtatacaagacgaagcgcttaatgcagaagcggatatcgaaacatgttctgttccgggagatgtactaaaccgggaaccgatcattggtaacgatgaaatcaccttaccgttaaaaaaaggagcagatattacaaaattagctcctgaattcactcttacaccgggagcaactattgaaccggccagtggaaccgtgcgagactttacggatacaaaagataaaccactactctatacggtaacatcagaagacaagcagtggacaaagcagtataaggtaagtgccatgttttccggtatacctaccagttttcattttgaagaagtaacacctgtaaatgataagaatgggcaacctatcttttacaactttcaggaaactgatgctataggtaatttgttgaagtgggcaaatgcaaatgaaggtttcaattatactggcgtacaagccgccgccgatgattatcccaccagtccttctcctaatggaaaagtagggaattgtgtaaaactgacaaccaaaagtaccggtgaattaggcgaacgtttaaagatgtacattgctgccggaaatttatttacgggaagtttcaagattgtaattcccgaggttgtaaaagcaactaagtttggagttccctttaaccacgtacctgtatctctgaaaggttattataaatacaaagcaggagaaacctttactgtagcaggaaaaccggtcagtggaagaaaagacatgtgcgatatctatggtgtattctatgaaacagatgcaaacctaaattcactagacggtacaaatatcttcactgatccgcacattatatctgttgcacgcatctccgatgcaaaagaaacagacgattggaccttattcaatcttaccttcgttaataaaccaggtaaggaagttgatttggaaaaactacaaaatgacggttacaaccttgctatcgtatttgcttcaagcgtcaaaggtgatttatttgaaggagccgtaggaagtactctatatattgatgaggtagaattaagttatatgcattaaagtcagaacaaatgaaaaagattatagtatttatttgcctgttgacactggtaaacactgtgaatatcgctcatgcacaagaagaaagaaatcacggtattatctggtcttcactgcatggattggaatatgaaataaaagccggtataaatatcggtggtgctactccccttcctctgcctcaagaaattagagcattgacaggatacaaccctaatatttacctttctatagaaggaaatatcacaaaatggttcaccaaaaagaaaaattggggaatgacattaggtatacggattgagaacaaaggtatggaagctgatgcccgcgtgaaaaattacagtatggaaatcattggaggaggaggcgaacgtctgtcaggtaactggactggtgatgtcaaaactaaattccgagctgcatacttctctattcccgtgctagctacttatcagcttagcaatcgcgtcagactaagtgcaggtccgtatatctcattcaaaaccaatggagactttaacggatatgtttctgaaggatatttaaggaaagaagatcctacaggtactaaagtggaatttactggagataatacagctccttatgacttttctgatgatttgcgttctttccaatggggcgtacaagccggcgcaagttggagggctttcaaacgtcttacggtacatggagatataacttggggattaaataatatcttcaataaagacttccagacaatcactttcaatatgtatcctatttatctgaacgttggattcggatatgctttctaaggatattcagtaatagaaaaatataaggcaattagttcctaatgaattaactgccttatatttttagaatattctccacctctccctttaaactctatcgcagatacttccaagaaatgatattcttgataatactaatataatatagcaaaaccaatctccataaatagaactactacttactttacaatagtacacattgagattaacccctaataaaaaatctcctgcccttattgttaaggcaggagatttctatttatgatattttctattgttacaagagaattattccacagctaaatatttcacgtacaagctactcaagtcagctcccataaattggtcaccccatttactggaagtacatacaatagccaatttatatttcttagttgcatcatatgaaccattaccggtttccttgaaatcaacagtcacttcctgataatcactctttgctgttccgtctgttaattcagctttcagaataaccttactagaagtattaacattcgttccatccaaagtttcatcatagctgctcacctcaaataaataagctgcaatagaacattgatccaaatccttgtcatcaacaagtacagcgtgatttctaccgtccttttctacactttggtatacaggtgaacccggagtatatttataagtaaaactaaacttactaggcttcttgttataaggcaaaccaaatttagtactcttcaacgtactcgaaatattaatactaaaaacacctgtgaacaaagttccggcagttatcgcaggtaccaaagtaggattgtggccgtcttttgtcaatgttttgaaagtagttatccgagcagcaccatcagcagctttcactacgggaccagccggttcttctggcataataattcccatcaatggtaataaagcagctgcatcattagaagaagtcaggcctaccggatccttttctccccattctttcatatcaaacaccatagttgtagtaaaacgctctatcttaataagaaaatctttagttgtattaggatcttctgctaccatatgatatttaatataatcatcgctgcccttcaatacggaaaagtcaattggctgcttaccatctatctggtcctgagacagacgcacatcgtcttgaccggatacatgtaccaaaatgtactcaaccgaacctttatctgtcactttatagctaggagttaacagcaaatctttatccggagtatcatcccaaatcttcagcgtcagtgtggtacccacctttttctgttcaagaattgcagcactttcgatgatcatttcttccatatttacagtctgactctcaactacactgccaccctggaaagcaactttaactttcaatcccagtgcatcaatattaagttttaaagtcatatcttcaccgataatcgtaccattcagatcagcggtcacttcaccgataggatcttgcaatttcagtgttctggcttctactccaaaagcatacacctcacctctttttactacaggaatggtatctactgtaatatcacccagctcaattccctcaaaagcaaaattcttaatagctaattttatcatagctgtatctctttgctccattttataagaataaggtttgctgatgtaaacacgctgttccattgttaccggattaggaatattagatacattaatatccatatcacctttatatacctttttatagaaagaagttacgtttaccgtatcaccttctatttccgtcaatgtcacactagctgtcaacaccttctcatcaactgtaccttctacttttacattgtacccagatacattatcagaaacctctcctttcaaggtactggcataaatactcttcgttattacagaaaattcagcattaggtattttgaattcagtaactcccggaaccacgttaaataaaacgatagttactttatcactagcatccgatttagcaagttcaattttagcatcttgtgcaacagcccccgcaccttcaactgctaatttgaggttctccccagaatattcagctactacatcctctattgtaggaggaacttccggctcttcgtcatctttacaagcagtgaatacactcattgagcagatcaatgcaaacaaataaaataaattcttcttcataattctgttgtttagttaatacaatccttctcaacgaaggcaacaatgttctatttttattaaacaagtttacgcaggcacaaagaaacagcttataatgcacataaaaaaggtcagttctacattttaatgttctatttttaagtttctctttacttaccttcaatagatatataagtatattagaacgtttacccagaacaatatacaaataaatagagcaaattgttctttataatccttgttgtttagttaataatagcttcccaacactggatagccgtgctttttctttgtatcactttcggggtgcaaaataaccgttttttgtcacaccaaacaaggtcaatacattaatatttttgtcctttttttaatattttctataatattccccatttatataggcatttctatactttattttatagacaacaggattataaacctctcatatcagttctttcccaccctcaccacacctaggacgtacttgctccgtaccaagtccgcagtttctccgtctaaaggtacttctgaccgaagaatgtacggagcaagtacggttcagatacagttcgggtacgatcctagtacaattcaacacaagataaaaaacatctcattccataaaaaaacaatatttctttcttttcatgagaaaaaatccataactatttgttatctttaggcatccaaaagcttttattcaaaggatttggcatgaataaaccttatacataaaccattaaagcaaaagattatgttcaactcattcggcaacattctccgccttaccagctttggggagtcacatggtaaaggcatcggaggcgtcattgatggatttcccgctggtatccgcattgacatggatttcgtgcaagcggaactgaatcgtcgccgtcccgggcaatccctcatcacaacggcacggaaggaaggtgataaagtagaattcctttcaggtatcttcgaaggtaaatcgacaggatgtcccataggattcatagtatggaacgaaaatcaacattccagtgattatgataatatgaaggaagtgtaccgcccctcgcatgcggattatacatataaggtgaaatacggcattcgcgactatcgtggcggcggacgttcatcggcacgcgaaaccatttcacgcgtagtggcaggtgcgcttgccaaacaagcactccgtcaactgggcgtacgcattacggcatatacctcacaggtaggccccatccgtctggaagaaaattataccgcttatgacctcgatcttatagataccaatcctgtacgttgtccggaccctgtaaaggcgaaggaaatggaagaactgattttcaagatcaagggagaaggtgacactatcggaggtgtagtgacgtgtgtcatcaaaggatgtcctatcggactgggacaaccggtattcggcaaattacacgcttcgcttgcctcggccatgctcagtatcaatgctgccaaagcattcgaatacggcgacggatttaaaggcctgaagcaaaaaggttcggaacaaaatgacgtattcttcaataactgcggacgtattgaaacgaaaaccaatcactccggcggtattcaaggcggcatcagcaacggacaggatatcttcttccgcgttgcattcaagcctgtagccaccgtgcttatggagcaacatacggtcaacatagatgggatagacaccacactgaaagcccgcggtcgccatgacccatgcgtattgccacgtgcagtacccatcgtagaggcaatggctgccatgaccatacttgatttttatcttattgaccgtactacacaattatagaagtggtagggtgttaaagtaattcaccttattatatatatttatgaacgaaatacagaaatacatttcaaagaatgaatccaagatgctggaagacctgttcagcctcatccgtataccaagtatcagtgcaaaaccggaacaccatgatgatatgctggcctgtgcagagcgttgggcacaacttctgattgaagccggtgcagacgaagcattggtgatgccctcaaaaggcaatccgattgttttcggacagaagacagtagatcctacagcaaaaacagttttaatatatgcgcattacgacgtgatgcccgcagagccgttagaactgtggaaaagtgaaccttttgaaccggaaatacgtgatgaacacatctgggcacgcggtgcggatgatgacaaagggcaagcattcatccaagtgaaagctttcgaataccttgtgaagtacggtctgttgaagaacaatgtcaagttcattttcgagggtgaagaagaaataggttcacccagtctggaatctttctgtgaagatcataaagaactattaaaagccgatgtcattctcgtatcggacaccagtatgctgggggcggacttaccctcactcactacaggactccgcggactggcatattgggaaatagaagtaaccggacctaaccgcgacctgcattcaggacatttcggtggtgctgttgccaatcctatcaacgtactatgcggcatgattgccaaagtggtagatacggatggacgtatcacggtacccggtttctacgatgacgtagaagaagtgccgcaggcagaacgtgatatgattgcacacattccgtttaatgaagaaaagtacaaaaccgctattggcgtaaaagaactgtccggagaaaaaggttacagtacgctggagcgtaacagttgtcgcccttcattcgacgtttgcggcatctggggtggatataccggtgaaggttctaaaacagtacttccatccaaagctacagcaaaagtatcctgccgtctggttccgcatcaggaccaccacaagatttcgcaagtgtttgccgattatattcggagtattgttccggatacggtacaagtgaaggtaacaccgatgcacggaggacaaggttatgtatgtcctatcagcctgcctgcctatcaggccgctgaaaaaggttttgaaaaagcattcggaaaaaagccactggctgtgcgacgcggaggaagtatccctatcatttcaacgttcgaacaggtgcttggcattaagacagtgctcatggggtttggattagaatcaaatgccatccactcacccaacgaaaacttcccgctcgatatttttagaaaaggtattgaagcggtggtggaatttcatattagcttgtagctcgtagctgcaactcattgatacgtcgtcctcaacaccttgaactctgtacgacggttaatcgcattacaaatctcctgctgttccggtgggagattttttataaactcttctgtcaacacatctccctctttcaggaaaggtgctgatttcagcgtaaacttggtcactgttttaggttgctgttcaccatatcctttcggtgtaagacgttccggatcaatccctcccttaataagatagcgtacaacagactctgcacggcgttgcgaaagacgaagattataatcgtcatttcctttataatcacaatgcgcagaaagttcgatagtaacattcggattgtcattcaacaactctatcagttcatctagagccactgtagattctgatgtcagatcagccttatcaaactcataaaaaatattctctatcagtacagggcgggtaatggaagataacggaaactcaagttcatagaggcgatcctcattaatattttccgttgccatttcttctttgtcattcaaataaccacggcaggaagccaacagggcataacggcatcccggtgcgagctcttgagtgaaagtaccgtctttcttcacgtttatctttaaataagtaccgtcatcccccaccaaagtgacaagcgcatcagagagcgcatctccctccttatcgtacaccaatcctttcaagacatgatgtacctcaggaaactcaaaactataaatatgatcccaaccacgggcatctccacggttagaagaaaagaacccccgattgggagcaccaggctcaaaagtcataccgaaatcgtcaccctgtgaattcaccggagactgcatattttcaatacgccatcgccccgtcaggctgtctgttatagcacggaatatatccagccctcccataccaggatgtccggtagaagagaaatacaaagtaccatccggcgaaaaggtaggaaacatctcatcagcagaggtgtttatttcaggtcccagattgtcgacatagccgaaaccgtcgcgggttatgttgatacgccacaagtccaaccctccctgcccaccgggcatatcagatacaaaataaagataatcacccgcaggagacaacaccggatgagcaacagaagaaagcgtatcattcagaattgcacatttctgaggagctccccactctgctccggcacgctgagaaacataaatctcggcataagctggtgcattgggcaaggtccggcagcgagtaaaatacattgttttaccatccgacgaaaaagagcaggcaccctcttcaaactcactattcacttccgaagcaagcggttcaggcttctgccattgtttcttttcattccgtttagaatgaaatatatcagcactcttcatcccggtaataccgttcaggtcagtacctttcgcttcattacgggtagaggtgaaatacaagatatcgggatcatctcccgcatacataggagaataatcgctacggcgggaaacaagaataggcacccgttttacaatataccgggtaggcttctttttccattcctgcgccagacgacaagaggtgagtccgatttgtgtcagagagtctttacgttctttccctgcaggcaaggtctgtgcgtaagcaaggtaattctcataataaggtatagccgctgcatactcaccattcttacggagcatttccgccagataaaaatgagagagagtatccggataacgataacggacagcattcatataagcgcctttagccttcaatgtataattgatgcgacggtaacaatcgccttgtttataggccagtacgccccgttgcgaacgatctttcggagaagtacgggtataggcggttttataatgacgggcagcatcaaagtattcaccacgagcatagctttgctctgcatggcgcaaactccgtcccactccacaggaagtgagaagtaaaccgacagaaagaaaaaagaaaagaaaacgcctatataatctcatgctccattacttttcatagctcattctaataaactgaaaaatcggcagattattgtatctttcattccgaaccaaacgcctgacgaaacgtacatccgttcttccattcagagcaaccataagcggttttacctttaataatggttcctttgccgcacaacggacaaacttgtccctcaacagaatctgtttgggcagaacctgtttgagttgcatctgtctgaatattccctgtctgcgaagcaccatcaaccggtgtgacaggtttagcttcagcagcctttttccgcggtttactctgacgcttaggcttcgaagcatctttttctttagcagctttcccgttcttaccgtcggcagtcgcttcctgcacagcctgtacaattgtaatatgccggttactgttatccgaaagcacgctcatcacaacttcggaaaccatctgtttcagttcctcaagaaattgtgcagcattatatgttttcttttcaatctcccgtaacttcttttcccagatacccgtcaattcggcagacttcagcagttcttcatggataatctgaataagttcgacgcctgtgggtgtagcaatcaggtttttcttttccttgcggatataattgcgtttgaacaaagtctcaataattgctgcacgcgtagacggcctgccgatgccattctctttcagggcatcccgcaattcatcgttatccaccagtttacctgcggtttccatggcacgcaacaaggtagcctctgtataaggacgaggcggctgcgtccatttctcatataaattaggcacatggggtccgctttcacctttcacaaaagcaggtaatacattctcttcctctcccgggtctttttcttcttgcgactgtgcccccggagttccgaatataactctccatcccggttccagaatctgcttaccggtagtcttgaattcaatctcttcaactacccccaacaccgtagtagtggcaaacttacaatccggataaaacactgcaataaaacgacgcgctatcagatcgaaaacgcgacgttccatatccgtcaggttctgcggatattgccctgtagggataatagcatggtgatccgttacctttgaattatcaaaaacttttttggatttcagcaaagtagtgccatccaaaggtgtcgtaaacgtagcgtagtcacgcagtcctttcagaatgcccggacatttcgggtagatatcatcacttaggtaagtggtatctacacgcgggtaggtagccaccttcttctcatataatgactgaataattttcagagtttcatcagcagaataagcaaacttcttattacattccacctgtagggaagtcaaatcaaaaagacgggggggagcttcctttccttctttcttggttacattggtaatggcaaaaggagaattccgtatttgttccagcaatgccgccccttgctcttggctggcaataggatcaataccccggttttcttcttcctttttgggcttcttcccggcagcgatagcttccttattcttttcagcttccagaatcagctcttcctcacttttccggattatggcagaaaacgttgtatcacgatatacagtcttcaattcccaatattgtttgggtacaaaattcgctatttccaactgccggtttacaatgagtgccaacgttggcgtctgcacacgaccaatggaaagtacctgtttattctgtccatacttcattgtatagagacgggttgcattcattccgagcaaccagtcgccaatagcccggctcagtccggcttcatagagcggttgaaactctttctgatccttcagtttggcaaaaccttcacggatggcttcttccgtcaacgatgaaatccacaaccgctttaccggacagcgtgcaccggctttctgcatcacccaacgctgaattaactctccctcctgcccggcatcaccacaatttataatcatgtcggctttctgcatgagggtttctatcgtatggaattgcttctcgtaagtaggattactgattagttttattccgaaacggggcggtatcatgggcaggcttcccaggctccatgatttccagttcggggtatattcatgcggttctttgagtgtacagaggtgaccgaaagtccaggtaacctggtatccgttcccttcgatgtatccgtctctcctgtctttcgctcctaatacatcagcaatgtcacgcgccacagagggcttttcggcaatacaaactatcattcatctcttttttagtcgggcaaaagtagtataaatcgaaagcagaagcaaatttatttgcactatgctaagatacagcccattttcgggaagcaaaggtacaaaaaagagatgaatgataaaaaatgaattaatctttaaagaataatttcttcctcagtacatttgtaccattggttgcaataacgatatagaaacctttttgcatacctgataattccagaaaattagcgttggtatcttgcaaaagcaggcgtcggccggacaagtcaacgatctcgatccgggtactcatatcattccctaagccactccaggacaattggccgttgtagtaaaacatttctgccgcagacgaggaagcatccggtaaaataccggttgaaggatcatctacgcaagcggcataaagttcatgaatcgaccagtaattgcccttagttcccgtttgcacaatcttgaattttgaagtttcttctgccgggaaagagataatttgtactgatcccgcattcttacccgaagcaacaagtttccatgtgtcgccttcaccggtactcagatacaattcataacctgccggaccatcattcggactcttcgatgtgtccagaataatccggttcagtttctgtgccgctcccatgtccaccatcacccactgtccggcttgctgcgaagcgcttgtatcccaacgtgtggaggcatcatcatcaatggctttacccgcatttgaattgttcgtactggccgtgatcttccatttcagacgatttaacagcgcatccgtagtagtgaaaacaggtgcaatcgtcaagttattctcccacacagctatcttatcaatagttccggtagccacatcggttacagtagacgtaacagaagcctgcttctcgtgtccttcgctaatgaaggcagcctcgtctttcatatttacgacagcattgtgcaaaacgatagtacctgtagtcttgggaaagttcatgaaagaagtccctccggacgtactgaagttcactagattcagattcatttttccactttccacaacgacaccatgcttggcacttccccagaaatccgcaccaaaaagagttacctcacccgaaaagcctgcacgagtagtcagaaagcgggtttctgtatatgtgttactttgatcctcaagggctacaacctgagaattaatcatatcaaagccagccggatcgatcgcctcgtaaaccacggaattccaggaaccatcaatacccaatccaagggagcaacccgatgcggctttaccctggtcggcttgaaagacgatgccctcgaaaccaccatagtggaagtcattgtacaaaatctgattacggcaatcgcccacggtgatgaaacgtaattctgtctgattctgccaataagccttgtcctgatctgcttttgcactgttgggccatgaaccaaactttgtttcttctccacaagcatacactatcgtattgaactgcatattgcagacccgcccaccttctgaaccgccaccgatgcggattgcattcatgaaaacatgtcctgccagataatcgacataatgattgtcacatttataagtaaacaaatccagaccgttgtatgcagcacgcaaacctacattcactacatacacatcctttcccagcgcctgaatacaataaggatattcagttacagtaggcaatgcggaagatacctgctcgggatagtcaaacgacaatccacgcacgccactaccagctgagagtttcaggaaagcctctccttgtgcctgtccgcgccctgcatagacttcaagaatactgccatgcccacgtggaatagtagcaaaatcagaagcgccccgcagttccacacctgtaggaactgtcagattccccagcactttataacgcccgccgggcagatatacaatacctccaccttcactggcagccttatccaatgccttctgaatagcttccgtgttatccttagccatctccagtcccgaacggatatctatttgaagccacatactggttgagctggcagtaaatggtaccacaaagggttcggctccaaagtcaagtacattatacaacgccatacgcaaaggcttggtttccggtactttcatttccgggaactccggtaaaggcttcatctctacaggtgtatgatcaatgcggcattcaaagagggattgattattgatatccgctttcttcgcaaaacgattacctgtaaggattgcacgggcatcagaaccaatatatacttgcggcgcgtcattattaaagtctgtatccgaaacgatgagatcacctcccaaaccttttacttcccccttattgacagtacactgctgcatcatcaatttagaagaaatgccttgttccagcaatactgccgcatccgaggcagatatttcacacccatagaactgtaccggtccagtactggcggatgtcactaccacacctttttcgcaatcttcaatgtgggcccgtgtaaacatgatacctgccgatgaagtaccatccacataaatacccgtctcgcagttccgcaaattgaactcataattatgtccgttaggtgcaccgtctcctcctacgcaaagtccggtactaaaacctttattatagccttcaatatccacatagcatgtatacgaccagtcgttacgacgcatcacaatgcctgttccatgcttatagatccagtcagcataggctccacctgcctgcggcgctccttccagaccggagtccgcccaataatcgggtgagaaatgtatccactcaaaacgccctacatcggctatatggtcaatctcgataccacgtgacagcggagtaccatacacatcgtagatattgggacaaccgcccccgtttttcctcgacagcacaatgccgctataagaattcaccaatgtcacatgacgcacattgcagtaatcgtttccccatacgccctcacgcccgtacaagatagtgggcggataaggttttatattatcaggatcctggtgcggataccagatagtaaggtgtgtcaatgcagtagacggttccatcgtgataaatgcaccggattctgtctcagatccactttgcatatccaccatcaggatggttccttccaccggcttgcctttcaccggccgtttccattctccacgtatcgtcacaccggtaggaatgaccaactttccgaaaatacgataacgaccagccggaacaaacagtacaccaccacggcgattttcgcccaatttagtcaatgccgtctggaaagcatccaacgaatttttcacacccgtaggatcggcattaaagtcagtagtcacagtataggtagccacccctacatcttctgccggatattcatccgacgcgattaatttccagttaccgggtttatcagcagactgcgatcttacacccaaagccaataaggctaacaaactaagaagtagtaatttcttcatgcgatattattattagattatggttcttctataagtaagaataatatcgcaaagatgtggtgggacagttaataagagaattaatctggaattaaaaacaaactaattttcgtgtacaccgcttaaaaacaaaaaggcagggtgttttttaacaccctgcctctctaaaattatcgaaattatcaataaaagctttattcttcgtccatcaggatttccagaatctggcaagcagccttggcaaccggagtaccgggaccaaagatagcagctacaccggccttatagaggaaatcataatcctgtgcaggaattacaccaccggcaattacgatgatatcctcacgacccaatttcttcaactcttcgatgatctgcggaaccagtgtcttatgtccggcagccagtgaagatacgcccactacgtgaacgtcattttcaacagcctcgcgggcagcttcggcaggtgtctggaacaacggtcccatatccacatcgaaaccacagtcggcatatccggtagctacaaccttagcaccacggtcgtgaccgtcctgacccatcttggcaaccataatacggggctgacgtccctctttcttcgcaaacttttcagtcaactcgcaagcacgcttgaagtcactgtcattcttactttctgatgaatacacgcctgatatagttcttattattgctttataacgtcctacaatcttttcgcaagcataagagatttctcccaatgtagcgcgaacacgggcagcttccactgccaattccagcaagttgccttccttggtttccacgcatttggtgatagcctccaatgctttctgcacttcagcctcattacgtccttctttcagacgcttcaggttctcaatctgttccagacgaactgctgtattgtcgatttcaaggatatcaatcggagcttctttctccaagcgatacttgttcacaccaacgatagtctgagaaccggagtcgatacgggcctgcgtacgtgcagcagcttcttcgatacgcatcttaggaataccggtttcgatagctttcgccataccacccaatttttcaacttcctgaatgagttcccaagccttgtgagccagctcgtttgtcagagactctacatagtaagaaccaccccacgggtcaacattcttgcagatgtaagtttcttcctgaatataaatctgagtgttacgtgcgatacgtgcagagaagtccgtcggcaacgcaatagcctcgtcaagtgcgttggtgtgcaaagactgagtatgtcccagtgcagcagccatggcctcgatacaagtacggccaatattgttaaacggatcttgctcggtcagtgaccagcccgaagtctgagagtgtgtacgcagagccagagatttcgggttcttcggattgaactgtttcacaatcttcgcccaaagcatacgtgcagcacgcatcttggcaatttccatgaagtggtttgtaccgatagcccagaagaaagacagacgcggagcaaaagcatcaatatcaatacccgcagctgttccggcacggaggtattccaaaccgtcggccaacgtataagccaactcgatgtccgccgtagctcccgcttcctgcatatggtaaccggagatagagatagagttgaacttcggcatcttctgagaagtatattcgaatatatcggaaataatcttcatggagaatgcaggcgggtaaatataggtattacgcaccatgaactctttcagaatatcattctggatagtaccggccatttcttccaatttagcaccctgttccaggccggcattaatataaaacgcaagaaccggaagcacagcaccattcattgtcatggacacggacatcttgttcaaaggaataccatcgaagagaaccttcatgttttccagtgaacagatagatacaccggctttacctacgtcacctaccacacgttcgtggtctggatcgtaaccgcggtgtgtagccaagtcaaaggcaacggacaaacctttctgtccggaagccaggttacgacggtagaatgcattcgactcttcagcagtagagaatccggcatactgacggattgtccagggacgcaatgtgtacatcacagagtacggaccacgcaggtaaggaggcaaaccggcagcatatcccagatgttccatgccttccaggtcttcctttgtataaacaggcttcacttcaatgtgttccggcgttttccaatcagcatggatgccgttagccttttgccactcagcaccgtttgcaggctgaaatgcggcatatatatctaagttcttaaaatcttttctcatcttacttcaaaagtttagcgttgaattcctttaatgtttccagcacgttaacgcgaacatggataaagttctcgataccgacagccttcagttcttccatgttggcaggagcaccggctacgataaatatggcacggccatccaaagccttgaaggcaggaacagcatattctgcatattcatcgtcactcgaacacaataccacgatgtcagccttggcagccatggccgcctctacaccggcttccactgtggggaaaccaaggttgtcaaccacctcatatccggcacaagccaggaagttgcaagagaactgagcacgtgcctgacgcatagccaggttaccgatagtcaacataaatgctttcggacgcttaccggaagcttccgtttcgagacgcaacgcttcaaattcactggcagcacggtcgaaattcaatgtctgaacatctttttcgcaagtgtcatgaccaccgcagcagcaagtagcttcaagcggtttcttctcacctgccttctcattgaagttcgggaactgattggtacccaacaatacttcgcgacgctgggcaacagctttatgacgggtcttgttactttcgttcacagcagcctgcaccttaccagcttttactgctgcatagaaaccgccttcttcttctaccgcaaggaagagttcccatgcttgtttagcgatggatacagtcaggttttcaatataataggaaccggcagcagggtcaatcaccttatcaaagtgagactcttctttcagcaacaactgctgattgcgtgccatacgttcagagaattcatcaggagccgcatacgttttgtcgaacgggctcacagtcattgagtccacaccgcccaaagcagcactcatggcttctgtctgcgtacgcagcaagttcacatgagcgtcgaacaaagtaaggttgaatgtagaagtctcagcgtgaacacgcatcttagcagcacatttagcttccgcatcataagaagccacaatgtttgcccacaacatacgggcagcacggaacttagctatttcgaggaaatagttggagctgataccgaaattgaatttaatcttcctggcaactacagcagcaggaactccggcttcggtcagttgattcagatattcattaccccaggcaagagcataccccaattcctgatagatataagaaccggcattattcagtgtcagagccgttacattcagtacacggtattccggcagagcatcggttgcttcaatcaaggctttggctgttgccagcatatcgcccttttctttacctttggccagcatcttgtcgaagaaatcatagccgatagaaccttgcaatttcgtcaggtcatattctttcttccggaagtaagctaccaggatttccgcaagtttcactacatgtccctggcacgtgtagaagttcaactctacacaatcagcgcagataccttcgagcaatgtctcgatgtattcggcattgagttctttcgccttcacacggaacgccagtgaatctacgcctttattcagaatatccagcgcttttgtgttagcttccttcgggcattccaccttgatttcctggcgtaccagccattcgttgttgtctttcttggtgcctctgagataagggaattcaccgggaagtgcatccgtcgttttcagtccttcgaggtcttccatgcgatagaaaggtttcaccttgaatccttcgtttgttttccaaacgagtttcttctcaaaatcagcgcctttcaggtcggctgtaactttgtccatccactgttcggtggtggtgggagcaaagtctgagaagagtttttctttactgtctgccatagtttattttataattaaaaagataatgagtaatctcttcacttgcctatttgtctaaaataggacttgcaaatatactcaataacttaataacacaaggttttttaagtaaaattcgcatgaagatatgacattctggaagcatgatttccgtatgtatatgcatgattgcaaagtgcaccttacattttagagtaaaaacttatattcaagcatactactcaattatcctctgcccatgcctgtactcaaaagaaaaactcccggaaaccctttgctacctcccttttaatgcctacctttgcgcgaaatttaataagcaaataaaaaagataaacaaaagtaactatggattggttagagagtttgttatgggaccctgcctccgtcgcccatatcgtatgcttgtatgcattcgtaatatctgtcggcgtgcttttgggcaagatcaagattttcgggatatcgctgggagtcacatttgtacttttcactggtatcctgatgggacatttcggctttacgggtgagacacacattctgcacttcatccgcgaattcggattaattctgttcgtattctgtatcggtctgcaagtaggaccgtcgttcttctcttcctttaagaaaggaggcatgacactgaatatgcttgcagtaggtatagttgtactgaatattgcagtagctttgggcatttacttcatcgacggaggaatcgacctccccatgatagtaggtatcctttacggtgcagtcaccaatactccgggtttgggtgctgcacaggaagcgttgaatcaactgaactacacgggtgatcccatcgcattgggatacgcctgcgcttatccgctcggtgttgtcggtatcatcggttctattattgctatccgctacatctgccgggtgaacctgaaaaaggaagaagacgaactctctacacagacttctgatatgaagcacatgccgcacatgttgcatctggaagttcgcaatgaatctatcgatggaaagaagctcctccagatcaaagagtttatgggacgtccttttgtatgttcacgcatacgccacgatggacacgtcagcatccccaaccaagatacggaatttcatatcggagaccaggtattcatcgtatgctccgaggaagatgccgaagcggtaatcgcttttatcggtaaagaaattcaagtggactgggaaaaacaagatatgccaatggtttcacgccgcatattggtgactaagtccgaaatcaacggtaagaaactgggtagcctgcattttcgtagcatgtatggagtgaatgtaacccgcatcaaccgttccggtatggatttgtttgccgatccgaatctgatattgcaggtaggtgaccgcgttatggtcgtgggtcagcaagatgctgtagaacgggttgccggtgtattgggcaaccagttgaagcgtctggatacaccgaacattgtgactatcttcgtgggtattttcctgggtattctgctaggtagtcttcctatcgctttcccgggcatacctactccggtaaaactcggcttggccggtggtccgttggtggttgctattcttatcggacggttcggacataaattgaagctggtgacttatacaaccatgagtgctaatctgatgctgcgcgagatcggtattgtacttttccttgccagtgtaggcatcgaagctggtgaacactttgtacagaccgtagtagaaggttccggactatcatatgtaggctatggtttcctgattaccgtaattcctttgctgattatcggtatgattgcccgcttttattgcaaagtgaactatttcactttaatgggattaattgcaggtagtaataccgaccctcctgcactagcgtatgccaaccaggcatccggtaacgatgctccggcagtaggctattctacggtttatccgctgacaatgttcctgcgtattctggcgggacaaatgatattgctgacaatgatgtaatacaagttgcattttagcaaaaagagaggtcatgcgaacatgacctctcttttttaatttcaccagattataaacaactccgcttcacttgattttgagtttcacaaactcctccacaaaatctattgtcttctcaattcccagcaccgaagaatcaatgcagagatgataagttgccgcagctccccatgtcttgtaactataataattgtagtactccgaacgttttttatctgccttgctcatcatattttccgcctcttcttccgaaatgtgatgcatagcgcaaagacgggcaacacgtgcctcatgcgaggcagaaataaaaatattggcgcaacggggatgctcccggagaatataatcggcacaacggcctacaaaaagacaggacttctcagaggccaactgacgaatcacatcactctgcactttgaaaagcgcgtcattactaagacaattttgggtaggtaaggcgccatctcccacaaaagggaaacgcataccgaaaagtccgccgatgattccctgcgaagcacgctcatcagctttctcaaaaaattcacgacagaggccactctccttggaagccagagttatcaactccttatcatagaaatcgatgcccaagcgggctgccaacttctcccctatctcctttccgccacttcccaattggcgaccgatgttcacaacgaatttcttattcatagcttcaatctaaatattggtttactgatagcaaaagtaaggatttataggaaagaaacaaaaaaagtcacacgtttttcgccctattcttccgctctcttgaatttacggaactgccttaccaacattaccagcgctaccaggctggcaagtaaatcggagaatggcatactataccacacacctgccgcaccgaaaaaacggggcaggattatcaatgccggaagcaggaaaagcatctggcgcgtaagagaaaggaaaatagccttactggccattccgatactctggaagaaattagatgtcaccatctggaaaccgataatagggaaaaacatcactacgacccgcaaaccacgtgccgagattgctatcaattcctcatcagaagtaaatatagaaactaccagctcaggtataagcattcccatcagaaaaccggaagtagtgacaactgttgcaaagatgattgtcagtttcaacacccgggaaacgcgcgcgtattgctgggcaccaaagttatatccagcaatgggctgcataccttgattcagtcccatcacaatcatcacaaatataaataccagtcgattgacaataccgaatgcaccgatggataaatctcctccatagcgcttcagcccttgattgataacaatcacaataaaacatgccgccagattcatgaggaaaggagacataccgatagcaagcgaatctatcacaatcttacgacgcaagcggaaaatgccgcggtgaaagtgcaagagttcgtctttattgctgaatatcttgaattgccacagtaatgaaatgacctgggcaatgatagtggcaatagcggctccacggatcccccaaccgaagccataaataaatagagggtcaagtatcgtgttgataacaaccgtagcaatagtggcatacatcgctttctgcggatgtccggaagaacgcaacacagcattcaagcccagataaaggtgggtgacgacattgccaagtaaaatgatctgcatatattcgcgggcgtacttcaccgtctcatcactaccgccgaagaagtaaaggatgggatcgagaaatatcatcgtcactaccgtaaatgctaatcccagcactatattcaggacaagcacattacctaatatccgttgagccgtatcatagtctttctgccctaactttacagaaaccagcgtagaagcgcccactcccaccaacgaaccgaacgctgctgcaagattcatcagaggaaaagtaagtgccagtcccgaaatagccattgtgcccactccgtgaccgataaaaatgctgtccaccatattatataaggaagatgccgtcatggcgataattgccggcactgcatattgcatcagtagttttccaatcttttctgttcccaacgctgtgggtgccttttgtcctgtcatacctatttctttattttcagggcgcaaaggtactcattttcccgcaagcaaacaaaagaagacgagaaatagattatttgtagtattatttcttcaagaggtatatcatgctaatttcggctattatggttcaatagatatcaccgatttgattatacaagaagttatgcaaaacaactaatacactatatatcaagcaaataaatttcaatcaaatacaataataaaaaaaaatggggttcattcgggttcatttgggttcaaggttcactatgaaccctacgtgtcacgtatttatgtggggaaaaagctgtttttgtaatataataagaactatttatagaccatcttcgccccattcatcttcgtatcccgacagagtatagtcagaacatttgcaatacagtattattttcgtacattacataataaatgggagtgaacctacacccccaaaaacacatattatccacaaaatcaaaaagcaattaacgcactcactatctgatgattaataaaaatttcagaaatttcatactgacagatagggttcatagtgaaccttgacccctgtgaaccctgcgcaacagtaaaacgatgttacaataaacgaatatggatacaatatcatccctctatcatctatcccactaaaaaatcaactattaaaagagcaaacaaaattatagcaagagggaacaaaactattgcagaagcaaatgaatacccatgaagcccgctggagagtgttaaagtcccggttcagagatgattttactaaaatagaatacgattttcatacctccggaaaagattcgcgcttacatttgtccctcaaatacggaaatacatgaaaactctatcttatcaccactttatttttctgttggccggacttctttttgcaagtaccgtaaatgcccagacagcctatatgcacggttctacttatgaagaacgcggtcattcactcatcgaccagatgttacagacccaaccggtagacaacggtaacataaaatatgtgtcgcctttctacttcgcccgcttatggcgtgactgtgaaaaggaaaaagccatagaaaaactaaccaaaatgtatcaatatcaactggaccatgtggaagcgttctataactccggctcagatatggatttctttgcccatgccaccatgcacggctacatgctcaccaaagaaaaaatgccggactcgctgcgaggaaagattaaagccttcatgaaaataggcaaatataccagagataacggtacgctgaacatgaaactcatgcatcagaccagcggattgctctgcgccgaagaatggcccgactttacagatgccgacggcaaaacctccgtccagctaaaagaattcctgcatgacaggatcgtacatacattaaagcaattcatcacccataactgtcctgaagcggatgcttttacctatctgggaactaatcttcaatatatcaggatgcttgccgaattctctaaaaacgaggagatacgtaaaagcgctttagcagcttaccaccatatcatagcacaattactgttaccctggaatcaaggcctgtattgtgccaatcctccccgttgtaaaggttggaaaaatttatatacgggtaatttgagcaccggtgtacagatcgttcagctaacctggctattctacggtagccctgatgaacgcatcatcctccgtgaagctgcaaacagagacaatttcggctgtttcaacttctggctggcctacgaacgcactgtaaaaccactcccttttctgcaagctctgaacaactcgaaaagctatccttatgatttcaaagctttacggatagacagcaagcattactattgccgctacacttatcaaagtccgaattacggtttatccacccagacagtagaagcttttcctgaaaaactgaaagatttccaatacacctacgcatttaaagagactaagaacatacaccttgtctggcaatcggataattcggaagcatccgtgttcagtgtgtgccatgataaccccgaacgccctcagatttatcagacacactccaacaaactggggtatggggagaatccttatcaccgtgtcttcggatacgaaaaaagtgccattggcgtatataatgtagcagagaactatatgaatatcccccatttctatcagatgtacgtaccattcagccgcaagggcataaaaaagagaatggtgaagaaaatcaacgggttgcaatggatattgtgtcacaccggttccatgatgttcgcttttgccactccggaagaatggacttttgaggtttccggcggcaaatatgatataaaagcacacgatgttctcatcctaaaagacaagaagcgtcgcagaggctcctgggtactggaaacgactgaaatcaccgaacaatacaaagatgcccggggagatatgaaagctgaactggaaaattttgccaacgatatccgcaaaaaggtaaagtttaactgttccggcgactatgaaacgggtgaaactccgggaatttcatataccaacctacagggaaacacactggaactgacattcttttcccccgaaacagcctatagcggacagtataaactgaacggaaatcctgtaaaactgaataccgaatacatatctcaaagcaaatatatggagcaaaaagccaatagtaacgttcttctgttccacaccccggaaggtacaaaaacctggaaattggaataacgtaccaaagttgggaaaaacagtcgtttgagaccttttttataggttttgaaacgattttccatatcccttcccaccccatcggctacttttgcgaatgaaaaacaaacttgctttatgcatatttaaagaaattaatagtatctaaaaaatttaatttatggaaaacagaatcacactctcaaaacgtgtggaaggaaaatcccgactttgggtgactttactccttctatgcttctgtagttttacttgggcacaagtaaaagttaccggcgttgtaacagacccgtcgggtgaagccattatcggtgctaacatcgtagaaaaaggtgtaccgggaaacggcacgatcagcgacatcgacggaaactttaccttaaatgtgaaaagcaacaaggccacagtaaccgtctctttcattggctacaaagacaaaacagtagctctcaacggaagtacaaacctgaaagttacattagaagaagattctcagtcattggatgaagtagtggtagtgggttacggctccgtgaagaaaagcaatctgacgacttccgtatccaagatgacctccgaagccattgaaggacgtccggtcaccaatctgagtgatgccctctccggtcagctggccggtgtgcaaacccagaccagcagtggtattccgggtgaagaaatgcaaattaccgtacgtggtgtcagctccatcaacggttcttccaatcccctcattgtagtggatggagtcatcaccgaaaatatgagcaatgtgaacccgtccgatgtagcgtctatccaagtattgaaagatgcggcagccacttctatctatggtgcacgcggttctgccggtgtaatcctgattgagaccaaacaggctcaaaaaggtgctcctgtcgttaaatgggaatcatacttaggtttccagaacgccgtaggcctgcccgaaatgatgtctcctaaagaatggatggcatacaacctgtatctgaaaaatgcgatgtggctgcaaaaagacggcaataacacactggatacccccaataaagaccgtccgagcggtgaccgcgtgaacccggactggctgctgaaccctaattccgacacagccgactggacattgcgttccgatcttcctcagactgattgggttgacgccattctccagacagctttcacccacagtcaccaggtatcggtttccagcaaaggcgacagatattctatctatgcttctgccggatacctgaaccaggaaggtatcgtaaaacataccggatacgaacgtttcaacttccgtatcaacgcttcaatgaacattaacaaacacatcaaggccggtgtgaactttgctcctaccatttcttcacaggacagaggtgagtctgagggtaaggataaagttatcatgactgccctgaccatgattcctactatcggcatcaacgaaggtacccgctcgctgggtttcagcaaattcagaaaggatgacgttaacccatacgaacgcctcagacaggttaccgatagcagaaatatcaagaatttcgacgttgcatcatgggtagaagcgaatatcatcaaaggactgactttcaagtctatgttcaactatagttctgaaaaccgcatcgatgaatatttcctcccgctcgacgtacagaaaatgtccgtaaagagcgctactgcttcaagcaaagtgatctccggcagccgcaccggatggcaaaatacattgagctatgactttactctctggaagaaacatcagatgaatgtattgttaggacaaagtatagaaaaccgcagcatctatactgccgatatgaaagctaccgacttcccgctggataacgttcctaccttgaaccagggagccactccgagtcaggccagcaccctgaagaatattgttcgtacggcttctcttttcggacgtttaagctacaactatgatgataaatacttagtatctgcatctatgcgtcgtgacggttcttcccgtttcggtccttccaatcgctgggctactttcccctccgtatctgccggatggaaaatcaacagtgaagaattcatgaaagacatagaattcatctccctgttaaagctccgtgcttcctggggtatgtccggtaacgaccgtatcggctacagtgactatgtttctaccttcactaccggaaatgtcgcttacggaaatacttcacaaatagccatctacccgactaactacgccaactcggatttgaaatgggaaacgaccaaagcattcgacttcggtttcgacctctccctgttcaaaaaccgcatacagttgaacgtagactattacatcaaccgcacggacgacttgctgtataatttgcaactccccgctgctaccggcttcaacagtatgcgcacaaatctggcttctattgagaaccgtggttgggaaattgacctgacaacaaccaatattaatacaagatcattcaaatggtcgagcacactaaacctttccggaaacaagaataaggtactggatttaggtggaaacgatgaaatcatcactgatgcatggaacgcacagttcatcacgaaagtaggaggtcctatttctcaattctatacttacctcacagacggtttgctgacagaagccgacttcgaagtaggtgctgacggacgttataatcctaacaagccattagttcctaccgtaaaaggtaagaagcagagacccggtaacgtgaaatacgtagacgttgacggaagtggttctatcgacaatgacgacagagtagcttacggttcaaacgaacctgacgtgatgttcggtttcactaacagatttacttataaggacttcgagttaagcatattcctgcgcggacagattggaggtaatgtactttggattggtgcccgtaacctggataccggcggtaaatatggtgccaacaacacactgagaagatggttgcactgctacaaagaagattatccgaacggtaaccccattcctactgaactgggtgtagatatgtcatgggatggaaaaacaccgactccttacggtttgggtgacaactccgagcaggacggacaattgcacagaacagatttggaaatctttgacgcaactttcttacgcatccaaaatgtcagcctggcctacaatatgcccaagaaatggctgaatgccttgggaatcaaagcagccaaaatttacggaacagtagaaaacctgcatacctttaccgattatgtcggcaacccggataccaatagctacagtaccaatccgatgctcagaggtgcagattacaatacttatccgttgtcaagaaaatatatatttggtgtaaacgtaaccttttaatcagtaacgatcatgaaaataataactaaaatagtagccgtatgttgcttgtgggggctatcctcctgcgacagctatctggacgtcaaccaaccgtctatttacacagaccagagcttatacaagactcctgctgattgtgaagcctccattgccggagtttactcacaattacagactgtctataatcgtaactatctggaagcaatcgtattgagggaagacgctattaaaaacatgaacaataacatcacccgcttcacggatacttctaccgaaaaaacctgggaaaccgcatggaaatcgctctgggtactggtatcacgcagcaataagatattggacaacatcgaccgggtagtcttctctgatgaagatcagaaaaatcatatcaaaggcgaggcttatgccatgcgcggactggcctatctgcaattcgcctggtgctggggaggttctccgctcatcactacggatctttcattggccgaattgcgtaaagtgaaacgttcttcacaggaagagacttaccaacaagcaatcaaggacttcgaactggcttatgacctgcttcccgaaaaaagaagcggcacagaagtgggacgtattaccaaatatgcaatggccggtatgctgggacgtacttacctgtatatgcataatcctgcaaaggcagtagagtggttggagctgataattgccaaagaacccgctttatataaaatggccgacaactatgaagattgtttcgatgataaattcgacaacacatccgaacgtgtctgggaagtgcaatacatgggcggttccaccggtaaagctttgggtatcagccaaacgttcaacagtatgctactcgcttccagtatcaatcttgaaaaggatgctccgttcctacataatgttacgttcaaaggtccttccggtaccgctcaagtttccgagtccatctggggtgaaggggtttatgaagaaggcgatatccgccgggccgctaccatggtgaacaacctttattacgataaagattaccagcatgctgacacttacacagcccgtaagtttctgaaggcaacgcagacgaaacccggttcttatgacgaatggggtaataatatctctattctgcgttacacggatgtcaagctgatgtatgccgaagctctgaatgaagtgggctatgcagataatatcactacaatcttatccatcattaacgaagtgcgcaaaagagccggactggaagccatcgatgctaccagactgaacagcaagcaagctacattcgattacatcgttcacgaacgttttatcgagttctgttacgaaggacttcgttggcccgacctaattcgttggggacttgccgaagaagcaatgaagaaacacttctctctcaaaaacgaaggcttcaacacagctacccaaacaccaatgtatgcaatggaaaaacgtaatctgctggcaccgattccacaatctgaaatcaatgcctatggtgacggaacaatcatgtggcaaaatcccgaatattaaaattctgtcatagaacaaagggagtatacgtatgttgggcaagccggaaaatccggtttgcccactctcttataataaaccctatcaaaagaaatccagtatgatacagaaattgtctgcctccatttttctttgcttttggggaattgtttcggtgtatggaaacctgcatcccgtgatagacaaagatccgttgtccatagccgtcgaagcctttgacaaccagacccacccatatagtaaagaacgcatccaaaaggaaattcaaaaccgcaatgtccgttggaccacccacctgatgaccgccgccggtactttctatgaagccaccggacagaaacgatttctggatatgtccgaagagattttcaggtgtgccgtcactgcctgggaaaaggacgaacagttgatgcggggacgggatgatttcttctctacccgcaacgtggcagccacctacaaattacttaaaaaagaaggacgcctgaaaggaaacgaagcccggagaattgtgattcgttttgccgacctgcacttcgaaccgcatttcattaccgatcataatcagggacaggaacgtgctttaggctttaccagaatgtataacctttttccggatgctcccaatgcaaacctgtggaaagcctatacagatacgatgtggaatttctggtatgccaataaggatgtggacgagaccgctacgttatattcagccatccacttaaacgacattatcaccatcgcacaggaaagcggacggaccgaattgctacagactcccgaaatagaacaatggttttcacgctatcttcaccaacaggctcccagcggttacatgccggaatatggagatgacttcttctttgcctattttgaatggattgtagtctttgaaaagatggctcgcctgacaggtaatgcaagctatcaggaagctgcccgcaaattatataaaacaggacttcccaatttacccgaaaaatacactaaacgaggctggttcctacgggatgcctgcgaatgggcttcgattgcggaaatagccctgttaccgccattcattccaaagacttctaccccggattggggtgccatggtgacaacacgcactaaccgggaaggacaaagtggtataccggaccagctattgctaacagcttcacacgttccgggtactccttttgtcatgagtgacctttatgccgaaggttctcacaaacatccgaatctgcgcggaaccatcaattattttgaaaccgactgttgcccgcactttcacggcgtacaacgtcatgctacggatatgcgtcatggcaacaccgtgatcctgatgaaagaggaaagcaatggtttcccattcggtgaaggctccaatcgctggctgaccaaccgttggtttacagactggattgacttcagctcatccacacatatatcagaaagtgatccgcaaatgaggggatttcaaagcatcactttccgctttcagaatggacagccgggcgaagtgatctgcattgataaggttcggctacgaggcaaggccggagaaaagattctgcatgattgcaacacattggatgcatggggaaacggcgtagagcttgcagacaatgagaaaggcggaaagatgatacgtattactttgaaagataacagtattcattttattaatctgaaggtagcggcagatttcagtctgaatgattaccggtacattggttgcgactggaaacattacacgactgatggcagaatcaagtctcccatgagtttcaagattagagcctacaacaagatcagaaaaccagtggaagactatgtacatgaagaagtgggcgtgctgttcaatcccaatatcgtgcggacagccaaagctgtaaataaaggtaaagactcatacggtgaggtgattctggacaatcactgcgtcgatggttctaccctgcaacgacgcatggtattgacagccgaaggtatcctgatattacaggatcatctgattcccggtgaagataccgaaggatacacggcaggcagtatctggcagttatatcaaatggatgaacggggtgaaaactggttcagtactcacggagggaagaaaatatacagggacactccaaacgcaggtcaaccgtggaaagacgcatccagtaatgaaatagagaaaaggcaattactggtctattttgaaaagcagcccgaccgcagttacggatttcaaaaacaagaatatacgatacaacccaccacagtcttctccaagcaacgtgtcactccattcgagcctttgacatttgttactgtaatcgtgccctacagcataaaggaaaaggccgctgatatcgctcagtctttatccgcacggacccaggatggatgcagcaccgttcaaataaaaaacaaaaaggaagaaatcaccgttcaaataaacatgaaggggagttggaatgtatcccgtaaatagccatataaaaagcgttgacgcttgcatgaattgcatattttgcattatctttaggggctcaatttataacttgaattttatgtttccgaagataatgcagaatatcgcaaaacatctatttatcttgttcatactctcattagggtatattagcgcatcggcacagaacattacgctgaatagctactctgtaaaggatggattatcaaacagcactgtaaaagctatctgccaggacgataaaggttatatttggatcggtaccaaaaacggtttgaaccggttggacggttacgagataaagaactattatcacctgcccagcaaagaagtcaagcagcctaacgatattgtgagtatcacgcaactatcggacggcctcttctggatcggtaccttcagtggaatcgttctcttcgaccccatgcaggaaaagtttatcgatttacaggagcggtatacaggaaaagaatttccctcgtccgtggttgtaggcctgcacgaagatcctaaaaaaaacatctgggtagctaccaaacaaggattatatgttttcaaaagcgacggaacgtgttcatatgtgaaagatatgcgtgatacctatattcacatgatggctgccgcgagcccgtatgccctgttgctggatgtggtgaatcaggggctggcactttatgacgtaaggactgaacgctacaagattttacacaaaaatgaaaaacgtttctccttaatgaaaggatttacagatagtaaaggacgcatctggctcggagaagagctaaagaatttctaccaatactttcctaaagaagaagaaatcaggccaatttcatacacggttcatccggatgttccgatagaaagcaattacattcatgacatcacggaatataatgattccaccctgctgcttgcaaccgaccggggattggtggcttatgacattaagcactctttcttttataccaaagtagatcaacaccttgctataagggaccgcctgatgacagtctataaggataatcaaggagcattatggataggtactttcagccagggagccatttattatcatcccaagctgtttacttttactcatcattctttaacatcctcctctcagcagaccaccggaatccaagtagtaggttcattatccgaatcacaaggtaaattatggatcggacatagcaaggggcttatagccatggatgtaaacaatccgaagcatatagaagaagtaaatatatccggaggtaattctcccaaacacgatacggacttatactatgtttaccgaaattcaccagacgagctctacctctatttcttaaatatgggagtttattcgctcaatctgagaacccgttccataaccaaagtgattgcctcaatgagcggtgaagaacaaatccgtgcaatggcaagagatgcggaaaaccacttatggatagcagaagatgacctgtcttactgggatgagaaaacgcaaaagctggaccggaatctatcgaccaattataatgccactacccggtatatgttgacacaagatattctgcgacatggagatgacatgatagtgggagttcgtaccaatggtttatggatattcaggcatcaacctgaaaatcccgaacactactttaaaggtgaacggaccaccttcgaggaactgaatgacaagaatataagtgtgctctatgaggaccatgccaaaaacatctggatcggcacttatgacaacggattgtataaatgtaatctggaaaaacaggaaatacaccattataacaaagataacggattagtacacaattccatctgtgccattctggaagatcgtaccagcaaggatatatgggtatctgccatcaacggattgtcacagatcaaaccggatgggatcatcgttaattttacccgtggcaacggctttcctttgaatgaagtttcgcacaagtcactgttgcaagccagtaacggacacatctatataggtggtaacaacggactggcggaactggacccgacacgtttgtctcatgacagagagacagcacctttggtacagatatccctggtggaatcactaaattctaaaaatgcacccggccatattgaaatcaataacttcaatgaaggaaacaaggttgatctgccgtatgataactcatccatacgaatcaaatactctgcgctcgactttatctctcccaagggatacaaatatgcttatcagttaaaagggctggataaagaatggcattacattgaaaataatgaagtaatatactccaatctcccggcaggtaaatatattttcagcatcaaagcatgcaataacgaaggaatctggagcacggtagaaacaaccattatcatatcagtacatcctgcattctgggccacctggtgggcaaagaccctctacatcttattcatcatcgtctttctggcagtattagcacgctatttttatgaaaagaaaacagccaagtacaaacgccaaatcgaacagatagaaaaagagaatatcgagaagaactaccagatgaggattgaattattcactaatttctctcacgaactccggacaccgctcacattgataaccggtccggtggacgatatcatcaatgatgaacagcttccttcgggtttaaaatatccgatgaaacagatacaaaagaacgcaaaccgcctgctgcttctggtgaaccaattgatggatttccgcaaattagaacatggagccatgcaactgaaactaagcagcctgaatgtacctgtattcattaccgaacagattgatagtttctccgaattgctgaacaagcatgaacttaccatttcgtactccaacaactattatggcaacaatttgtgggtagatgtagacctgatgagtaaagtaatgtttaatctgctctcgaatgcaataaaacactcttccagaggtggaaagatccagttagaatccaatatggaggaaaacagcgttgttctttccgtgaaagacttcggggaaggtatatctcctgagaatcaaagcaaggttttcgagcctttctttcagataggaaacggcaacaaaggtggaatgttcggcagtggcatcggacttaatctggtgcaatacgtggttaaactgcatttcggcaagatatggctggaaagtacgcccggacaaggaacgacgttctttatacgcctgcaactgggaaaggaacactacgccaattccaatgtaatctatactgaccaggcaattacccatacattgaaagtagaaaagaacagtgtattgtccgtagatccggaatatcaccagcaaatacccgaggattctgataatcgcctgcggattctggtagtggaagatgacgaggacatgcgccaatacattgtttccaaactatccaagacctacaatgtgcaggaagctcctgaagggaaaagcgccatacatatagccagagagcagatgcccgatctgattatcagtgatatcatgatgcccgtaatggacggattggagctctgccgggctataaaaaatgacatggctttagctcatattccggtagtcctgctaacagcaaaaagcctggaagagcatgtaaaagatggatatcaggctttagctgatgactatatattaaagccattcaatgcgcaaatactactggctaaaatagaaagcctcatcaaaaacagagaaaaactgagagacttgttctgccagaagttagagaggacggaagttcctgtagaggaaatcacagtagaggacccattcatgcaaaaactggtagaattaattacagaaaatgcacaggatccggaattatccatggaagttctatataataaattaggtatgagccgtacacaattcttccggaaaattaaggcgatatctgatttatcacccaacaaactgatcctaaatatccggatgaaaatggctgtggaaaaattccagtccggaggcatgaccattgcagaggttgcctatgaagtgggcttttccgatccggcttactttagtaaggtttttaaatctgtattcaatcaaactcctaccgaatatatcaagaatattggtaaataatcggtcgcaggtctaaaatacaagtctttgacactattttcatagtctgtcaaaggcttttcgcctaagtttgcaaaaaattcaggtaaagtttatgaccatgagaaaccacgtgattgcattattactaatactattttttgcaaatacaggctttgcacaacaggccatcgtatctagggagaagccgctgaatttctcccggaaagattgtataaacctgtctatatatgattggccccgtactcttttaagctatccgatttactttccggaaggaatacagtccgaatcggaactgagcctttccgataacaagcagagccgttctgttccattccaattatcagacaaagtcattgaaaacggaaaactgaaatctgccgttataaacttcttcgcagagctaccaagcggaggggaattcaactatacattgtatcttcggaaaaacaatacctcccgacaaagttcacctgttacacttcagaaacaggcgtcaacctggctgatcagtgacggaaacttcggtgtggaaatacctgccggaggaatcaatccggggcacacaattcccgctcccataatctccatattgaacgatcatcaaaagataggcaataacaagctacacaccggacagcgcaccgtaaaagagataaaaacatccgttttagaatcaggcgacttgtttatagaatgtggaatacattatatattagataaccaggcttcttattatgccaaggtaaaagtcatacaaggttatcccttcgtcatcctcgacgaacaaatggagaatatatcaaaccaggatgaggtgtttatagatatggaatgggataacttccatcctacgcgccgttatggcaactgggacaggcaaaaggaagtatcagtagacggaggtttgcccatcgaccaccccatatacaccaactggagccaggaagatccgcactggacaggaatgggctggatagaagagcccgataagcaaatgttgtatcgcctcttacccttcggaggaaattcaacacgcgaacaggttccggcaatctctttctgggaaactcaggatgcagccagagaattaggcgtatttgtatatgaccataatcgctgggatgatcagcaatacggaatctggcagcccactccggatctatctgtatatttccgttatgccggtcagaaattatatttcaagtatccgctccattccggcagccggtccacggccataactttatatacaattgaaaagaaacaggatatagttgacaaattcaataaaagcattgacgaaatagcagtcaagggtggtgcagaccattcggatgagatgggcttccgctacgctatgctattacaccgtcagtatgcgctattaaatttaaataaggtgaaagattggattctggagtatccggcacatgcaaagcatccggatactccctttacagggaaaacaggttcacccactgccgaacaattctatcagcagataataacctctccaatggtttattatatgacaggcttaaatggatttcccggcattcattccatttctcaccgcccgcttttcggcagctggatagaagattacctggcactttacaaacaactgaccacggaacaaaagcagaccgtagacggcctgatgctcatatccgcttacatcaatacactggaagcgatgaataccatccgcacttcattagcgggaaccgctaatatggcagcagacggctgggcagtaccggggcagatgtctttcctctaccccgaacacccgatggccaaagaatgggcagatttctttgaaaaaacactggaaatatacggtatcttctatacacgtcctgaagtaaaagccttcgaatccaaaggaggacgttgggtagaaagcctgggtatctataattgggctttcttacgtcccacctcagctaccaatatcgcactgaaagagttcgatggcaaaaaccgttttgccggaaaatacatggcacaacggggacactggatgctggacatgatgaccgctcccattcaatacaaagaaaagatggaaagaagttatccaccccatggtgctcacggagggggacggattgttccacgctattgctccgtttaccagttggccgactggatgcaatactacgatccgctcttagctgaaaatctatattggaccggcaagatggggccgggtgttgaaaccaaagatacacacaccaattgggggaatgtccatcagaaacaatacccttcccataacatgggaaccaatccgcatttaagaagtacgaaatataccggacacggcattgttctgcgtgcaggagtagacacagacgaagaattgtccattcacttaaaccaggtggataaaggccctaactatcgttggggacatcagggacaaggcaactccggcggactttacttctatgcaaaaggtaaaatatatacggggcatgaaaacgaagtggtaggtgaccatgtacaaaataatctggatggcatcactaacttcggagtaatgaaaaacggggctttctgtaacatcggaatgaacgaacttgtggctccactttatgacctggatatagtgcagctagcagaactccgttccgctaaaggaaaagacagttttgcctggccggaatatttatcacgcagcatcctgctggtaggtacagattacttcctactctacgatcagaccggaacgaattggagagcaggtgcccgtttctcttggttcgttcagaaagaagatgaatttccgcaaatcgttttctttggcaaaaaagcacgcccggatcattggaccaaaggagaaaccaatcattccaaaggtttctaccgggatacggacggttcgctgctgacattggtttcacacaagaaaggagatatcaacgttctacatgggaaagttgtgaacccggctttgctggcccatacaagcatttacgaatttgtacccaaatcccaaaatgaaccatctaatatattgtacatcaaagctcctcacagtactgatgttatcttccgtgatggaacaggaataagccatcagtcagaaaaagaatcattcaccggagaggccggagtaatccgccggatggataatggaaccttgcaacttgctttaatgaagggtacactcctttctgccgacggtttttcgatcgaattgtcggacgccggtacggcaattgccatgacccgcacaaacgccaacagttgcaaaggacgctataagagtgatggaaaagccagattaactctaaaaggaatgtccggcggaaaattatatatcgacggtatcgcacaacagggaacaagcaatatctctttgcccgtaggagagcatcacatagagtatgcacgtgaagttactccaatgccaaccgatattatcgacacagaatatactcctaacggtacacttatttatctggatatacctgcatcagcccaaaaggtaaaaatagaaacatcacgagacaatgggcaaacatggacggaggtaggcacaaccacccggtcagtatacaaactggctccgcaacctgccggaaagatacatgtacgggctctgtctgtaaacggaaagcatacggccgtctttgcccaagagtatccgatttataccactaaccaagcaccacattacccggaaggtctgcacctgaatttagacaaggggaaggtagacttatcatggggaaaagtattaggtgcacagaaatatcgtatataccggagaaaggccggtgacaaagatttcacacttatatttgaaggtaaagccaatcagtatacagatatggaagctgccggagtcatcaaagcatgccgattccccggtaagttagacaatccgactcttgatgccggttcgtttacagtctatgaatatacggttaccactgtgaacgggtatggcgaaagcgtacagtctcctatcgccgatacacatccggcatcctgggctaactggtatccggataccgaactgaaatacaagcgtacctctgcattctggatggaaccttatgtaccttcattcatgacacctgagaaatattatccgaactaacaatataaaaaatacaagaaaatatgaaaagtaaactattcacagcagcattggctgcgttggtgctggcatcttgtgctcctaaagagaacgggtactttgacaatctcccacaagaagccagccctatagaaatcgggaataaaattacaaatcggtttctggaacaagggcattcgcaatatggcagccccttacgtgtgaacgaaccaagaacacaaatcacctatccggatgtatgcacttggttaggaggactttggtttgctcaggaaacagacaacaaggatttaactgaacgtctgaaagcccgtttcgagcctttattcaccaatgaggcttacttgcagccgaagccgaatcatgtagacaacaatgtcttcggagccgtgccgctggaactttacctgcaaaccggagaagagcgttataaaacattaggcatgatgtatgccgactctcaatgggaattaccagccaactggaaactggaagaaggtgaagaacgccaaagcagtatgtatggggatttcaaagatgctgatatctgtcaaccggaacaaaaggaatgggacgacaaaggttattcctggcagactcgcttctggctggacgacatgtatatgatcaccactatccaagcgcaggcttatcgggtaacgaacgaccgtaaatatatagacagagcagctcgcgaaatggtgctttacctggattctatacagcaaccttcaggactgttctaccacgcaccaacagctcccttctgctggggacgcggtaatggttggatggcagccggtatgtccgaactgctccgaatgcttccgcaagacaatccggacagagcggaaatcatgaaaggatatctgaaaatgatggaaaagctaaaagatacacaggatgagaatggtatgtggaaacaggtagtagacgatatttccatgtgggaagaaacttccggttcagccatgttcgcatacgccatgattacaggtgtcaagaaaggctggttacctgccgaagaatacgggccggtagcccggaacgcctggatagctttaaccaaatatgtaaatgaacaaggagatgtggaagccgtatgcgaaggtaccatgctgggagacaatagtgaacactaccgcaaccgtaaagctttaacgggagatctccatggacaagctccggttttatggtgcgcctatgcattacttgccaaataaaatcacgttctttacaaagtaaaaactaacctcacaaaacatgaaaaacatagtattaaccaccggatattctttactgacagcctttttcttgtgcacaccaccactgtgtgcacaagaaaaagtactcgaccggatgacgcgcagtgaagcccgacaggaaatcctccgacataccgaaatcaaagatcatgttactttttatcatagtaacgataaggatatctacgttgtctatgatctgataagctccggcaataaggagaaaatgcttcaaggcaaaaccattctgttaggcatcctagacgccttcgagtctactcggaaccaatctcgccctctggaagtatctttctttgcccgtgagaaatttttcgattccatacgcatacttaaagaaaacaaactgatggacgcggaactcagacaactgtccgaatctcttgtcagtctgatgagtttttgcgaagaacgcggtccgaacaaccgggcagcaaattatgccatgggagccttggcagctgccagattgtttccgaaacacaaagatgccaaattatggaaagcttatgccgaagccgtatggaatgactggtatgaaccgggagacagttatgaacctgcgtatgtggcccataatattccccgcctgatagctttaggtgtaaagcttggcaagcagaaggaattaaaaggggataagctgaaacaggtatattataaattcagaaaccatgtcagttcttccggtctggtatgctctacaggagatggagaaccgtacgaccaagaatcttacgtaaaggcttttgatgccattatggaagtctgtcccgatcctactattttatgggcacttaaaaaaacatatctggcaggcaacatgaaaaccggaagacttccggaagaggcttttgaaaaagcttatccccaatatgcaggtatggaagccaaagccccggaactacaagcttccgtgcaatctcttttccctgccacttaccaaagtaaagatcgcctgatactggcaccttcacgtaaagaaggcgctccgttcgcccaattctggattcaggatgattgcaacgtcctctaccatggtggaatctccgacacacgtggcgacctgatacattatgaagtagacggcaccatgatcattgccgacagaggacgctatgaatggccggcatggaacaatacgctactggtttccgaaccggatgcgcagtatcctttccgtcagaccacgggagtgtattccggacgatggtatcattcttccgccaatatgcgggttacccgagggtatatgccttcaaaacgatacaccatcaattcacaaagatccactgatgttcattttgcactgactgaccagaaggctccttatggttatatgtggggaaacccggaagccgtggccggaaataatgacttgataaacctgcatgaaattaggttggagtttgcactgctccctaccgaaggagaagaatcagtcggcaaggtatttcccggaagaacctggttcggcggatatgaaaaacgcaatgtatgcccttcggatgttcccgtagatatttatatcagtgacctgttcattgccggagataaaggagagaaaatactggtaccgtttgacaaactgacggacaaactgtcatttggcttcgttgctcccgacaagacacagcaattccccgaaacggaattagccaaagaggattatgccattgtaaccgatgcagaaacgggcaaacaggtattgcgcatccgcacgaaatatggccgtacggttctccgtatcaaaatgaatgaacaggttaatgtgaatgaagactatagccgcatcggattatcatataaatatgtcactcccatcaagggttggacacgagtacccatcctgatagccttcaatgataacgacatgaaacataatttacgcctggaccgtcagcaaggtggtattctgactgatgccaaagctgaaaataaggcaggtgacagttatggttccgtatcttacaaaggaatctggacccacgattcatcttggacaagaagcactcttctgacagaagaaggttttctaatcgtattggatgagttcctgccgggaaaagctgccgataagctggtggccggtccggtatggcacgttccctccgctccccgttgcggaaattcggatggggctacagctgactggtttgatgcttccctgctacattaccctgcacaagcacgggctttcactgataaatacggtgaaggagacaaatgtctctttattgctttcgatgcaccggcaggatcggaaaacggaattcagtatcagcctaaacattggaagaatgatgattatgcggtttatagcaaatgtccgctggaggccggaaaaaacacacgctggttatctgtcctggcacctcattccaaaaatacggatgccatcaagttatcccggaacataaaaataagcaatctgggagataagggatatcaagtaaatattcaatggaacgaacagggaaaaagccctgtcaagttggaaataaagatgggtaaccgtgacgaatgggaagtaatacgcaattaataacagaagaatcatgaatataaaatatcatttcatagcgagttgtttactcctgtcaggaggattggcaatgctgaccggttgtagctctccgcagaatttaaaggaatttaccgtggagaatcctttggatataaatcgtgaagacgaagcactggtattgacccgtgcacaactcaatccgacagacaagctgctcaaacctgtgataaccaacggacagggagaatatattccttgtcagctggacgacctcgacggagacggagaatgggatgaactggcattcgtatatacattttccccttccgaaaagacccggttaaaagtggaatggcttactccggagaaatatccggtattcacctctcgtacgaatgtccgctatggtaagatgacctcccccggaattatcgaagaattgtcccgggatgcacacgacaagcataaccttccacgaggaagtgagatgtatccttatcaaatggatggtcctgtctgggaaaatgataaaatgggattccgtcagtacttcgatggccgtaattgttgcgatgttttcggtaaaagaatatctgaaatggtgctggatacagtgggaatcagcccggaaggacatccggcaaatacataccaggtagtacgcgaatggggatgcgacattctgagtgcagccaattcattcggtttgggcggacttgccatgcagactccggacagcctggtacgcatgggtgtccccgcaagttatacagaagatgttatcgactccacctactacgaactggttacagaaggcccggtccgctctattattcgcttgacatataaaggatggcaaatagaaaataacaagatagatctttgcgaagaaatcagtatatgggcaggaaaatacggatatgaaaagaaaatcagcaccactaccctacccggaaattacttcctggtgaccggcattgtcaataacctgaatacgcaacctttcacggaagaagaatatgaagggaaacagtatgccatgctcacccatgacaaacagaccgtaaacggaagtttctatttcggcatgagtttattggtacctgcctacaatctgatagaaaccttccatgcaccggaagaaaacgcagatattataaaaacctggtgcgtcaaaatgaaacctgacgcaaacggactctacaattaccgggcttatgcagcctgggagttgagagacaaacagttccgggaacgggaggcattcatcaacctgatagcccatgaggcattatgcatcaatcatcccattatcattcagctataaaaaatagagctatgaagaagttactgatcagctgtctggtctttttaggcggtttcatttcagttcatgggcaagtttatacaggagctgcctattatccggaacataccgataaagagcaagttgaaaaggatgcacgtctcatgaaggaagcgcatttcaacatagcccggatgggtgacttcgcctggcatagtatggaacctaaagacggagcctttacgctggaatggttagatcatgctatccggacactgtcacagcatggcatacaatctctgttatgtacccctactgccgccatacccaaatggatgcacgatgcacaccccgacatcatgatcatgggagcagacggtcagaggaagccctatggacgccggcgccatgcctgtctcaacaacgaggattaccgccaatactgcacacgcattacacgcaccttggcggaacgttataaaaacaataaatccgtcatcggatttcagatagataacgaactggcaaccgaagagccctattgctattgtcctgaatgcctgaagaaattccagttatggctgaagaagaaatatcagactgtagaagccttaaataaagcctggggaaccgtcttctggagcgaaacattagataacttcgaacaggtatggctaccccgcaggatggataatccgggtatttatctggattatcaacggttctattcggatgtagcattagaattcttccgtatgcaacgggatgtggttaaagccgtagctccgggcatgacagtgacaactaatatcggaggaagtggctttgtgaccaccatgaatctctatgaactggcagatgaatgcgatgtcctgtcgttcgacaattatcctgtaaatgtaactttggaacatctctatgggaatgacatcggacacccttttgatcctgccatgacatcttttgccatgcagataatacgaggaggcaaatcacggtctatatgggtgccggaagcacagatcggacgtacggcccttacacaaaaggagatcgtaaaagagggatatccccgtttatggaaccatcagcaactagcttacggatgtcgtttatccactttcttccccttccgttctttcgattccggacacgagcatctgatggcaggagtcatggaatccgataatgtaaagcgaagtaaattctacgaagcacaacagatagccaaggaattacaagagatttacgcccggacaggtgaaatgttgccgatagctaaagctgcagtaatccgtgatttccaaatggattggactttcgagaatggttatacattctgccctgaccttaaatacctgcgtgaagtatataagtactatcatgctctgcgctctcaatcaattatggctgatgttatctcatctcaggcagatttgagtggttatagtttgattgtagtgccttatctggccattgcttctcctgatttttgccaacgcctggaagaagccgcccggcaaggtgctacaattcttctaacttgtatcagcggggtacgtgatattcatctgcacaagacggatgctttggtcacctcccgtctgcaacaactggcaggcatcgaagtgaaagggcaagaagcactgttcggacgaaaaagtaatactttaacttatggagatcagaccggtcaatgccatttctggttcgaccaaatagaagtaaagacggcttctccgacagcttcattctgtggaaattactttaaaggctatcctgccatcacttgcaacaaatatggaaaaggaatcgtgtactacgtggctaccgtacctgaacaacgcattgcagacaaacttatgaaagaagttatcagtaactcttccataaaggttccggctcaatgtaaccatccgctggtagagattgcaggactgaaagataccaacggtaagcaatatatttatatcgttaatttctcagatgaagatcagataatagaattcaagatcccggttctgaacatcatgacaggaaagaaataccctgtatctgcctccgtcaaggcgatggattatttattagtacaagtaaatcaataattttatatcatgaaaaagaatttcatcacatgtgtaagcttcttgagcattatgtcgctcttttcttgttcgccagaaaaagaatttaatagatggggagacaaacttacccagtatgtagtagaagaatatatgcctgcaaaggactatatctggaactggaacgaagccgtattcctaaaatccgccgttgtacgttgtgagaataatatggataaagactatctgtttccatacatacaaacagctgtcgactccactttcggggacgccaacggtcatcacccgaatgctgtcatctccggattaggactggcctatctggcacagaccaccggtgaaagccgatacaaagacaaagcttatgagattttcgaacaatacaagaatatccccagagccaccaacggaggtgtgtcacacagagaagaagtgattgaattatgggatgataccgtatatatggtaggcgagttcctgatgcagatgtacaaactgacaggcaacaaagaattccttctggaagccatctcccaattgaaaaagcatgcggagaaactggaagatccggaaaccggtctctggtatcacggttgggacaatgatacaattccttcgcaggacccttgctgccaacccggttgggcggaaaatcccaaccgcagaaacaatgagttctggggacgcggtaatgggtggattctaatgactctggtagatttaatggagcttcttcccgaaaatgatgagaactatccgtatttggaagcatctctcacacagaaactcaatacattatatccattgcaggatgaaaagacgggacactggtatcaattgcccatctatccgggagaagaagggaactttatagaaagctcaagcactgccatgtatgcctatgccgcagcaaaaggcattgcactgggaatattacccgctgacaagtatatgcctatgatagaccgtgcctatgccggcttggaagcaaacagtctacaacctgtagggaagtacctgaaaatgaaaaatatttgtgacggtacctgtatcggtgataaagattattattataacagaggcattgtaaacgaaagagcttatgctttcggaatagctgccatgttctatgatcaataccatcaactgacagcaaagtaggtttcccccattagcaacatatgaattagacgatagccgggctagccttcagtgtatgtgaaaaacagttcaagacagaagctatcatcaatggcattgatgatagcttctgtcgtaggggaagtttagctcaccgatttgcctataccggcagactcctgacctcatctaatttataacagtattacaataagcccctttccttcagcaagccttcagcaagaccgcataaactctgtcagtggagtgtattctgttcattaagacagaaaacatttttgaataacagcgcatacatcagccctaaacttttcctaattctcccctccttcgtgccattatatgaaaaatgtttcgtatttttgtccccaaattgtgttaatgtacaacgaaatgaatgtattagaactaagtgaacaggaaatcattcgacgtaatagtatgaatgaacttcgcgcgatgggcatcgagccctatcccgctgcagagtatgtaaccaatgctttctccactgatataaaagcagaattcaaagatgacgctgaacctcgcaaagtatccgtagccggacgtatgatgacacgccgtgtgatgggtaaggcttcgtttattgaattgcaggactctaaaggtcgcattcaggtatatattacccgcgacgatatctgtccgggagaagacaaggatctctacaacactgtatttaaacgcctgctcgacttaggcgatttcattggaatcgagggttttgtattccgtacccaaatgggcgaaatcagtatccatgcccaaaagctgactgtactggcaaaatccatcaaaccgttgcctattgtaaaatacaaagatggtgtagcttatgactcctttgaagaccccgaactccgctatcgccaacgttacgttgaccttgtagtgaatgacggcgtaaaagaaacattcctgaaacgtgccacggttattaaaaccatgcgtgctgtactggacgaagccggctacacggaagtggaaactccgattctgcaatccatcgcaggtggagcaagtgcccgtcctttcatcactcaccacaactcactgaatatggatctgtatctgcgtatcgctaccgagctttacctgaaacgtttgatcgttggtggttttgaaggtgtgtatgaaatcggaaagaacttccgcaacgaaggtatggacaagaaccataacccggaattcacctgtctggagctgtacgtacaatataaggattacaactggatgatgagtttcaccgagaaattgctggaacgtatctgcattgccgtgaacggcagcgaagaaacgaccatcgacggtaagaccataagcttcaaagcaccataccgccgcttacccatcctggacgctatcaaggaaaagacaggttacgacctcaatggtaaaagtgaagaagaaatccgccaggtctgcaaagaactgaaaatggaaattgacgacaccatgggtaaaggcaagttgatagatgaaatattcggtgaattctgcgaaggcactttcattcagcctactttcatcactgactatcctgttgaaatgagtccgctgaccaagatgcaccgcagtaaaccgggactaaccgaacgttttgaactgatggtgaacggtaaagagcttgccaatgcttatagcgaattgaacgaccctatcgaccaggaagaacgtttcaaagatcaattgcgattgagtgaaaagggagacgatgaagcaatgttcatcgaccaggatttcctgcgtgccctgcaattcggtatgcctcccacatcaggtatcggtatcggtattgaccgtctgacgatgctaatgacaggcaagtcgtatattcaggaagtactgttcttcccgcaaatgcgccccgaaaagatcactccgaaagatgctcccgccaaatatatggaactgggcattgcagaagactgggtacctgttattcagaaagccggctacaacacaatagaagatatgaaagatgtgaatccgcaaaaactgcaccaagacatttgcggtattaacaagaaatacaaactggaactgaccaacccgtcggtaaacgacgtagaaggctggattgagaaaattaagaattaaagaattaaaaattaaataagaagattaaagatcgaatgagggaaaggagtttcctttcccccttttaatttttaattattaattattaatttcgatatgaaactacccggaaagatagccataatgggcggaggaagctgggctacagccattgcaaaaatggtacttgctcaggctgagtcgattaactggtatatgcgacgagatgatcgtataaccgattttaaacgactgggccataaccctgcctacctgacgggcgtcaaattcgacatgaagcgcatcaacttcagctctaatatcaacgatgtagtaaaagagtctgatacgctgatatttgtcaccccctccccctatctcaaagctcacctgaagaagctgaaaacgcggatacgggataaattcatcattactgctataaaaggaatcgtacccgatgacaatctgatcgtatcggagtacttcacaaaagaatacggcgttccacccgaaaatattgctgtactggcaggtccctgccatgcggaagaagtagccttggaacgtctctcttatctcaccatcgcttgtccggacacagacaaggcatgtaccatcgcccgccgcctggccagttcatttatcaaaacatccgtcagcaatgacgtagccggtatagaatacagttctgtactgaaaaacgtgtacgccattgccgccggtatctgtagcggtctgaagtacggtgataacttccaggcggtattgatatccaacgccgtgcaagaaatgaaccgtttcctacaaacagtgcatccgctgaacagaaacgtgaatgattctgtttatttaggtgatttgttggtgacaggatattccaacttcagccgtaatcgcacgtttggtactatgattggtaaagggtattctgtaaaaagcgcacaaatagaaatggagatgattgccgaaggatattacggtacaaagtgtatcaaggaaatcaacaagcatcaccatgtcaatatgccgatactggatgctgtctataacattctgtacgaacgcatttcacccatgatagaaatcaagttgctgactgattcgctaagataatctctcccttaactcctcttccgcaaagaggagaataaagccagagttgcgatataaagaaaagaatattataaataaatcttataaaccaaaagtaactcaaacctaccttttccacagggaaggaggcaggtaagaggcttttaaaacctagaatattatgattagtttgaacatcgaaaagacttttggatttatctccaaagcatctgttgctgcttacgaagctcaggtaaaagctgcgcaggaagcattggaaaacggtaccggaaaaggtaatgacttcctgggctggttgcacctcccctcatctatcagccaagagcatttggccgacctgaaagctactgcacaagttttgcgcgacaactgtgaggtagtaatcgtagccggcatcggcggaagctatctcggcgcacgtgcagtcatcgaggctttatcaaacagcttcacttggttgcaggaaaagaaaactgctcctgtaatgatctatgcaggacacaatatcagcgaagattatttgtatgaactgactgaattcctgaaagacaagaaattcggcgtcatcaatatctccaaatccggaactaccaccgaaaccgctctcgctttccgtctgttgaaaaagcaatgcgaagaccagcgtggtaaggaaatggcaaagaaagttatcgttgccatcacagatgccaagaaaggcgctgcccgcatcactgctgataaggaaggttacaaatcattcatcatccccgataatgtgggaggacgcttctctgtactgactccggttggtttattgccgatagcgatagccggtttcgatatcgagaaattagtagccggtgctgctgacatggaaaaggcttgcggtgtgaatgttccgtttgccgagaatttggctgcgcaatatgctgctactcgtaacgagctgtacaagaatggcaagaagatcgaaatccttgtaaacttctgcccgaaactgcactatgtaagcgaatggtggaagcaattgtacggagaatctgaaggtaaggaaaacaaaggtattttcccggcagctgtagacttctctactgatctgcactctatgggacaatggattcaggaaggtgaacgcaccatcttcgaaaccgtaatttctgtagagaacgtaaaccacaaactggaagttccttctgacgaagcaaatctggacggtctgaacttccttgcaggtaagcgcgtggacgaagtaaacaaaatggctgaactgggtacccagttggctcatgtagatggtggtgtgcccaacatgcgtattaccatcgagaagctggacgaatacaatatcggtcagctactttacttctttgaaataggatgcggtatcagcggttatctgctgggcgtgaatccgttcaatcaaccgggcgtagaagcatacaaaaagaatatgtttgcattgctgaacaaaccgggatatgaagaagagtcaaaagctattcaggcaagactctaggtaaaagtcaactaaccatagataaacgaggtgtggatgaatttaatcattcacacctcgtttttttgttgtatctttgcagatataaaacaataggtattatgtttcaagaagccatttcccgctatcttcagtccagcgggtactccagaattcaattgaaatccgtccttttcgatatggacggcgtattattcaattccatgccttaccatgccgatgcctggcacaaggtaatggaacgccatggattgcacctgagccgtgaagaagcttatctgcatgaaggacgaaccggagctgctactatcaatatcgtctatcaacggcaatatggaaaagatgccactcccgaaatgatacagagcatttatgcagaaaagagtgcagaattcaacagtaaccccgaaccggaacctatgcccggcgcatgggaagtactacagaaaataaagtcggacggactgataccgatggtagtcactggttccggacaacactcactattagaccgcctgtcgcataacttccccggcatgttccgtcgcgaactgatggtaactgccttcgatgtaaaatatgggaaaccacacccggaaccttacctgatggctttacaaaaaggaggattagcccccaatgaagctatcgtagtagaaaatgcgcctatgggcgtacaagccggtgcagcagcaggtatatttacagtagctgtcaacacaggtcccattgacggacaggtcttactagatgccggagcaaatgtattattcccgtccatgcaggatttttgcgacaattgggagaacttacgtaaagcgttcgaataaagaaatcggacgctttactatttatggaaaagaaaatattttatctcaatagttcactgatttttttccttaaatttaactttattatttcatcaggttttaactcaagctctatcaaaatcttggcagtagagagtttataagcttcattttccctatcataattcatctgttctttatcgatagaatagagcagggcaaaatcataatctaaagcttttgaaacattatataaagtatctgtatcaatactttttcgtgtcaacatatagtcaacactctgaggcttaacttgcagtctccttgcaagttcagcctttgtcaccagtttttcaaccatgacattttttataacttcaccgatgtatatagtagtcttttccatttccatgaaggtacgatttattatccaaacctagaggaagtgaaataaaaatttatctgtcctgtaatacctatttattcacaattcacttgttttatcaaataaattgtgatacttttgtcgcagaatgatataaacaataaataatcaaattaccatgactctactgattcttattctgatagcgattcctgtttgtatcttgacaattctattatggatatacaatgattataaaaagtacaaaagacagaattgcttcttgattttattgtttttggctttacctgccactatacaagctcaatacacagacaaaaattactgtgtaagctctaaatggcatgaaaatccaaaagaaatattagagcatacggctggaagtttcaccacttcccatggttgttgacaataaaccacaattcttcaataccttcaattttatcattacgccaatcaaaattgattatgatactccaagacattaaaagccgccttaacgaaacgcgaaactggtacattgtactgacattgccccgaaaagaaagaaaaaccaaagaaactttggaaaataaaggcatgataacttatctccctaccatttacgtaaaacgcagatggaaagaacaagtaaaagaaatacagattcccgctgtaaacagatgcgtatttatttacgctaccggtacagaactagagggactaaaaggaatatatcctactcttccgatagaaatgacggaagtaggacattagagttgactttacaactggaaagggaaaaagggggacaccgtgatggtatccccctttttgttgtgtgaccccggtgcgattcaaacgcacgaccttcagaaccggaatctgacgctctattcactaagctacggagccttaaatgcggggacaaaaatataaaaaaatcgggcatattcctaatgatttgtctttttttacagtaaaagcctataaataagaatattattttgagagccacaactggttaataagaaacaaattgctcataaaattagccaaatacgatgcaaatataaatattatacctatatttgccggacaaaaacatagtacacacttatgagttatctgataaaaccagagggttataaacc

SEQ ID NO: 6342 - DNA, 58992 bp, Unknown
  gut microbiota DNA sequence
atactaaataaatttgaagacaaagatactaatttttaaatttccccctcaggtttttacgttgatccgaagaactttcctttagcattaaattaagtcacatttcctacgaattatgcagttcatgtaaaccaagagttaaaccggaaaatgtatgaaagctactattaatgtgttttgttacaagtcaaaaactcaaaagtacttttatatgagatcctaggagtaggtgaggttatagtgcataagttttggtacttctttaatttattgacttgaaacaatgaaaacttaattcccttccacacttctacacttccttattcatcggccttagcgggtggaagggtatagtgagaaaaatgaaggatgctattctttcagttttattttcacgatgcaaatgagttgtttgcctctataatattaaattatactctttcaatattgatttatcaccttgctatatggacggaaggcttattaattaaggtacttatgtaatacttgtatcctacaaataagtcacttgtgttacagatatgaaatacttgtatggtatacattaaacacttgtgtggtatgtgttcaatgttgtactttcttttttcgtcaaaaaagggattggaaatcttaaacatctttctgcaaaagggttatatttgcaatataatatacatcatcatctatgtacttaaagaaaattatggctgcaaccttcgctgcaactgcgcttgccgggcaggcacaggagaaaacttttagcattattcccgaaccggtggagataactgtaaccggacagggagagtatttgattcaacgtaatacggtcattcgtatgtcagaaccaacgttggcactttcggctacctatctggctgattatatggagcgctatctcggtatccccttgcaagtggatcttccaaaatcaggtaaatcccgaaagaaactttcgtctgctgtagaaacaatactttcgaagccgggtgaccaaccttgtatcattctgaaaaatcaaaagaatggagagattccaggaggttatcagttggagattacccctgtaggtggtgtacgtattgaaggaaatgatgaggcgggtgtcttctatggtgttcagacgcttatacaattattgcccacccgtgcgggtgtgttgcctatccttccgactctgaaaattatcgattatccgcgtttcccttatcgtggtatgcatttggatgtggtacgtcatttctttcccgtaggtttcatcaaaaagtatattgattaccttgcgcttcataaactcaactattttcattggcatctgacagatgatcaggcttggcgtgttgagatgaaatgccgcccggaactgacggagaaaggttctatccgcgagggagagattttcggactttatcctggaaagtatcaaccgttaccctacggcggttattatacccatgaagatgtacacgaaattgtacgttatgctgctgaacgtcatatcacagtgattcctgagatagatattcccgggcattgtatggcagtacttgccacttacccacagttcagtactacgccgaatgaacctaaaaaggcagcattgacgtgggggatcttcaataaattcaataatgtactggcaccaaaacctgaagtctttgacttcctgaaagatgtgttttctgaattatgcgatctctttcccggtcaatatattcatgtgggtggcgacgagtgtgccaagcgctggtggcaggaatccgaagagacgcaacagtttatgcgtgaacatgagttgaaagacgaaaaggcattgcaaagctatttcatccattatgtgcagaaggtggtaaacgcgaaaggtaaaacgttgattggttgggatgagatccttgaaggaggtatttctgaagattgtattgtaatgaactggcgtcggcctgaatttggaaaaaaggcagtgcggaccaatcatcgtactatatttacctgttctgcctggtcgtatttcaatctgaaggaaagtcgtatccagtcggaaataggtcctcgtggcccgttgtcattggagaaggtctatgaatttcagattgtgcccgattcgttgactacggagcaacaagaacttgtatggggtgcacaagggtgcctttggacggaatatattcctacaacctggaaggctgagtttgccatcttcccgcggatgtcggcactggctgagaatgtatggtcgccgttagagaagaaagactggataaactttacccgtaaagtagaaatgcaatttgaacgctatgaactttggggagcccggtattcggaggcattctttcgtacacaggatatagagcggaaaaggtagctgaagaagatgcggatttataactttgattaaaaatagttattatccgaatgcagtactttcgatttttgagtatttataaggaaaagacgctatacaaatcattatgagatacttgctttctttctttgtcggggtgttattaagcgcctctttatacgctcaaagtgcaggtgataaaagatcatcattttccgttcatgccggaccgtcatggtacctggggcgctttgtaggaattactgatagggcagatacctatcgcagtgacttacgaaaaggtgtagcctgggatgtcaactaccttggacagattacgggtagggaactgaagttcgggctgggatttctgtatcagggaagtgcgtataagaacacacatgatactggggcagataagatatatatgcattatatggctcctcaggtagccttgactatggtgcaaaagcattatcaacttcaattctccggtggaatcggatatcaactttatcgtgataagagtacagtatatgataaacctcgaaaagttaccatgagtaagtttgcaggtaacttgtctctctcgggtgagtattttctgtcaagtcattggggagcttctgccagggtgaactggctggcatccagttccgagtcttattcggtgaagtatcataatgtggagtgggatgtggagagtccgagagccggtagcggttatttcggacagttatccttacttttcggtttaaactatcatttttaggcgttatgaaaaaactgttatttctattcctgttggtttgttgttgtgcttgtgatgaagacaaaactgttgatccgacactgatgccggaggctacgactacgggggcaaatacgttaggctgtctgattgacggctgggtatatgccagtggacggtatgggacaccctctgttcgtttttctgacgatgaagagaatcattatgttgagattgatgccgcagtcggtgtcttcagtagtttgcatttggtacttgtgaatcctcgtcagggtactacttgtacttatacagatgccgttcttgatgaaggagatttaggcgatggcgaagcttatattacccgtatggatggaaccattattagtggtacattcagtggtggaagtatcaaggaaggacgttttgatataaaatatcgtgagaagcccgaaggaggtgaagcggtatattaagatgaataaaaaaacgccccttcggaaatagaaggggcgatatcttttcacttcgttttctcagctatattgctattttgcttcttgattctcagtttccccccattctttttctccttgttccttcagtttggctgtgaaagctgctgctttctcggctacggctttttcttcttcaggacttgcataagcgtgtttgtaaccttttacaacattccactctccacgggtaaagtcaggaaatgctacggcggcacagttgttatccatagagagtgttccgagttcggcaagacaacaccactctgctagatcgtatacatccatatccaatggcaaaccattttgtaagcaataaactagacggcagtccataatgaaatccatgccaccatgtccccctacttccttagccatttcaccatatttcttcaatatcggatgctggtacttggctacaagagtctccatctcactcttaggcaagaaactatgtgaatttaaatcatcaatcttgggctgtactccggaagctgtcaactgtttagcatcaagagcataaccgctgatcggatatttattggcaaagcctttagtacccgtaagttgatacaagcgattgtaaggttgcggagtcattacattatgttggatttctataactttaccgttttcggtacgaatcagagtggtagtatggtcgccattgcggaagttattacaaatggaatctgctctttcttctaccagtgctttacctatggctgacttggtatccatagccactagtgtcttcatgcgatctccacggtgaatgtcgagcgcttgtgctactggacccagaccgtgagtggcatatacatccccgcgatgtctcatattgtagtccaagcgccaacccagcttgtcattctcaccgttcttccaataatgattccaaaatgggcttaggttgtgaatgtaggcaccttgtgcgcgaattacttcaccgaataccccttgctgtgccatgttcagcgtgttcatttcaaaccagtcataacagcagttttctagaatcatgcagtgcttacgatacttttcgctcatattaatcaagtcccaacattgctggagattcattgctgaaggtacttcgatcgctacatgtttgccattttccaaagcgtatttggctacgggaaagtgatgtagccaatcggcagcgatataaaccaagtctatatcgtctcgtttacaaagttcttcgtaccctttctctcccgaatagatggcagctttgggcatggatgctttctttaggtatttctgacatctctctgcgcgcgactgctcataatcacaaagtgccacgacttgtgtacccggtatatgcgtgaaacgttccaccgcaccgggaccgcgcatacccagtcctacgaatcctacgcgtactacttccatcttcgggacagtcagtcccaacacgcttttttggccggtgggacgctcgggagtttctattacgatggtcccgttttcccactgccaattagtgccgtactcattggtttgccggggagtttgtgtcgagcatgcacacatcacgatgcaaagtcccaacagcaaggtcttaaaagtcttcatacttcaatcctaatttaatgttatcagtaataataataatttctttctttatggaattaccaactaccatgctctttcttatgctccaggaaatcagcctcccggttgcactctccgttataattccattctatttcgtctgtatattcttttccttgatggagaagggatgctttcagtacattcttgccatcgtccagcactaccttgtcgaatatataatgtacatcagtataacctttccgcactccggtcaattctttcccgttcagatacaccttgggggtaccgatattggaatacactgtaatggaagtctcttttttctcgcgcactgcattccggcgctgtgtcaggtaaagaaccggttccttgctccagttcgccttataccagaaataagaatctttcttgattctacgatcgaaagtcatcatgcctttcatgttgcgggcatctacactgcctctttttgatgttggcactgcaaagtcgaacatattccacaggtaagaagcgatgatgtaaggatgttgggcaatgatgctccattggtattcgtgggttttagtttgaaatgtttccggatagaaagggcttgtccaattcagtgcatcgcccaatatttccgtctgatgttctatattggcgtctgcaccatattctgtcagcatcaggcgttgccaaggatattctttttccattttctctatccatggcttgatgtcttgtattttccgttcgtaccaaccgaagtaacggttcatgccctgtatatccgcattttggttgacggggtgattggcatgaccgtaaccatttaccgcaaccgtgtagcggtctggatcctccagtttgcagaggtcgtgaatggattgggtaagtgcggcggtataaccatgcggatgatacacttcattatggattccccatacatagatggagggatgattaaagctttgacggataagttcgcgcatctgttggtgggcattgtcccactcttggccgctgacacggttcacgaaggggatctctgcccagattaccaatcccagcgtgtcgcagcgtgaatagatgtagtcagactgttggtaatgtgcaaagcggacggtggttgcaccgatatccataatttgtgccaagtcgaagtcgtgctctttattggtgagggcgctacccagtccccaccagtcttgatggcgggttacccccagcatggggtacttctttccattgaggaagaatcctttgcctgccacgatttcatacttgcgaatccccaggggctgaataacttcgtctatcacgcgtccattctgcatgagacgtgaaacgactttatacagatatgggtcttcacgtccttgccataaatggggattgttcagtcggaagtgtgaggaatagttctgcactccttgtggagtaagttcgaaattctgactatgtttctttaccaatttgccgttcctgtcgtatattgcattctctagttccagtgggacgggagctaaggttgcattgtccacctttacttttacagtcacttcggctgacttctttgaaacatttttctgggtaatatacactcccggagaggcacagtcgtttgcaatgatgctgcaagtttccgtaacaaccagccatacgggacggtaaatacctccataaacaccgaacaaaatgtggttcgtggggataacatcgggacgtgaggagttgtctgcctttactataatttcgttttccttgccgaattttacttgcgagctgatctcgcatgcaaaagcagagtaagctcctttgtgtgttcctgccagatagccattgatatatacttcggcataagaacctacaccctcgaagcgtagaaagatgcgcttgccttccatattttcggggaaagtgaactttttgcggtagtagcctacaccttcatagaaagcggaggcttgcttttgcatgtcgtccgcattccaagtatgtgggatggatacctcctgccagtctgaattccatttctgtacagcctgcaacgcttctttggaaaacggacctttcttgaattcccaaccgtcgttgaaggatgctacctcacgtgcacctatcgtaccggatatacctaacattagcaaagcaatccacaaaaacaatgtataattcttcatgatagatctaacttattttacttcatcttataaatctgacacccggacagcaggaatgcccctgtcccatatacttcggtcatgtcccgcgtcactttacgcggatcagctccgatgggttgtacgtagcctaacttaccatctggttcgaccgcatctaataaggctttccaccccttttcgatggttggcataaaagtggctttgtccaacaccccttcgtttacgccataggcaagtgcataaacgataaaaccggttgcacttgtttcgggcgatgggtaagacgctggatcgagcaggctggcatgccaatatccatcagcactctgcaggctggctacacgggtggccaatgccacaaataagtcctgataaaacgtgcgtgaggattcatctttaggaagagcttgaaggatttcgaccagtcctcctaacacccaaccgttgccacgtccccaaaacactttcttaccattagcttcgcgtttggcaaaatatcgatggtcacggtagaataaatgctcttctttatcatacaaataattataagtggccttgtattccttgttcaggaaatccagataccttttgtccttggtcaacgcatatagtttggcatatacggggggagccataaacaatgcgtcgcaccaggaccatcggtccagagtttcgagtttgccgtaatccagttccaaagtagtttcagccggattttctactacccagttggctcgtgccatgacgggagcgatcatcttcttgttgccatatttcaagtaaaggtcgataaagggctgtccgacggcaataaaatcagcatgatacatccatttacctatctggaagtgattacgttgtccgatacggagcaaccactgataataagaatcgtcgctgtcttctttttctgttagctctgcccagtccaacatacccatgtacagggctgcatgcgtccagtctaaatcatcgtgctctgctcctttgttgggattggcaatctgccagtcagccacgcgtttcatgacagattttacggcagtcttgtcaaagctttgctgtgcggcagcttgcaggaccgttatcaggaagaaataaataaaaagagaaagccttttcataacataatcagattaaataagaatcaagtcaaagcatcacggtatttatcagcggaacttacgttttcctctatctgtagtttgatgacaaagggaccttcgggggcttttgcgggcatatccacattgtattcattgcgggcggtttctgtcactgccacctctttcccgtttgtcacagttgctttcagaatttttgtaccctttggggttttaaccaccaagtgtttggaataaggaggattgaagacaatcatatatacctcttttcccttgtgggtatagtatccccagggttgtttgtcccaaccggcgtaatcacatccgtagatgcactcgccatattgttgcatccatttgccaatggcatcagccatttctttttcttcccggcggaagtcaccgtcggcttgcggtccgaagttcacaaccatgtttcctcccattgaaacggcatgcactatgcgttccagtacttccaagggagttttcacatagctcaacgaccaatctttgtgatatccccattgattttcgggcaaggtcatacatgcttcccaatcccagcgggttactttcaagtctttcactggatcgggtaggcggcgctcataccctgactcataatctcccatcaagtgtccgttactgtcgaagtgtcgcttgccgtaatcatcggcacgtagtcgactgttgatagttacgcccggtaacaggtctttcaacatttgttcggcatgagctgtccaccagccatttttcttgatgctggcatcccatgtgccgtcaaaccagaagtcttttacggtaggataacgggtagcaagctctttcagctggttgtccgtaaattcaaggaaacgcgcaaaagcaacttcatcatctttcgatttgatgtcatatcggtagtctggatgactccagtccatcaccgagaagtagaaatgaacgtcaataccttcatcattgtaggcctttaccaattcgcctaaaatatctttcttataaggggtttgagccactgtataattactgtacttacttggccacagacagaaaccttcatgatgcttggttgtgattttcacgtatttcactcccatctttcgagccatctttgcccaaactttggcattgaacttttctggattccattggtccatcagcctcaaccactcatctgcaggaactttggcccacgacttcaaccactcggctgctccattgtacatttttccgttccattctcctccgggaatggcgtaaagcccccaatgtatgaaagctcccaatctgttgtcacggaattttttcatggctgcatctgaacgtttacctaaacgatcggcaccgtattttaaaggaatttcctgatcggccggtaatatttgttgttgcttttgagcaaacgaaccgacagtcaataaggaaaacaaaatggttacctgcaaaatctttttcatgttattaaatttataagtttttgcaaaggaaggcaattcctctttccttgttttactctatttgccatttgttttatctaaatcgcctttagacaactttttgtgctttgcggcgaaggatgtaggtgtttcaccaaatactttcttaaatgaattggtaaaataggcttgactttctatacctatttgcatcatcacttccctcatggtcagattttcctcaataatcaatctggcagctttgcgtaaccgacaattcaatacaaattctacaacagactttccggtcaggctcttaacctttgtgtaaagtttgcttctgcttatcaacaattcctcggcaatctgattgacatccatttgagactggtccatattagcctcgataaaagtgatcaggtgttttagaaatttaccatcctgctcgttggaagagagctcgctgctgtccgcataataattcttggcataatgttccttcaactgctgctggtttctgaatatgttttggatggacaattttagataggtcaaatcgataggcttttcgaaataaaggtcggcacccgaatccactccttcgatcttgctttcaagactagttttggctgtcagtaaaatgaccggaatatgtgatgtattcatgtctttcttgatgtcattgcacaaagataccccgtctttgtgaggcatcatgatatcgcttataaccaaatcaaaatctacatcctctatcaacttcagagcttcaacaccatctcttgcctgcatcacctgaaattcatcggatagggattcggcgattaataccctcaggtcatcattatcttcggtaatcaatatttttttcttgtttgcgggcatgaattcgcttcccatatctttaatatcgacaggcagggcttctttgtctgtaatttccatgatagtttcttgtgtcgtttccttctgtttcatgaaatcagtttcgttgaagatactgctgtcaagcggtaagtatacaatcatgtccgtgcccttttcccgctcactgtggatggagatagttcctttctgtaacaataccaagctctttacaagtgccaggcctattcccgtacccaggtgggagtcggcgtttactgtatttaccttataaaaacgttcgaaaacactgcttatggactctcgggatatgcctactcccgtatcactgacgatgatagaaaagacatcgttcgtgctttcgcctacggtgtagctgttcttatacaaggatgtaaaagctttcctgcagcgtgtttctaaaataatgcttcccctgtcaggcgtatatttgaaagcattgtttaacaagttcatgacaattttttccactatgtttttgtctatataaacgtcagtgggcatgctttcgtcgcatagtatctggaagtcgatatttcgttgccgtgcatagtcgatgaagtcattggcgatttcttttatgaaacggttgatgtccagtggctgcaattccagtttcatcataccgttttctactgttctaaaatccatcagttcgtttaccaaattcagtaaacgttgcacgttgccgttcaatatacgataataatattctttcaatccttcacgtctcagtttgtccagtgcagcaaggataagagatagtggagttcggaagtcatgtgatatgttggtaaagaatcgtagctgtgcctgatgtatttgctccttttggtctttttctatattttcttgatagagcagcatctccagttttttcttctcggcatagtgatgatacatcaggtaagtgattcctattaccgtcagcacataaaggaagtatgctggcagactaacccacggggccacctttcttatcacttttatcaccgcgggcttgtcactccagataccgtcattgttggcagcgtagacttcaaagtaatacgtaccggcaggtactttcgagtacatgactgtgcgctgttgtgcatttgtagtgatccaagaatcactatatcctttcagccggtatttgaagcggtttttttcagggatatgataattgtcggaagaaaattgaaaaccgaagtttacctgatcataatcaaggataatacaattaagtgtatcgttgagtgtatagttgggatgaaccacttggtggtcaataaagaaatctgatataatggctttgggcttgtaactgttgtacgagatgtttttcggattgatgacggtaaagccatttgttcctccgaaatacaataatccgtctcttcccttcatggatgccagtgggtagtaaacttgtccctgcgtattttcccttttgtcgaatctcatcagctggttgtcggctatgttatagcaaaacagaccgttgtcagttcccatccacacattcccgttgtcatagcaaatgctgtagatggagtagatgtcctgctgcaatacatttttcagcgagatgaagtgcgaggtgttggtgtcgaacttaataagcccattgccgatggtgccgatccagatattgccggaatcgtccaggcagaaagtaaacagtcccaggtatgtggaatcattgggaatgatcttttccacggcacgtgtgtgcgtgtccatctgatagagggcctcattgctgatagcccatagtgtcttctctccttgcctcaggatgtcgaacaagtaggcgtaatcgtgtatgctatcgaggctgaaatgggtgaacgacttgctgcggaaagaaaaataggatatttcaggcttgtgatactgatacgatatccacatacccgagtctccttcaagaacagtctttcggatatcatctaccagcaaggaacaggaatcctttttggaatgtttgtaattgattgccttattctgtctggaatcataaagatccagtccgcccctgaatgtcgaaatccatagattgcgtccggcgtcaatcaccagcgattttacattcttggatgtaacgttgttcgggagtgtaaagccacttatttctccgttgactttatccatccggttaatgcctccaccttccgtacctatccagatatagtcctgctcctcggcgaacgcgcttaccggagcataattcagaccgctgttctgggtgtgataagttctgaacgcatggttttcatttacgtttacataagataaagtgcccgaataggtgcctatccaaacattgtcctgcctgtcttcatagatttcccaaatggaattgttcggtagactgaaggggtctgttccggaatgtttataaagtgatagttctctgcttgacggattgagtatgtacaatccgtttatggttcctaaccaaatattccctttcttgtccacatgaaatgctcgcaatgagctgtcgtcatattcagggagaggtttataatggtcttcaatcttgaaagatgacaagtcaatcttatataatccatctttatcaataaatacccataactttcccatatgcgtctgggcaaagcgaatataaccactgcccgtattggggagcgtgaaacagagaacaaacctactctccgcataattgtaacggtaaatttcccgataaatgaatgtatataggtcctggttgtggaggcagaaaactggattactataaacaggaattttctcgtcatagtaaggcgtattgacttctcctgtattggaatccaatatgctccatttgtttttagatctgatccagacattgtcggctttgtcgaccttcacttgagaaaccgcatcatatattttctcaaacctatccgagatgcgcttataacggtatagtccgttgtttgtatttacatatagatgaccggaggcgtcggatgctatattgttgaatatccatctttttgttggggcaatcgaggcaaaataaggatagtactttttatagtgatagccgtcaaaacggtagagctcgtagtccatcattacccagataaaaccttctatgtcttgctctatcgcctttattccatcatagtagaaccctccatcgggcgacatggttctgaacttatacttttcagtggcaaaggaagctgatgcttgataaatgaagaccagaaagagtaataggtatttgcttttcatacataaactatcggattaaagattattcggcggattctgaaaaaatataatggcaagttatcaagaaaaccttgaatgtgcaagaaagaaaacggaaatattttataagaaattattatcgttgaagaaagagggaaatctcataataagatttccctcgacactttaacaaaagtaattatctgttgtaaatgaatacctgtaagtctcccacggaaacgtttccggtttctgagtaatcccagtctgtatagccgcttctcagatgccctttgataaaggttattctaatgtattgggcttccgtaggttcaacttggaacaactggtaatcatccaccttcaaggcttctgttacatattcgcctagatctgtccatgcgtcactttccacctttttggcttctaatttgaaagtgtgacattgcagatgagaataattcagattacggtgcctgtaacctaattgaccgaatttgatgatttgccccagattgagatccaagtagcacaccggatcataaatgggacgagtgatgatttcgggtgcccagaatgttgaattcttatcatcgaacaggtttttcatgtcgccttccttggttcccagattggatgagtaattccagttgtccgagaaggggaagcctacatacataggagcttctgcggcaacctttactctgcaagtagccgtttgtttccctctgtcgttggcggttatataaatatcggtggtttgtcccacttctcctattacggttatcaaaccgtcttggtctactgtagccacagtttcatctgcagaagaataagtgacgctcttgtcggtagcattgtttggattaatggttacatactgggccaaattgaaggtctttccattttccacttccacactctgtccggcagactgaatcgtgatactcgaaacaagtactatcttactgattactctgatcgggtatctgacaaatgtgcccgaaccgtcgtcaactcttacaataatggtatccgtacccaacggaaatggaatgtttccttcggcaggtgtggtcagtttaggggtaatcaagccgtccgcgcttaagtcgatggcacccgaaggctctccggcaaagtggtagctgacggcattttctctcgcactttcgggcatgatgaacggtttcagttgcacgggctgtccttccgtcacgtcgaccccgaaaacatcgctttcaaggtttgttgcattttcaacggtaatggtcaccgctttaccaaagtcatcgtcgtcgcatcccgtaaacagtgccccgaacgaaagcattcctgctaagaaatatatattttttttcatgatcttacgctatatttatcggttatctattaatgtctttccaacctggattctgcgtcagcagcggattcataagcatctcgtttaaagggatcggataatagtaacgtttgtcatcccaaggtcgcacgcctttgataacagtggttgatgtaggataaggaatgatgaaaccgtcatcgtctacaatcaccttattacctacctctcctataggaactgttactttgtagggataatccttatatacttcatcgttgcggtttttgctgtacaattctattttctcctgcgtcatcttcattcctcttacagggaccgtgaacagcctaccggctttccatctcatcaaatcttcgtagcgcatgccttccatcattgtttccacacggcgttcacgtctgatttcgcgaattatcggagtaacggaataatccagatactttgcatagatggcgtccagacgtgggtcagcaggtatgttggttagagtcagcttggcattggggtatttggcaaaatcaaatccggctctttctcttaaggcattgacggtgatctccaaatcgtcgttggtaatttcacctaattccgctctggcttcggcgtaaatcagcaacaactctccatagcggaacatgtgggctgtttgcacaccttttgggttagcttcccattcagcgtaatcgggcatccagtgtttgatgaatcgatagccggttaccgttgaattgtacttcttcattggagaaccgccacctgtatcatacgtaatcattggataaatgataccggattcttccaaagaatatgtattatcgtccgcatcaaagatggacgcatattcacccggtctgcaaacagtttgcgtcaagcggggatcacggttgtccaactcctcccacattccgtcatatcctttgaacagagggtttacctcgtagctgccttccacacctcctatatagatgggacgtccgtcttcgcacagatagtcttcgagcatagttacgggagcacccatgcaatagcgtgtgtggttgttcattccccaataacgcggattgtcatgtcccagtttaacaccgtcgtatacacgtgacaggatggtttcgttgttaccctcagtttcgggagaacctttttgtacgaacagttgccaataagaatcttttgctgtaggatgtttgaaaagggagtatctgttcttctcgataatcgtccaggcagcgtcacgactcatacccaataattcgttggctgtagattgcagattcaattctgtatgatatttccggaaggttccttcgaacaaacagaagcgggcttttaagaataatgccatatctttgttgatatatccacaggaattgtcgttatcctccaaattttcaatggcaaagtcaaaacacttcaggatattggtaaccaattccgtgcgtggcatgcgggagccgtagagttccggtgaacttgtatccagttccttatccaaccaaggcacttcacccagagccaccagtttgatgtaatagtcccatgccttgaagaaataggcctgagctgcatatttcttcaatgtttccggatcccctacttccgcataatgattcaggaagtagttcaccttgcgaagtttttcccactgccagggcgcatcaaaattctttgatgctgtgttcggagtgtcataagtaccgcctaatttagcatcgatattacccgcatatacagtattatcgctgaatgcatctccaaaaataatctggctgcctgcctttaccgccaagaaacctttatcgtgcgaggtattgttggttccactcactccatgtccgtatacataatatctgtaaattccgtccaagtacagctgtaagtcggcttcttttgtaaagaatgtaccgtcagccatgtcatctatcggatctcgttgcatgaagtcgtcattacaagacgacaaagatgccaccaaggtcacaagtaaagctataattgaatatttcttcataatctctattgatttaaaacgttaaaaacctacttgaatacctacgctgaatgtccgtttcggaggatacgcatcggagagatagtcagcatcataatacttgggcatatccgaaatagtaaacagattataggcggctaaattcaatctcaatttctccaaaccgattttgttgattaaagctctcgggaatgtatatcccagaatcacttgtttcaatttgatataggaagcatcaagcaaataacctgtttgggcgtaactgcctgtaccggaaccatacattgggaatttggcatctgttctttcgggagtccaggagttgttgtatacttcccatgaaccggctccgttgccccaataactggaagtagacgacaaccaatagtctcgtttgcccacaccttggaacatcagatcgagatcgaatcctttgtactggaagttggcggtgatgttgtagcggtagcgtggtgcattgttgccaatcacttttctgtcacccggatcgtctacggtattcaagccggtagtgatgacgccgtcgtgatccaaatcttgataccaaatgtagcccggataagcctgtccgcctttgaaatagggcccatgatacagcggtttcccatttgcgcctacaccgtcgaagtcaccttcctgaaggatacctccggttacgtatccccagatatctcctacggtatatcccttatacaatacaccgtcaccaatcttattcgtagggttggaagggtagctcaccactttggccttatcatctgagagtgctacgcctacgctataacggaatccgttagccagtttgtcagaccattttgcctggagttcaaatccggtggttttcaagatacctgcattctcgaagggcaagtcatcgtcaccgatcaatgccgggtaatcctttccacccggtatcaggatgtcggtcacttttctctcgaatatgtcggcggtgaatgtcaatcggctctgcaagaaagtaaagtcgaagccaaggttcttggtagtcgatttttcccaagtcaaattaggattgattaatgaaggagtattgataccagtagggtaacgtgttccatcaaacaagaaatatccctctgaagtactgaaaacggattgatatgggtattccgaatcgggctgactgcccaaacgtccccatgaggccctgatcttgaagttgtccagccagtctttcgaccattccatgaacttctcttctgatactctccatcccaatgatacggtggggaagaactggaagcgggaatctttcgggaacttggaactaccgtcataacgggcatccagttctatcaaatatctgctcatgtagttgtacatgatacggccgaacaatgcgcgtgaagcaatttcatgatgagaattggcagaggtgtttgccgtaacatcttgcaccagctcgggattcaggatgtacggatcgagcatgtttttcaggtaaagagtagaaccggcataagattcttcttcttggttaaggcctaataacacggaaacattgtgcttttccttgaaagtttggttataatccgcatacacgttgatagcatatctatccgtggtagaacgtgtgacttcacccgtattttcggttgcccagcgagtttcgagagcggtccatgaattgtttacacgcgcctgtttcggatgagtcttttctttttggtaagtagtgggagctacagatagatccgccttgattttcaatatcttggggatgattgtgaactcgggactgatggaaagaattgtttttcgtctggaactgatattacgtccgcccgcatacaaatagcttacgggattttctgtcgggtgattcggtagaaaatcgtctggtcctgtcaatacaggttgataaataaagttctccggatagtaggatttggcataactccaaaggttcataccatctgtttgttgcgtaggaccttcataatcgaacacattgtatgaggctttggcagctacattgaaccacttcgtaactttggcgttaatgctgagcatggcattgtatctttttaatctgtcggttttaatttcatacatacctttttggtcttgcatacccagagagatataataactgattctgtcaccaccaccactgatagagaggttatgcttttgagtcggagtccagcttttcactaactctttgtaaggattcgtgttgcctacccattgtatggcatccccctccataaaataaggcttgttgttcacaggatctttcatgtaggccatcatgtgatccaacatgtctctgtcgtgttgggaatactcagcgatagtaccagtccaaacttctttgtcccttaacgctttataaatatagtatgaatccaaaatgtcaggcaattcataaggctgatcgaaagctaaattgtaagagtagtcgattttcgctttctgattgtaattacctcctttggtagttaccagtatcacgccgaaggtggctcttgttccataaatagcggcggcggaagcatctttcaggaacgacatgttgtctatgtcattcggattcaactgattcaagtcttcagcagtgatttccacaccatccaacaggatcagtggagagccggatttcacatcgaacttgttcttgtcatcattagatgtgcctctctggcgaaaagtagtggcaccacggatattcaatgaaggaactttgtttgggtcgccaccttcgatactgatgtttaagcccggaaccatgccttgcaaggcttgtccgatattggcaaccggcctgttttccaatgcttctgctccaacggaagctacagaagctgtcagattcccttttttctgtgattggaaaccgatgactactacttcgtctatcatcttggagtcttcggatagagtgacatttatactcttctgattaccaacggtcacttctttagtagtatatcctacgaaagagaatgtcagtacgctcttgtttccaggcacggatacgctatacttgccgtcaatgtctgtgatggtaccggtccccgttccttttaccattactgtcactccaatcataggttcaccgttggtgtcttttacaacaccggtaatttgcagttgctggtcaatgcccattgcgatactctggacggcatataccctttgcgacaatcctgcagacaaaaagaaaaagcataggaaaaacatcaagcattgatgtttgttccaatctctcattaatgtttttacatctttcataatgtttaaattaaaattaacgtcgcaaatctatgtgtattaaaataatacgttttactgatttaatttttttttttactcaaattcaaaccttagaataatgtgctgttaattaacgaattatgtggagtgacttgtctccggactggacgttttgtatgtatagtgggagagtgaaaggcagatgaagagcgtctatacaccctcttgccgtagtgctcatatcaaattgctgtatacaaatctgtgttgcggtcttaagtgtctaaatgccatttttggccattttatttttgtacacttcttttgggtaatattatatatgtcagtgtattaaagaaaagaagtgtacaaaaatgaaatgatcaatattactttattttattcatttcagatacaagaagaatgtaaatacatcttttctatataataatggaatgctttctcctgtttgtttcactttgctacgtatttgcaacttgagctcaagctaatgaacttcactttgcgaagacacgactgtaatattagtacacaatttaatcttctataaagagatgctatgtcgctgttttcctgacggttacaaattgttggttttttgttgacaagaagttaggagtttgtcgacaagaagttaacttcctgttgacaaactcctaacttcttgttgacggggaatgacttgattttctgttcctttacacaaggaaggcggtgaagggagaattatcatggagaagcggtatactaatgaataaaaaacgccccttcggaaatttcttccaaggggcagtcctttttcacttcgttttcttttcagtcttataaagcctttcggttactgataactcgcatggcggcagtgtactgctgacaaggcacagacacgtgaatgccattacctttgtcctctgttgaagcggtgatgtaagctgactttagcaattgcttcacactttccacttcccaggggctacctgcgaaaacgttaatctgagaaatctttctacttgtaatcatgtgctttaaactttttagttgtactttccggtcgcaaatgtaagtggtttgcgggaaaccgaatagctcaaatcgatcaaaaagtaacataaaaggtgcaaacgatttagaagtagcttattcctcatatttttttcttatttcgtatcgttcttccggatttccacacgacggatctttccactgatggttttcggcagttcgtctacaaattcaatcacacgaggatatttgtaaggggctgtcactttctttacatgattttgcaattccttgataagtgtttctccctctttccctttatattctttagccagtacgatggtagctttcactacctgaccgcggatttcatcaggtacgcctgtgatggcacattctattacagctgggtgtgtcatcagagcactttccacttcgaaggggccgatacggtaaccggaactcttgatcacatcgtcggcacggcctacaaaccagagatagccgtcctcatctttccaggcaacgtctcccgtatagtagatattattgttccaggcttcgtgtgtacgttccggatcgcggtaatactctttgaacaatcccagtggcttacccttgtctgtacggattacgatttgtccctgttcaccggcttctacggaacggccgtcattgtctatcaggtctacatcgtattgtggattaggcaatcccatacttcccggtttcggttccatccaaggcatggtagcaatggtcagcgtggtttctgtctgtccgaatccttccatcagtttgatgcctgtcagtttcttgaaggtctcaaatacggctgggttcagagcttcgccggcgatggtacaatattgcagtgatgagagatcgtactttgtcagatcttcgtgaatgaggaaacggaagatggtgggaggtgcacagagagaagttacgtgataatcctgtatcttctccaggatggcggcaggggtaaatttctcgtggtcatacacaaatatatttgctccggcaatccattgtccgtaaagtttgccccatacagctttcccccaaccggtatcggcgatggtgagatgcaggctgttttccgtcaggttatgccagaaactaccggtaacgatatgccccaacggatatgtaaagtcatgggcgaccattttcggttcaccggtggttccgctggtgaagtacatcagtgagatatcttcgttcgtattcggatgctccggcttcacgaaaggtgcggcattttcgatccctttgtggaaatcatcgaatccttcggctacttggggacctacactgacgagtttcttcacgctgggggaatccggcatggcagctacaatatgatccgtgataaccgattctcctgcacaaacaatcatcttgatgtccgcagcgttacagcggtacacgatatctttctttgtcagcaagtgagtggcgggaatgacgacggcaccgagtttatgtaaagctatggtgctgtaccagaattcaaagcggcgtttcaatatcaacattaccatatcaccatggccgatgccgaggctttggaaatacgaggcggtcatgtccgtataacgtttcatgtcggcaaacgtaaattgccggtgttcacccttatcattagtccataacaatgcaggtttgtcaggttgttcggcagcccaggcgtctactacatcgtatccgaagttgaagttttccggtacgtttattttaaagtttttgataaagtcctcttgtgtagtgaaagaggtttgtgataaaaatctttctaccataattataggaattaagaatgagagattcccttcattctccatttagttgttacatgataattgccaggaatcgtaccgtttttccatccagtgctttcatgccatgcggcaattttgaattgaagtacaggctgtctccttcgtttagtataagctctttgccatcgatgttgaccatcatgcgcccttcgagcacaagactgaattcttgtccggcgtggctgttgtaatgtatcggttcatcgtccggtttaggttcaacggttacaatgaacgggtctacgctacggttcatgaaaccagaagcgagggcttgatatttgtaggccttggtacgttcgatgctgacaccttttccggcacgagtcaggaagtagctgctcattttaggttcttcaccaaacatcagtgcgtccaatgaaactccgtatctgcgtgcaatcttttgcaacatacttacggagatatcaaaatctcccgtttcggcaagacggtagtcgtaaggagagatgtcacattcacgggcaatgtcttcagcggtcagctccagtacatcacgaagcccgcgaaggcgttctgctatttgcttaatttgttcgtccatgtggttgtttatttaatgaattaattgttagtcttattgcttacttgctttgatagcattgatgatggcggatgtataaccgtcatgttccagttcattgatacctttgatggtaataccgccgggggtacatactttatcgatttctacgctgggatgcgtatcattattcagtatcagttcggctgctccctttaccgattgagccaccattctcatagcatctttgggataaacccccatttctataccggcttgcatggcagcctggatgtatttcaacacataagcgattccgcaggaagccatggaagtgcaggctgcgaatttttcttcggggatcagcatggcaagtcccatctgattgaaaatatccagcatcagttgttcttgttctttggtcgcattacgactggcaatcagtgtcatactttccatctcgctgatggcggtgttaggaataatgcggaacatggtcatttccggttcgggtacgtagtgagccagctcttcaaagttgatgcctgcagcaacagaaatgataatttgtttactcttcagtttcagctcgcgcagcacacctttgataagccacggtttcacagcgagtatgatgaattcggcgccgatgatggcttcctgattgtcatgggtgatttgtaaagcaggaaactctgcttgtagttcatccaactttccttgtgagggattagaaactatgatatccgaggcggggataatacttccctttgccaatccacgggctatagagccgcccatgtttcctgctccgataattgctgttctcatatcattctgttattaaaagggttgtcgatgggcaaaggtagatattttttagtcgatatatgaaacagtttaaacgttttttgctgattactctgcaaaatgcaagctttatttgtttaatatagaagataatgagtatatttgttcaactaaagatgatagattatgtctgaaaaagaaatgaattcctatcgtttgacgaatatggaagaacctactgatgagatgctatctcagttaatgaaggaagtggctgaagaagcaaaatgtaagtcggaagaggctcatcggaaatttttcacagagctccgtacggctgctcgaatgcaacgaagggagattgctcataagcaacagcgaatggagaatttagggaaatgtaaaactgatgctgataatgaataaatgataatttgtttgcttttcagtttcagttcgcgtagcgcacctttgataagctacgatttcacggtaagtatgatgaattcggcaccgatgatgtctttttgattgtcataggtgtaacataatatcctctgtttcatacaagattatcccattctcatcatcccggccaactgcacgaaataatcatttgaccaaatatcaagttctttgggattgcggacgaaaggcaatacatcttctttcacttgttttatatcagctgtagagagacgctcaatgagtttctccttgaataattctggagtaatattctcattgttgaactgcttgcatcgttctgccaaatgagtaaaatccagtggaatattatggcgtacataccattcaaagtcataccaatcacggcctttaactctattcttccacacacgatagaccagtgcgtgcatcttaccggcaaacagatcgggaagtgtaaaacaacgagtcataaatgagtgtggctgaagcaatagtttctgttctgtcttgaagttcaacggtggacaagtatctacttcaatctttatctttattgacctctctgtttggaaagtcacatcatacacattggtattatctttaagaaatgccgattcgacatttccgaaattcttcttatcttttttctttatttcaacctcacggcctaccattgcaaaagcatcaacgatagcaggaaaatattttgtaaaatcgaaattgtcatcttgcgcaagtaatgaaaaatccatatcctcactgaaacgctgcagaccatgaaagattcttaaacaagtaccaccatagaacgccgccgactcaaaaaaacctccaacataaagtccagcaagtatcatctgttggttaacttcaaatatggcgtttcttttatgttgctccgtcgtcaagtcatagcgggatagcatattgtcaaatatctcattcttcatcgtttcatgaattttaatagtctagaaattgaatcagcctttttgccaacctttatatagtctttgaatatggtttcatccatcttatagaactcatccatatccatacggatatcttgttcaagatatatttccacatctttcatatagcgaagattgacctttgaggaattggcaatcaaatcacacaaagccttttccggtgatgcaataagaaatgcatagtcacccttatgcatactccttactcctatcgaaaatgcctctcttgaaatatatttgtagtcataactgccgactggagtttgaaagctacgagagtgctttactgtcattgattgatgaacatatacagcctcggggataagtccataatatcgtagtgcagtagacattgaaatatacgaaggtgtatagagatgattggcaatcaactcactcgatagagtctttcctgaatgttcggggttgaccacataaagtcctcgcttcagtctgatgataaccccttgcttctcgagccaggttactttcttgttagcagacttaagttctggatataacgattcaatgattgaagtcgttactggaatagttcctatttcacttaattgtctattcatactgcaaatatagcaataatttgaacaataaaagaaatataacttcgttttctattcaaaatattactaccaagacgatcttaagaaatagcgactattgtcacataatgcttaccgtaaaaggtagattattctctaaattttctcacaattcaccgattgtaaggacctcatagtactgaaaatagattctgttatcatggataaatgacactcaaggaagggaaaaaacaccaaatatagtaaaatgaaccctaaaaatcaatatttgacactcaatatcattagtgtccactaaaaaatcaaataagttctttgaaaattttgagagttagataattataaaggtttttcgagtcaactgatttgaacttatctttgtcaaactaacgtaaaatggcatatgcatcaaggaaaatacatgttctttcagcttttaaacttcctcgaccgcaatgatttcaactatctagcaaggacatatgatggagacaaatacgtcaagcaatttacctgttggaatcaattcgctgttctgatgttcgggcaactttccaatcgtgaaagcctgagagacattgtacttgcagcacaagcacatgcgtcgaaagcttatcatctcggattcggcaagtctgctactaaaagcaacttctttccttcattgtttcacgcttaatagttactactaaaatagaaataataatgtttgatctagtttccttactgtcatttcaatctcaaattgttttggaatatgggtatatttaatatgatatatgaaacagtttaaacgtttttttgctgattactctgcaaaatgcaagctttatttgtttaatatagaagataatgagtatagttgttcaactaaagataatggattatacttgaaagaaaatgaattcctatcaggacaaatagctaataccttatgatataacagatattgtggaatgtaaactacggatacatttttttatcaatttttcctttttaatataaaccttttttgtaattttgtgcctgttgagaatggaaagcgttgcattctgatttatttgttagataaaaaataagaagcgttgtgcttcatcttgtagtcgaaaacctaggaaattttcaaaactacacaagatgttagtacggtggttctctcgcttatgcgtgggactgctgtctgtcgtctgtgtagttgggttttcctaggaccttcggctacagatgatagtatgcagttccacgcttcgttgtataataaggttagcagtcttaggaggaattggagaagacacacttgaaacataatgaaaacatagacatctttctgcagaatacttgcattttataggtaagataactacctgatatcgagaatatccatttaaaaatataaaaagatgagaactaaatatatgcttcttctgtctattacagcgttcattttttgttgtgtttcttgtagaagtagtcaaaatattccacggaagatagataatcactcaatcgttccagacagtcaagttgtagtcttattaggtgacacaatatgtcagtttgtttacagtccaacagaagtgatagggtataagatgcgtcctcaaaaagcagaacaggatacattgattgcccagtacgccatagattataaaattggtgagcttgctgcatcctattattctatcctacagttttttttgcaagatatcttgaattatgatcagagtgggagtatagttaaaactccttttgaacctaatatagcgataaaatttgtcgatgaaaataaggaggagctgtacttgcttgtagcattcaatggtaatcaattagcttttgtgaaagatgataaggtttattgtcgacaacaatatgtacatgcccgttatttagtgaaattcgctttaggacttcttcctgacaatgaatatttaaaaactcttttaaaactcccatgattatgaaactacagaaaaatgtttttttattaatcttatgtttggctctggttaatattccgttcagagcacagacatttcatgctattcttttcggtgacactaatgatgaatctataggtaatactgtgaagttggatattgaacggataagttgtatgcttgcagaggctcaagcagctttgcaaaataaaatttcatttgaatatgatgttaatgttgctaatcgctgttcacctcagaatttacgcaatgtgttgaatcgtcttcaatgtggaaaagatgatgttgtatttctttattatagtggtcatggtgcccgttctttgcatgatacttcaaaatatcctcaaatgagcttgggtgcccattatgagaatgaacttatttcagcagaaggtacattcaatattattaagagaaaatgcccgagactttgtatcatgataacggattgctgcaattcttacagtgaaaatctttcacccaaactggaattaagtaaaagtgccccctgtataaacagagaggttgaaacgaattatgaagatttgtttatgaagaaatcaggtgctatgattatcacaagtagtaaagcgggtgaaacatcagcatgcaattttaagattggcggatttttgacgtatggttacttgactgttatgactgaagctaataaacaaaatatttcagattggaataatatattggaggttactcgggatgccaccgttgagttgtcaggaaacaagcagcatccggtctttgacgtttttgtgtctgatacggttgtatcccaaacaagtgtatcaacaaatgagtctgtagtagatgaatcgactgatacaatggtgattcatggagcggatgtgtcggcaaatacacagaatcaggtattggagggattgcggcagttaatagatacgaatatagctgctcctcaacgtatcgcaatggtcacccctattctaaataagtatttttctaatgcaaatgctattgtagaaatgctgggtaggaactgtaaaaccattgtggcaagagagacagccagaaactttttggaaagattgagtacagagtattatttgataaatttcaatgtactatcttttactcaagacaataatgggaagattacttccttgaggattaatgaggtttataagaaatagattttatacgattatgaagaagattatactatttactatcgttgtaacctttcaaatgtacgtttcgatggggtatgcacaaaccaatgatttatcgggagaagatttggaaatgtttaaagaggaggtgcggaatcgaattaatacttatcagatgtacttgtcgtttatcgggagcaagaagaatgacaatgcaacgaaggtggtttatatgaagcaagcactaaaactatttatgggagagggtaataattatcgggatatttatgataatattcagcctgcagtacgtactcaagtttcttcaaaagctcgtaatacaaagaactggatacagacaaagaattatctgagaaatttgactagtctaagttactcagaagtacaaataactcaagctgatgtatgctatgtctctgatttttataaagtcagagatggcttatataaagctgcggtgacaatcaaacagaaatttgtaggaatgagggatggaaaagtgatttatgaagacattacggaaaagactattaatgtatatcttcagcaagaaatcacgagcgttggcagtcaatatgtgatattgttaggtgacagtgaagtattggatacctattaaaagaaagtgtatgagacgaaaaattgtattatcaatttgtatcttgtttggttgtctgtgtatgacatatggacaactgatgaataacctgtctttcaatgaaacatttcgttatcgcgtaaaacagatggatgaatttatgaagcgttttaatggaatagagagcatcccactacctttggaagattctttgaaacggtgtacaaatatgctgtacctttttgacagtgagctgtttcgaaataacccggattctgtgaaaaatgcagtttttgagtttatagaggcggctgttgaagattctacttctttgcattatacagattctacgtggacggctgaggtattatgccattgccactacaagaacaaagaagaaaaagttactttatttttaaagcctgagcaagttgaagtatatgtatatcgctgggtgattgtcggtgcaaaaggtgaaattttggatttggagccattgaaacgaaatcatgggttagatattcaaccggataatcatgaagtgggttttattgacttgtctaaaatagcagcgataggtaatgagaatattctgaattattcagaaaagaattatttaccggatgctttgtctgtcttttatgctctaatttattccgggcagttaacattggctgttgtagagaaaacgaagtttcatctgtggcaagttcctggatatacatttactgttgaacgtgttgaacgtgaaggaaataacacaggatggctgatttcgtcttttaaacgaatagacggaaataagagagataactgtagtgaagaattatatagataagttagtcatgggaaaatatttaatctttatagcttgtctgctattgactaacgtgttgatggcgcagagtgaattaactattgaacaaagagaaaaagctgaaatgtgtgttgaacgttatttcaaaatgttagcccgctatgcaaatcatccgatgggtgcagaagcggcagaattacgaacggatattattatgatgtgtgagaataaatttcgaactccggtttataatgatttatattcatttaaagatattccaaataaatccacagcttgtaatattgatgattatttgttgcaatttggaattttggaagagaagaatagctatactttcaagattagctatgattcaattgtttgtcatccagtgtctgttcctacttatgcggacaattatgaatacgataatgtgtttgtttatgtaaataagcatattgaaggcgatggcaagaatgtaaagattaagaatgtgattcggttgaatcttgagaaagaagaaatcgcatatattgaaaaagctgaatttgacactaatgataaggatattgagttcttgttgaaacattccttgggttacagtccttcaaaacttaatgaagttgccagtcggtgttataaagagaagaagtataaatcggctcttttgttgtttgagcagagtgctattcgtgatgacatgaattctcaatatgcgttagcaaatatgttgtttttgcgtcaaggatgcgaagagtatggagaacgagctacgcattatatggcacaattttgggcaaagaagatgtattttaaaagaaacaccggagttcaagattcagattatgaactcttgaatgggcttatgcagaaactatctatgacaaaattctcatcagatccggaagaagttccttttaatcatggactcatgaaatataaagagggggataaatatgggtttatgcgtaaagatggagaaatagaaataccgcctcaatatacttttgcctttcctttttctgaaggattggcttgtgttgagctgaacggaaaatttggttatattgatattaagggaaaagttgtaattccctttaaatttgacgaagcatcaccttttgtaaatggcgtggcttcggttttcaatgaaaaggaggataagatgaaagaagctttcttgataaataagtctggaaaaatggtctctgatgtatatgactatattggaatgtgggattcgaaaggacaattactgacacctgttaagcaaggagaagggtggggctttatgaatcatgacggtattgtgaaagttccttttatttatgaggattgtaccagatcaagatctgtattggtgaattccttggatttgaattattgttgggtgaagaaagatggtaaatatggattttataatataacttcagaaaatgccaaaatggttgttccatgcaagtatttatctaccagaagttttagctttggactggctgctgttactgaagatggccataagtggttttatatagactataaaggcaataaggtgtgtggtgactatgctgctgttggcaactttcgcagtgatggtatggcatttgtgaaatttgacggaagttcaaatattggttattttattaatccccaaggtgagattatacttatatgtgaagaacatgaacatgaaatttataacttgcgaagatataatggcaatcagaaataaagaatccgcatgaatatcaaaagtatgatagttgaagaagttggaaaatggacaaccctgtcggtggaaaatactcatagacagggttgcattttctcttgctgattattgatctgtatgtcttgcgggcagcaagacggtgagagtgccttatgctaatacttttctgaaacgttcgaggaagagattggcttcttccatgctgaggcagaggggtggaagcaggcggagtacatttgtaccgctgacaccggtaaatacatgttgttctttcaacagtttcagacgaagttcctttatcggttcttcaaattcaagaccgatcatcagaccacgtccgcgaacttctttgatctgcgggaactttttcaattccgtcatcagatactcacctaccttggctgcattttcaaccagattctcctgacctattacgtccaagacagcaagcgctgcgctgcatgccaggtgattaccgccgaaagtagtgcccaactgtccgtaaaccggagtgaacatcggactgataagtacaccggccattgggaaaccgttaccgatgcctttggctaccgtgataatatctgctttgataccgttatattgatgagcgaagaacttaccgctacggccataaccgctttgaatttcgtccagaaccaatatcgtattatgagctgtacaagcttcacgcaaagcctgcatgaattcatctgtcggcaattgaataccacccacaccttgaataccttcgataatcactgcgcaaacatcaccttttgccagttcgtttttcatagcttcaatatcgttcagcggaaggtaagtgacatgtccgcagtcattaataggagctatgattttgggattattagtcacttccacggcaagtgaagtacgtccgtggaatgccttgttgaaggaaaccacacgtgtacgtccgttgtagaacgaagcgagtttcaaagcattttcgttggcttctgcaccgctgttaatcaggaataaggagtagtcatcataaccacaaacttttcccagacgttcagcaacctgttcctgtagcttgttaatcacagagttggaataaaatcccaacgtggcaacctggttgctgatcatctccacataatgcggatgtgcatgaccgatggagataacagcatgtccaccgtagagatcgaggtactcagtaccgttctcgtcccacacgtggcagccttttcccttgacaatgttgatgtcaaaaaggggatatacgtcgaataagttcatttctttaattctaaattacaaaatacaaattacttagaaggcgctgggtttcaatcgcaagccgacggtttcttctaaattgaacatcagattcatgttgtgcaccgcctgaccactggcacctttcagcaggttgtcgatgcaggagatgataagcagcttatcaccgtgcttttccaaatgcagaagacatttgttggtgttcactacttgtttcaggtcgatgttcttttctacgatatgcacgaaagagtctttggcgtaatattcttcgtacatacggactatttcatccagtgcaactttagtttttactacgatggtagcaaaaataccacgtgcgaaatcaccgcggtaaggaataaagtcaatatccgcatcaaaactgttctgcaattgcttcagagattgcttgatttcgggtacatgctggtgctcgaatgccttgtaaacactcatgttgttgttgcgccaactgaagtgactggttgatcccggttttacaccagccccggtggaaccggtaatggcattcaccatgatgtcattgttcagcatcagatgtttggcaagggggagcaatcccaattggatacaagtggcaaagcaacccggattagccacatgctttgctttgcaggtagcgcgacggttcaattccggcaaaccgtaaataaagtcatgttccggagaagcgatgcggtagtccatagaaaggtcgataatcttcaactcctcgggaaggttgtgactctccatgaacttcttcgtgtcgccatgggcggtacagaagaataacacgtcaattttgtccaaaggtaactcgtcggtgaagacaaggtccgtttcgccgtacaatccttcatgtacgtcggtaattttgtttccggcgttacttgagctgttgatgaatacgatttccgcttccggatgattgatcagcaaacgaattaattcacctgccgtatatccggctccgccgatgattcctactttaatcatgttagtttatactattattcttttatctgttatacaagttcttttcctcgggaacaataagccacattataaggtacacggggataccggcaaatacggtaaaaaacgtcaataacgcatagccgatacgtacgagtgaagggtcgagtccgaaataagcggccaatcctccgcagacgccggcaagcattctgtcgctgcgtgagcgagttagttttttgttattattatccatatctgttcgtataattgttctatcccctaaccgttctctatgagagatgggttaggggataggctttttagatttcttcgtctttatgattgttataatatactctcagtggagtagaagtaaccttgatgaaacctttcgcatcttctgctgtccagcctttttgcatttcgccatattcgccgaacttcgttttcacaaggtcgtcttctgattctacacctaccgtagagaaagataatgggcgaagttccagaatagccgtaccgtttacgttacgctggctttcctgtagcatggcttcgatgtcgcgcatcactggttccagatattggctttcgtgcaagaacataccgtaccaattggcaacctggtctttccagtattgctgccatttactcagtgtatatttttccaggaatttatgtgcaccgataatcagcatcggagcagcagcttcgaaacctacgcggcctttgataccgataattgtatcacccacatgcatatcacgaccaataccgtaagcggcaccgatttcttctactttctgaatggctttgatgggatcatcaaatttctcatcgttcacagctttcaactcacctttttcgaaagtaagacggagttgttcgctgccttcctttacacagtgtttcagataagcgctttcgggtaatccttgtgcggaatccagaatctcaccaccgcagatagaggtaccccacaaacctacattgtaagagtatttcagtttggtgaagtctgctgagaaaccatgtttgttcagataatcgatttcttcctggcggctcaatgccatatcacgagtcagtgtgatgatttccacgcccggagccaatacaaggaatgtcatgtcaaaacgaatctggtcgttgcctgcaccggtagaaccgtgagcgatagcatctgcaccgatctcgttggcatagcgtgcgatggcaagtgcctggaagatacgttcggaacttacggaaataggataggtaccattacgcagcacgttaccaaataccatgtatttcaagctcttttcgtaatattcctgcgtcacgtcgatagtgacatattcttttgcgcccagtttataggcgttttcttcgtttgttttcagttgttcggggctgaaaccaccggtgtttgcacaagctgcatacacttcataccctttttccttggcaaggtacattaccgtaaatgaagtatcaagaccgccgctgaatgcgactactacttttttcttttcttccatatcctttgttttttaaattttatcatcttcatgcagagccgggtcgtagagcattgctgtgcagatgcagaatttgcggttcttggctactaatatatcatggttgatgcagccttcgcagcctttccagaaggattcgtcatcagtcagttcattgaaagtgacgggaacgtatcccagttccgtattcattttcatgacggcggctccgctggtgagactgaatactttggcgttaggccatcgcaagcgtgccaggcggaaagatgccattttgatacgcttagccaatccaataccgcgaaagtcgggatgcacaatcaaaccggaagtcgcaacatattgtttgtttccccaactctcgatgtagctgaagcctgcaaacacgtctccgcataaggcgatgatggcttttccttctttcatttttgtcgccacatattcgtgtgtgcgttctgcgatgcccgttccacgtactttggccgcttctctgatggtatccaaaatcttatccacataaacttcgtgagaggcgtcagccaccatcacgtccacttttttggtatccatttcttattgattcgttctttatttatttaatgttcggaatgatttgtgacagaaattcgcgtacttcgccatgtgaagcagcttcatgcactaccaacatgatggtgtcgtctccggcaatagtgcccagaatggcgggacattcgcggttgtcgatgtcgtaggccatactgctggcatatcccggtcgtgtacggataacggcaatgttaccggagaattgcagggacacgaatccgctggtcatcaacatctcgctggcactttggtcattggaacgtttgtacatgatgttgttgggtaatacatatacatatttcccgttcatgtttgccgccttggcaactttcagttgtttcaagtcgcgggagagagtggcttgtgtcagttcaaagccttctttactcagagcttgcagcagttcttcctgagaactgacgtccttgcttgagataatcatcttgatagcgtctaaccgattggcttttttcttcattgttctgtataattattctaagaatggcgcaaaagtagcgataattttggaaagaatatgcattaaagagggaatttttatactttttatactatgaatgctgtgctttatgcataaatcggagaatatatgtaattattttatttcctgccaggaaaacacagtcccgtctttacggttgggtatagtcccgggccagtcggcagaataaggttcgtctgtacgcggatctaaaccaatgaagcgattggtttttagggatagtagcatacattgtccccatagcatatcctgccacatgaagaggctgccttccgtttctttctgcatgagtcgaacatctgctgagaggccggctccagtgacggtgacaaagcctgatccgtctaatgcttcaagagctatacgtccttgtccgcggtcgtgtacacggaactggcatccggtaccgttgaacgtattacttcccggataggaacgattcagcataccgtggggattagcccagacttgctcaccgtttgcgagattggttagtgttatcactttgccgagaggaagatttttagagcgatctgccagtggttcttttaccttgaaattgtcgaagtcggcataacctcccgcttttccattcgtattgaaagcaaataaggcataccgtactccctggaaagtcttcatttgatagcccagacgcagttcgccgccgacttctttaaatgttttaccgtctgtactgaagctgagtgttgccaggtctctattgtaatcaccactggcacgcaggtacacttgtgggccggataatggttcgtctgtagactggttctttactaagtcgtaaaatctcaggatgaatccctcgtcagtacgcactacaccgatccaataatagggaacattcaataacccaagtccggctacgtcacctttctttaaggatttggcatttaattcgacggtggcgctggactccggaccgatagcgcgttgagtaagtgtatttttcgcatacatgaagtttttggcagggagagtgtgcagacgcagtacaccttttttctcagtgagcgaccatttcttatctaccggaatatggttccattgccagatcggttttagtttggcagacgagaaatcatcatcacgctgataagtcgtcagaggagctatatccgttccggtatccggtttgaaccaggtgcgtggtgaacgtcccaggtttccttccagtccgaagtagggccaaccatctttccaggtcacgggtgaaaggaaagtcaggcggcctgcagattttacgtccatcattgagaatccccaccattcaccattaggcagatcgacgatgcctccctgatgaagggttactgcaccgaaaccattttcagaagggcgctcaaattccattgcttctccttcattggggatgttcgaccagaagccatatcctttggtccaccagccacgttgtgtacccatggtttcacgattactgataaccacggtttcgtaaggaccttccagtttgtcggcgcgggcacattgcatacggcctacgggtgcatagtctgcactgatgatataatattttccgtctattttatagaaatgatgcccttctcccatggcattacctttagggatgattactttttcactgccttccacatagccgctgaagtcaggtttgagttgaatcagatgtacttcgtcgtaaccatgtactgcatatatcttgtcgtcgtcatcaaacaatatgcccaggtcgtaaattctgccacccatattcttgtgtgtccaggggccggcgggatttttggcagagaaaacttgtaagccatggtcatttacgttgacgaatacatagaaagtgcctttgtgataacggatagcaggtgcccatattccgtttccataaatgcctttatcgccttccagatgaaaatcaggtcctaaatcgagtttgtcaaagatatatgttacgaactcccagtttaccagatctttggaacgtagcagcggtagtccgggcatggcatgcatggaactggcaaccatgtaataatctgttcctacacgtatcaggtcaggatcggtaaattcatcgtaaaacagaggattggtaaaagtaccgttgccgttgtcggctgtccacgactgggcttgtaactggcagaatgccatcaggccgaggatgatagagaatatatgcttcatggtcataataaatagaataaattaattaatttgaggacttttcggagaacatccaataatcgaagttgaaaagctcgtggggagttttacctttaaatataaggtataggtcatgaactcctttgaccggcttcacatgggtagagtgttgttcccaattatcccattctccggtatagggaatgtttaaggtgccgatcacttcaccttcgggtgagtcgattcttagttctatttctcctccatgatatctgctggatgcggaagcggtgaattgcgaagcacctttctgtccgaagttcacatcacgcaccttgatgtaatcggtattatgaatagcggttatatatacacctttttctttatcggtggcagatgtaacgccttgtgcccatgctatagtttccgcttcagttcgtttgtatggattgagtgtacctgttcctttctttataccttcattagtcatgtgcatttgcggtatggttccgtcggggttgtatgtgaactgttccacacataccgatctgcaataactgtgcccaccgggcagcgcatcattatgatagaagaagtaggagttacctttaaaatcaattattccgggatggttggtattacttcctttttccaatggcattacgactccccgggctttccagggaccttctgcggtccgggcggttgaataatgtatggattccgggaattcggcggcataaatcatataatacaggttgttacgcttatatacccagggcgcctctgtgaaccttcccacaaaggcggtctggtctttgatgtcgagtgctgtgattgagccgtccagggatatcatatctttattcagtttggcctgataacaagccccgtttccccaatagagatatgcttgtttattactgtcgataaagaccgtagggtcaaggtcatcccaggagtgtttggcggctgtagtcatgtcgttggttactaatgcctggcccaatgcatctctgaagggaccataaggagtatctgcaacggctacaccgatggatgaacccggactgaatctgttttgtgaggatatataccaataaaacttgccatcccgctctatgcattgtgcagcgctggcatctccggctgaccatttgaaatcacttgttttcagcgctgctccacagtccgtccaattcaccatgtcggtagtggtatacaggcggtattctctcatcaggtatgcgttggaaggagcatccttttcatcgcatcccacataaaggaataatgtatcgttatgcaccattggagcaggatcggctgtatatttggtttgaataatcggattttgagccgttgccaaaagtggaaggaaccccagatatagggctaaaatcttgtttttcatcataatcgttattgttgatggttgtttttaatacaaatatttattgtggatattaatgtgcgaattttattgaatggttttgatttcttttccgatagtgacacccgcttcattgaaactgtctattgcgaaataataagtctggtcagcgttcaatatgttaatggataccttgttgtcttcatataccagataattatggtataatttgtttttctgtgtaccgaaccggatattgtatccggtagcatcgttgactttgctccaactcagatttacggttctgcggttatcgttgtttctggttaattccgtgaattgggcagttgccggaaccggtttatccactttcccgaacactcttaagccggaaatggaaaacttgccggaagggaaatagatattggtgatacggatatacctggtgtctgccggtttgtccaattggatgtagtcattgggagcatcagctttgttctctgatttgtcaactaacagattccatgtaatcccatcttgggattcttctatccggtattggtaatatatggaatccgattttcccaatgcggtagcatcctggtcggcaaagttgacctgaatggcatagactttagagttccggtctaaatcaacagtcataaactctcctttgtctgcggtttttgcgctccaccatgttctgatatcttcattcacggcattctctgtaggatatccttccaatgtagatgacgcttctaccttctttttataagacaggagcatccatcccgggaataaatcttgtggagaagatatttttttatcaggaacaatcataggatagtctccccatgctgtgtatgcataaacatctccatctttgtcaaagaaggttggatatagggaaatccttctttcgaacatgtgccttcgtgagattgtggaagtaccgatattccagtagtttccatataaatcctgaaatgtgctgccatgtccggttccgttgacaaaaccttcgggtttataagagaaaggattatgtttgagtaaagtgaatgggcccaatggattttccgatacgtaaactccgttgctgtaacttttgaattcggtaccgggtactgcatattgcaggtaatacttccctttgtattggttcatccatgcgccttcaagccagcaagtgtgcttgtaattggtattatagtctccggatacttcccaaccgtatttttcagcattgctgtaaaataagggaatggcttcccctttgggcataaatgtttttttatccaattccattcccatcatgggagtggctgcaccggaaccatagtatagatatactttgtcagtatctgaatcgtaaaacaacatcgggtctgccaggatataaggaaactgatcggttaccaactcccatttgcctgatttgggatcagcgcttttatagattttgttggtggctacggaggccgtgaagtagatctctccgtccatttccataacggtaggagcatacttctcgattggaagactgtcagtggttattaaatcccaatgaacaagatctgttgaatggaaataaccaccggatttagaaagaaaaagataatattctcctttgtattttatcatactggggtctgctgcctcacgccaggacggagagtcgagtgaaaaacgataacttaggtttaccggattacaaattgttttgaccttattctctttttccctacatgctgccaatagaacggataatagggagagtagcagaaaggacttgattgttgttttcattttctatttgattttttctatttcaatatctttatagattgcctcgcaagctttaccttcgtgaatttgtaaagcgatgtatcctgtcagtggaattttacctatttgtgcatccgggtgagggcagtcggagaaaggctcgatgtagtccaatgtttgtgttccattcagccagatgcggatacgcggaccttcacaacggataatatatgagttccactctttgggattatagtccgggtttttacagagaggcgtacctaagaaatcccaccggcgttgctcatcataaagcgctccttttttccatgagatgatgtctgcctgataacctatcatttcatgttctttgttcttttctgtttggggttggctacggaattggatacctgcattatatgagtcatccgcacagttaattttgaatttcaggcggagttcaaagttactgtattcgcggtcggaacgcaggaactcatttttaggaatatccttttctatgcttccgccgataatggcaccttcttctatgcgaaaccacttcatgctgttgtcgccgttattgccagtccagcctttgaatgtctttccattaaagagaggttttcccttgaaccctttcggtatgtccattggagtggaagtcgctttttcctttgttggtatcagtgaaaggcattgaacatcgggtagtgcttctttgtgtaccagtctgcctttctcatcttttgctaaagagagttggatgccttggagctgaatatctatttctcctgtaacaggaatatttatgacgcctaaatccatctcccggtattcgttccaattgttggtcggctgaatcaatgtggcaagttgctgttgtcctgccgtaacagttagggcgctaccttggtagggctcagcatacttcatgcgtacgatatagttcccttttttagagaaggtgttccacgaaataagttgatccgtgttattccagccatgtatcgttgctaatgtatctttgtcatatacctttaatccgccttctgtccgggcattctgtgcccacaattttacggtttcattcttattggagtttttcgctttcctatttccgaacaattctttactgagttgatgaagatagcccacactgggagttacgtatttcaacggttcatcctgatccctttcatattcgaatacgataacgggagtagctcttttttcataaagataggttagcagttctttgatttgagctgctccttcccccaaggctacatcttttccttctttgttgcaacggtctacatcacgaaaatgaaaatgatacatacgacctgcatcggtgtagcttctaacagcctcatatacattggtaccatcgcgcataaagtgtcctacatcgacagaagcaccgatgtatttactcctgtttttacaatcggccaatacatccacggggttccaatagggcgaaccatgtgctttggggtgattggtcagaaacatataaacgccatacttttggcataattcgtcatagaagtccatacttcccggaccttctgcaatacggacaggatcggtagtcaaagatagatgccattctttgcagaattggaacaatttctctgtttgtccgttctccgcatcttccttgcttggacggcagtagaatgaagtaagtgttatatccttctccagacatttgttcttgattttttgtttagtctcttctgacatttgccatggattgaatcgttcttcttttcccctctctatggtttgccagattgtagcctctacatatttcagacctaaatccgccgctgcatcaatagcgtcaaaaagggagtaccgggtgaaggtataggactgaatacctactttccaacccactttgtcaaagtcagatgcaatgtttgtttttttattctgggcatatccgttggcggttgccccgaaactgaacagcattattaatataagctgtagatgatgtgacatgtttttcattctgctgataatctaaaagttctgcctgcaaagttaggggaggagatagggaaaggacttttcattttagatatttcattttgcatttcagataaaaaaggcctgcataatggtctccggccttatttttgaggcttttcttagatttcggtaggtgttttgccgaaatagcttttgaaggcgcggctgaaaatgctgaggcttgaaaaaccggaaagttcgctaacttcggttacagtatattgaccggattgcagaagtttgagagcatgattcatccgtacggtcttgataaagtcagacggcgattgatccgtcaatgttttaattttcttatatagaagtgaagaactcacattcatggctgcggcaaattcttcctttccaaattcgctattggaaatgttttcgttgatgatgctaattgcccggcttacgaacggatcacttggcttactctggggcacaggcagttcttcccggatgcccggttctgcctgtgccattctttcttgcatgagtgcctggacagcatcggcaataagcctgtcattggtactcttccgcttcaagcggttcgaataacttttgaaagcataaatgatatagcagatggtgcatagactgatgatagctgcaaaccaccaggttttccagaaaggaggcgtgacgtgtatgttcaggctgcgttcatcaatcatttgcgatagagaactgtcgtacatcctgatgtgtaatttgaagtttccacccggaagattggtataattaataaagtgaagttccgaagggcggctccagtttgcgtccaatccctctaatagccacgagaatttcatgtttcctgaagaatttcctattggaagcagctctaacatgaaattgttctgagtgtagtttaaggaaagattcttctgttgattgacgggagtattgtttaataaaccgggaattgtgcgtatggagcggcctgctacggtgatattctggaaaaagatatttcctcgtggaggggtttcctgaatcagttccggcgcaaacatgattgcaccgttgcttgttccccagatcagcttgccattcttcagccgcgtacaggagttgacgcagaaagtcgtggttgaaagggaatagactgatgtgtagggttggattgtattatttaagatattgagccggcacaagcctcgttctgtaccaatccataagaaaccgctgtcaaataagatactgttcacatagttggacgtcaggccggattccgttgtaaatctctctgtttgttgtttgtcatagtcatatcttatcaggccgtctctgcaagtggcaacccatattgtattgccggttactactacgtcctgagtcagactgccttcgactaacgtttccaccgttccctgatttttatccagcaacaacaaaccacgtgaggttgtaagcaacagtttccccggagaaagttcggcaaacgcgctgacgggctggaccggatattcacggaaacgatcttcttttatcagataacaggatagcttttggttgccgcctatccatacgtctccttctttatccacgaaaaagtcaaagatgaaatcgcctgtaaagccgggagtgttggtcttggaggagtaatgtttcagcgtttttccggtttcacgatccaatagatagatgccggaagaataacttcctgcccagatatgtccctggttatcttcacataaagataagaatacctttgcctgttccgatttattctggtaataatgcttccacttgttggatgctgcatcccagcggcttacaccattgtttgtagcaaaccatatatgcccttcgtgatcttcaatgatctggttgacgtagttgtttcctaaggagtttgggttgtttatctggtaagtgaccggtgtgatctgggagttgttgttttcaaagaaagacagctttccggtgaatgtggctatccagttttttgaaccgtcgcaaagaatatcatatactccgtcaccccggagtgaaaaaggattgttcaggtcctccttatatatatggagaattgtatctcctttttcgctgatgttccagataccttgtccgtcaataccaatcagaagggtgtttttggcatcctttctgatagcaagaatgggttgcttcggaaagtttctgatagggatatctgataaagatttccggatgatgtcatagtagaaaagcccggccgatccggttccaatccatagacgttttagctggtcatcatagtacaggctgggtacctgaaagaaatcttccgtagtgtttgagtaaagaagccggctttctgatgtcgaaatattcagtagtgaaatgcctgccgatgtaatatagaataagtgattgtcgtcataaaaagtgagatgctttatgtcctcttccgtttgtgggattttggtaagtatgttattctcatatttaaagagtccgatcgaggaagcaatccaaagtacattgcttgtatcggcaacgatggttcctattgtaatgtggctattatcggtttcttcccgcaagtctgtcaggaagaagaactggtctgtaggttcgtcataatggaatatttggccgttattggtgtaggagaacagttgtgaattgctataagtcagctttacgaatacaaaatctgtggttcggcagggaagctcataattgcggcagtcgccttcagtcactcttaaaatgccggttttggtggaggtccagataaaaccatactggtctttacagatggaaaatgcttctcctgatgtaatgccataggtgtcactgatgttgtagaatttggtattggtagagaaagagttcaaactaatagaaagcaagacaaacagcagcagttttactctttcttgtaatatcatttggaactttttcattaaaggagcattcgttgtttagaaattctgtagcaaagataataaatatctattgagttatgaattaattcgccacggagtaacacagagtttcacggagatgaatcctgcaccgtaaagcaaataagaaagagcgctttgcaggagttagacttcattatctcgttatatagaaagctgaatgatagaggaaaaacttgatatgctccttcctttttctcctaaagccttaatgttaatgttattatgctataagcaaaacctcgtttttcaattgaaggctgtgcagcccgcagttgtgggaccgatagccctcaactgtaaaacgtagagccctcaactgggaaacgaagttttgttacgggcaaaggaacaaaaacaataaggctaagttgggttttcataggaccttcttctcatttttcttattgttcctaagtattctattgtgggatttgtcgatctcgcaacaggattttcaagttcttttcgtcgcctaatattatgatatgaaaggaatcaggaagtttttttgaagaataatgcagagatatcctctgttttcttgtaaaagagaggtgtttacggggatgtgcgtaaggtatgtaaaaaaacgtgttgagagtctgattattagctggttgtaatagaaaaagtgctttgaaagcctgtttttggggtgtaggatgaaatttgcctacaccattctacatcattttctacgcatctatttgtctgataatcaaatgaaaaaagtctccggtgtaggatgtaggaaatagagaactatttttccaatagaagaaatttattgtttgcgttgtttttgtatgggataaatagtcatttgtatctttaacataccgttctacaatacttagattgcgttattccggtcgggaacattatttctaaaacgttggtggagtcgttttctctatcataatgcgctaaatgataattgccgtatcctatgatatctattccgatattttgtgtatctttgttgcatatttcttcagtggtgaagggatatgttttatgatttggagatcattttattattcgtactttcggaaatctggtacatttttaataagagcgaatgataagtgaaggtctccacgtccggattgcatataactttgttatatacatcttgtggcgtggagctattgcttattattttcttaccggtttaccagagcctcgaaagtggataatatgttaatagttcccatgccacttttattatagaggtataggggcgacatcaacctttaaaacttataacacgatggatgaaccttttacttgcacttgccaaatgaaaaccgacttagaaaactcagccgatgtattttccttttttaaagagaactaccctttacccggtattgttgataatcttaataaactttccaataaagagttacgctgtgcctgttgcttgatgggggctgctttacttagcatctcccgaaagaaaacgatttggggctggctgaagataaagggatagataatgccaattctgtttttatggaaacgacaaaagcaataagaaaactatcaaaatataaagaaggggtttcggtggaaacccctatttttgtgccgtcaggtattggcatgttctataaaataatctatgtgaatctataaactattaaaggcacatgaaaaagcttcttggattttctatttttcttgtattcgttttgattgcttctctcacggcagaagcaaaggtgacacttcctgctattttttcagacaacatggtattgcagcaaaacacacaggtgaatgtgtgggggaaagctgcgcccggagaaaaagtaacggttaaagcatcatggctggataaagctgtgactgccaaggctgcggccaatggtaaatggaccgtgaaactgaagacaccgaaggcaataaccaaccagtccgttacggtgagcggtgaaaatgagattaccattaataatgtattaataggtgaagtttggctttgtacgggacagagtaatatggagttccccgtatcgcgtcatccggatgtgaagtggaataccggaatgctgaatgaagtggaagaactgaaggatgccgattatccggaaatccgcctgttccatgtgaaacaccagttggcgcacgagggtgaattggacgactgtgagggggaatggttggtttgcaatccgaagaacctgtatgacttttcggctgtgggctttgtcttcggacgtaagttatataaagagctgaagatgcccgtagggttgattcagtctacctggggcggaacacatgcggagtcatggacaaagctggatgtaatgaagaaaaatccgctttatgccgatgtgctgaaagactttgcattggaaggcgtgaagcaacagaaaaactattgtaaagtacctgcaacattgtggaatggtatgatacatcccattctgggatatacgataaaaggaaatatctggtatcagggagagtcaaactctatccgtgccgataaataccagcaggtattcaccaatatgataaatagttggcgtaaggaatggaagcagccggatatgccattctactttgtgcagatagctccgcactacggacagccggccactatccgcgaagctcaactccggacctggcaaagcggactcaagaatgtgggtatggcagttatcactgatgcgggcgactcgctcgatatccatccccgcaataaaacagtgacgggtgaacgtctggctgcctgggcattggcaaagcaatatggtaaggacgtgacttattccggcccgttgttcaagacaatgaaggtggaagggaataaagccgtattgagctttgactatgctgacgacggactgatgactccggacaatgaaccggtgaaaggctttatcgttgccggtgaagatcgccgcttttatcccgctacggccctaatcaggggagacaaactggaagtttccgctccgcaggtttccgtgccggtagctgtgcgttatgcatattgcaatttcttccgcgtgaatctttataataaagccggattcccggctactcctttccgtacagatacgtgggagccggattcgtatgcccgttggtttgccgattcggaaatggtacgttttccgaaagcctatcagttggatcatgggaagcgtctgttctttggatatgcgcagggtgtaggctgctgtgcgatgttgcggatgtggaagaagacaggagagcgccgttatttcgactatgtggagcaatgggcggattcgctgattaatgataaaggagaaatccatttgtatcatgtggaaacatacaacctcgattatataaattcaggtaaggttttgttcgatctgtatcgtgaaacaggcaaagagaaatacaaaacagcaatggatgccctggttaagcaactgaaaaaccatccgcgcacgctggaaggcgcgtactggcataagctgatctatcagcatcagatttggctggatggcttatatatggcatctcctttcctcgcacaatatggtgcggagttcaacaaacccgaatggattgatgaggcggtaaagcagtttacgctttgccagaaacatacgtatgatgccaaaaccgggctttatcatcatgcctgggatgaaagcaagagccagcgttgggcagatccggaaacaggacattcgcctaacttctggggacggagtatcggatggtggttcatggcgatggtggatgcgttggatttcattcccgaaaaccacgaaggacgcgcccggatgattggctggatacagggactggctgaggtgttgcccgcttatcaggacaaaaatggtttgtggtatcaggtactcgaccagccgaaacggaaaggaaacttcccggaagcatctgtgaccacgcaattcatgtatgcttatgcaaaagctgtgaataaagggtatattgacccgaaatatcgtgctgtggctgagaaggctttcaagggattgaaaagtaaactgatggtagaacgccaggatggtacgctgacactgacacgttgctgccaggtgggcggcttgggcggacatccgtatcgcgatggcagcttcgaatattatatcggtgagaagatgcgggataatgatgcaaaagcaacaggaccgttcattatgggctgtctggagctgaataaatagtatatatcatgaaaaagaatttattggcaataatctttgcttctttctgtgccggaaccctttccgcacaaaatatagcgtggcctgaagtaactacggaagctaaaccgggtgctcgctggtggtggatggggagtgcggtagatgcggctaacctgacccgcaatctggaagcatattccaaagcagggatgggcacgatggaagttactcctatctatggggtgcagggtaatgatgcaaacgaaattcagttcctgactcccgggtggatgcaaatgttacgccatacggaaagtgaagctgcacgcctgggtatgaagattgatatgaacacaggtacgggctggcctttcggtggcccggaagtgggtatagaagatgctgcctgtaaattgctgattgaagaatatacactgaagggtggtgaacgcctgaaagcaaagatagaagtgacggatgaaaaacaacgtccgtatgccaaactgtgtaagctgatggctttcagagtgctgactgacgcttctacttcgaaagaacaaaaggctgtgcgttgctatgacctgacttcgaagatagagaacggaaagctggtatggaaagctccgaaaggggagtggcggctgattgccgctttcgtaggtaagacatttcagaaagtgaagcgtgcagctcccggtggtgaaggatatgtgatgaaccatttttcggcaaaagcagtatccaattatctgaaccggtttgaacgggcttttgccggaaaggcgactgatggttctgccggaactccaacagagtatccgcataattttttcaatgactcttatgaagtttacggtgccgactggacggacgacctttttgaacagtttgcccgccgtcgtggctataaactggaacactttcttccggatttcctttcgaaagaccggacagagactacccgtcgcattatctccgattatcgcgaaactcttgccgaactgcttcaggagaacttcacccgccagtggacggactgggcgcacaaacatggttcacgtacccgtaaccaggcacacggttctcccggtaatctgatagatctttatgcgacggtcgacgtgcccgaatgtgaggggttcggactgtccgacttcggtatccgaggattgcgtaaggattcgctgacgcgtcccaacgactctgatctttccatgctgaaatatgcttcttcggcagcgcatattgccggaaaaccgttcacgacttcagaaacattcacttggctgacagagcacttccgcacttcactttcgcagtgcaaacccgatatggacctgatgtttatctcgggtgtgaatcacatgtattttcatggaaccacttactcgcccgctgaggctgcctggccgggttggaagttctatgcttccattgatatgagtcctacgaataatatttggcgggatgtccctgcatttttcgattatgtcacccgttgccagagtttcctgcaaatgggacaaccggataatgacttcctggtttatctgcctgcatatgacatgtgggatgagttggacggacgtttgttgcttttcgatattcataagatggcaaagcgtgctccccgttttatagaggcggtgcaccgtatttatagtgcgggatatgatatggactatatttctgataacttcatccgtgatgccatgtgtcaggacggcaagatattgacttccggtggtgtctcttataaagcgctggtagttcccggtgcccgcctgatgcctgccgatgtactggagaaactgcttcgtctggcagatgaaggtgctacgattgtttttctggagcaatatccggaagatgtgccggggttgaatactttggaaggacgccgtactgagttcaataaggcgctggtacagataaaggagcgggaaggaaagggacatattctctttggaacagactatgctcgtacactggccgccactgctgctgttcccgaagagatgaaaacaactttcggattaagcagcattcgccgctcgcatcctgaaggacaccactatttcatctctgctttgaaaacagaagataccgaaaactggatacctttggctgtacaggcacgttcggcaatgctttataatccaatgaacggaacctccggtaaggcacggttgcgccaaaataatggcaggacggaagtgttcctgcaattggcatccggtgaatctgttatcctgaagacgttcgcggaccaggaagtttctgcacccgaatatggatactggacgcctgtggtgcagaacgatgtgaagaagacgtctccggtaacttattcttttaccggtaaatggggattccgctttgtagaggcaagccctgcggttgctgccactccggacagtgtatctcttggttcatggacggaaattcctgccgaaggtgcaaagaatgtgatgggagctgcttgctataccactacgtttacactgaagagtcctgccgatgtcgaagagtggatgctcgacctcggggatgttcgtgagagtgcccgtgtacgcatcaacggacaggcggtagctacgcttattgcagttccttatcgttgtctggtaggtaagtatcttcgtccgggcgtgaatacattggaggtggaagtaaccaatctgcccgctaaccgtattgctgatatggatcggcgcgacgttccctggcgtatttataaggatgccaatattgtgaatatccattataaaaaggataattatggcaaatgggagccggttccaagcggcttgctgggacctgtacacttgattcctatgcagactttgaaataagaactttataattcggagacaggaaatcaccacagattacacagattatcacagattatttttttatcattaataatcatatttatatctgtgtaaatctgtgtaatctgtggtgattccggtacatcctcaaactaaagcgataatcaatgaaatcgaatctaattatgctctgcctgcttgggttggcgagtactctgaatgcccaggaccctcgcgagaggcattactactatgaaatacttgatccgaggcacgaaccgaaacccttagtggaaggttttacccgggaacgggtgactgagaatctgaaccgtggactgacagtaacccctgcccgcgatggcaaaggtatttatctcagttggcggttattggcatcggatgctcccggtactgcatttcatgtctatcgggaagctgacggtaaaacgcgtcgcctgactaaaaagccgcttacacagacttgtgactttatggatgtcactcctgccgaaaaggcgtcttattgggtggaagctctggtgaaaggaaagaaacctgccttgtcggagaaacgggaagtgattctttccgaattgaagccttatacttctattccattgaaagagggtgtgaaagccggtaagatcgctttagcggatttgaacggtgacggtatttatgactatatcatccgtactcccgaaacgaatgttgaccccggtatgcccggagatacaaccggaaagacatataaaatatctgcttacctgagtgacggaagctacctctggacctatgatatgggaccgggtatcgaaccgggaatctggtattctcctttcatagtatacgatttcaatggagatgggaaagctgaagttgctatcaagactgctgctgatgactatgtaaagaatgaaaaaggtcgtgtttgtggtggcagtgaatacctctccgtgctggatggcatgaccggtaaagagatagatcgcgtggactggcctgaacggaacgaccgctatggaaatctgattcgccagaaccgtaaccaaatgggggttgcttatctggatggaaagacaccttatatattggctgcccgcggcacttacaaactgatggtggtagatgcctggatgctgaaagacggaaaactgcaacgtgcctggcgctgggatggggatgaagaaaatcccattgtgcgcagtatgggtgcgcacagcatggtgacggctgatgtggacggtgacggacgggatgagattctgttaggctcgtgtatgctcgatgataatggtacgttactttggtcttccggtttggggcatagtgacaaggcttatctctgcaaacttcatcctgatatggaaggtatgcaggtgtttatggtgagtgagccgaagaaagaggatggtcgcggtgtttccgtggtggatgcagctaccggcaaattgatctggaaaatcgggcagaccacctatcatgtaggtgacggtatggtggccgattttgattcttcacatcccggtatggaatgttttgccagtgaagaccgtaaaggtggcagcacggataaatacctgctcactgccgatggcaagaaaataaacactacaaatgcggaagtacccggttgccgtaattggatatggtgggatgcggatctgctgcgtgagacttttaaaggagatgataaccgctggggagcttcttcatcttcaggtgggcgcaaacaaagcatctggaaatggcagggagaagtgttgactgaaggaatcgaaggtgatatcttgatgatagctgacttggaaggtgattggcgtgaagaactgattactgctttgccgggagagttgcgtatctatcataccaatattccggctcgcgaccgccgcgtaacgctgatgcaagatccgctttatcgtagctatgtggcgcatcgcagcatgggatatccgcaagcgcccgtaccttccttctatctgggagaatagaaataaatatctgattataaataaaaaagaactaagaatgacgaaacaattgtatgtgattgcagccgtgtgtctgtggttgctcagtgcttgccaatcttcaacgtataagtatgaagcagtatataaagacctgccttttgatatgccaagggtagaagcgccgaaattccccgatcgcaaggtgaaccttgctgactttggtgcagtgggtaatggcgaagaactttgtacggcggcttttgccaaggctattgatgccttggcggaaaaggggggcggacatttgattgttcctgccggtgtttggtttacaggtcctattgtcctgaaaagtaatattgacctgcacttggaaaagggtgctgttatcctcttttcacctgatgtagacctctatccattggtagagactgtatttgaaggattggatacccgccgttgccaatcgcctgtctccggacgtaatctggaaaatgtagcgataacgggagaaggtgccattgatggtaacggacattattggcgtcctctgaaacgggagaaagtaacagaaggtgtatggaaacagactatcgcccggggtggggtatataaacgtcccacctactggttcccttatccgcagacgttgaaaggggatactatcagtaatatgaacgtacctcagaatctgaaaaccgaggaagaatggcagagtgtgcgtcattttcttcgtccggtgatggtgagcctgatagagtgtaagaatgtatggttgcagggtgtgattttccagaattcaccggcatggaacctgcatccgttgatgtgtgagaatgtgttgatagaagaagtacaggttcgtaatccgagttatgcgcagaatggtgatggtctggatctggaatcttgcaagaatgcactgattgtgaactctacatttgatgtgggcgatgatggtatttgtctgaagagtggcaaagacgaagacggtcgccgccggggacgtgtttgtgagaatgtggtggtagatggttgtacagtattcaaaggccacggtggttttgtggttggtagtgaaatgagtggtggtgtacgcaatgtctctgtcagcaattgtcagttcctggggacggatgtcggtttgcgttttaagagcaagcgtgggcgcggaggagttgttgagaatatctggatacgtaatattgccatgatggatatcccgacggagccgattacattcaatctttattatggtggcaaatcggctgttgaagtgttggaaagtggtgagaaggtacctgctaaagtagaaccgttgccagtggatgaaactacaccttgtttccgtaatattcatgtgaagaacctggtttgcgccggagcccgccgtgctttattcttcaatggtattcctgaaatgccgattgatggtattgtgttggaagatatagatattacttctaaattgggggctgaatttatatatagtaagaatatcagtatgaagaatgtgaatattcgtaatacggaaggagaaaaagtgattactcgcttctgtgagggagtg

SEQ ID NO: 6343 - DNA, 61304 bp, Unknown
  gut microbiota DNA sequence
ccccgggtacctcgcagtacaacggttttcaagaccgccgcaatcgaccactctgccacctctccaaaaacttctctttcaagaagtgcttttctcttaaagcgatgcaaaagtactattcttttttgatatcacaaatatttcagcacaaaaatattatttctacgatattttataatcgcagcgcagttgacgcagccctatgcctgaaataatccatatgtatattttgtaaaataacagaaaagtatcaacttcgctatcaacctacaatttaccaataaattagtaaaagagtgcaggtaatgaacacaaaaaagccgactttaccggtaactcctatacctaacaatagttattttatgtcgtacaacataaaaaccgagtattcatgcactgctatgtggaaaaaagatagtaattttgcagtccttattaggataacaaccattacccactaacaaaatgaatattatggaattgaacaaaacctttatcgacgggctttggagcaaagaaatcaatgtcagtgatttcgtgagtaaaaatatcgcgccttatactggagacgcttctttcctgcaaggacctaccgaacgtaccaaacatatttgggagctttgcctcaaagcactcgaagaagaaagagctaacaacggagtacgttctctcgacccccacacagtatcaactattacttcacatcaggccggctatatagataaggagaatgaacttatcgttggtttgcagacagacgagctattgaaacgtgccatcaaaccattcggtggtatcaatgtagtagctaaagcttgccgcgaaaacggtgtagaagtagatgataaagtaaaggatatctttacccattatcgcaagacacacaatgacggcgtattcgacgtatatactgaagagatccgctcattccgttcattgggtttcctcaccggacttcccgataactatgcccgcggacgtatcatcggtgattaccgtcgtctggcactttacggtatcgaccgcctcatcgaagccaaaatggaagatttacacaatctgaccggtccgatgactgatgaccgtattcgcctgcgcgaagaagtggcagagcagatcaaggctttgaaagatattaagataatgggcgaatattacggactcgatcttagtcgcccggctacttccgcacaggaagctgtacaatgggtgtacatggcttatctggccgctgtaaaagaacaagacggtgcagctatgtctctgggtaacgtttcttcgttcctcgacatctttattgaatatgacttggcacacggtaaaatcaatgaaacatttgcccaggagctgatcgaccagttcgttatcaaactccgcatggtacgccatctgcgtatgcagtcatacaacgatatctttgccggagacccgacctgggtaacggaagccattggcggacgtttcaacgacggacgtgtgaaggtaacaaagacttccttccgcttcctgcaaacactgtataacctcggtccttctcccgaaccgaacctgaccatactttggggacctgaactccctgaaggtttcaaggaattctgcgcacaagtatccgtagacaccagctccatccaatacgaaaatgataacctgatgcgcgaagtacgtaactgcgacgactatggtatcgcatgttgtgtatcctatcaggctatcggcaagcagatacagttcttcggggcacgtgccaacctggcaaaagccttgttgcttgccatcaacggcggacgttgcgaaaataccggtactgtcatggtaaaaggtattcccgtattgaccggtgaaacattgaagttcgaggaagtaatgtcgaactataagaaagttctgaccgaaattgcccgtgtctacaacgaggcaatgaacatcatccacttcatgcacgataagtattattacgaaaaggctcagatggcatttatcgatacgaatccacgcatcaatctggcttatggtgtagccggtctttccattgccatcgactcactgtcagccatcaagaatgcaaaggttacagcccgtcgcaacgacatcggcttgacggaaggtttcgatatcgacggtacattcccatgtttcggtaataatgacgaccgtgtggaccaccttggggtagacttggtatattatttcagcgaagaactgaaaaagttgcccgtttacaagaatgcccgtcctactctttcattgctgacgattacttctaatgtaatgtacggtaagaaaacaggtgctactcctgacggacgtgccaaaggtgtagctttcgccccgggtgccaacccgatgcacggacgcgataagaacggtgccatcgcatcactgagctccgtagccaagttgcgttatcgtgactcacaggacggtatcagtaatacattctctatcgtcccgaaatctctcggtccgacaccggaagatcgtgttgaaaacctggtaacaatgatggacggttactttactaaaggtgcacaccacctgaacgtaaacgtgctgaaccgtgaaatgttggaagatgccatggaacatccggagaagtatccgcaactcacaattcgtgtttccggctatgctgtgaacttcgtgaaactgagccgcgagcatcagttagaagttatcagccgtagtttccacgaaagaatgtaatatgataaacgtacactcctacgaaagtatgggaacattcgacgggccgggtctccggctcgtcgttttcctgcaaggctgtccgttccgttgtctgtattgtgccaacccggatacaatagatgcaaaaggggggacacctaccccaccggaagaaattctgcaaatggctatcagccagaaagtatttttcgggaaaaagggtggcatcacattctcgggtggtgagcctacattacaggccgaagcgcttatacctctgttcaaagatttgaaagcaaacggcattcacatctgcctggataccaatggcggcatctggaatgaaaaagttgaagaactagtgagtctgacggatttagtgctgctggatctcaaagaattcaatcccgaacgccataagaagctgaccggatgcagcaatacaaaaactttgcatacggcagcttggctggaggaacagaaccggcctttctggctacgctatgtattagtaccgggatatagtgattttgaggaagacattcgcagtttgggcgaacatctcggccaatataaaagtatacagcgggtagaaattcttccttatcatcgtctgggcgtgcacaagtacgaagctatgggatgggattaccaattgaaagaagtaaaagaaaatactcccgaacaactggaacgtgcagaaaagttattcaaggaatactttgaaacggttatagtaaactaagaaataagaataaaagggacgggtgataacaaaaaatgtaatactgcattacatatattgttatcacccgttacatatatagtcatttccttttgaaggaaacggttatgtactgattagtaagtcagacggatacctgcctgcaacgtaaagttcgtcgggttctcctttcgtatagtctctatcggagagccatcgtcaaagaaataggaaacaccgggctctacatatattcccactctattactaatattatattgagcacctaccgcacccattacagacaattgcacgggtttcaccgtttccttttcgcttcctaccttaccatagacacacttctctattgcaccaccagcagatacatacactgtgaaacgtttgtcattaacgaaactccagttcgcacgcaccggaataccgatatagtgcagtttctgatctgttttttccgaactattttcataagttatttcagacgacagcatcgtataagtcacaccggtttccacagaaaagtttttcggcaatgcttttcgtaccgataagccgaaactaagaggttgcttatgcttgatatttttaacctgacgggtatttttccgcagataaggtactccaccttcaaataccagttcctgtccttcaggaatatccagaataccactggaaacattcggtaaatccagtttatcactaaacataggagttgaattcggacttgactgcatgccaccatttgcattatccagcgtcacaagtgctcctgtatttcctacagacatgccaaccgcccaacctttatttccggtagatgatttcttttcagtaggcaaatggagtttatctctgccggaaggacgatatacttcgcgttctttcttttccggaatcgaagatgaagtttccgtttcctttgcctgttccgtttttcccgtttcttctgtcacatttgaattcaaatctgaattcactatttcttcttgccggttcacgtttacttcctgaacattgctttctgtttccaaatgctgcgctacaagagtttgatgacgagaatccccttgttcaattactcgccggataacaggttccggctgttctccttgagtatccggctttgtctgttccggcaatacatcaggtatcgttgccaaagccggttcagccgcacgacgcacctcgtccactaccggactttgcagcaaccacaagctaacagacgatacagccaccagcacaactgccgcagccgtcatcgcccaacgacggaacatgatctgtttcttcttccctacagacatgggtgcggaggcaggcaataccttctccaaccgttcccagccggtatcaggcaacggttcggaataatcatccaaccgctcctttatctttttcaaccataattcatcatctttcatcatacgtcctttccttcattaagcattgttcttcatccactcccgcacttttgtagccaaagtagctttagcacgtgtcagctgcgaagccgatgacttctcattaatacccagcatctgggcaatttccttatgagacttttcttcaaatatatataagttgaatacggtgcgataaccggcaggtaattcactgataaactgcatcagcaccttctgaggaatagtttccactgtcgaagcatcgggttcctcgtacgtttcgggtacgttgtccagcccctccgactggtttattacatcattcttgcgcaagtattgcagcgccgtattcaccataacacgctccatccacgcccgcaaggatccatcacctcgccaagtgaatttatcaaaagaatcgaagagcttcaggaaaccatcgtgcatgaggtcttctgctgtatcacggtcacccgcataacgaagacacacgctgagcatccgccctgcatagcgctcgtacagctccttcctggcaaggttgtcgccttgcctgcaccgtcctgccagttcctgttcttccattctttcctttgacacgtgtttaccttataaatgcggcaaagatagaaatactgcacgtagcgagcaagaaattaactcttttgtttctttaacagtcctttatgcagtatttaccctcccattgcattttttgaatacatgtagaaaataagattaacacccaaaaaacaacaattgatgaagaagctgagattttattcggtagtatttacatttgcacttttaataataccgatgttacagtcttgtctgaatgatgatgacgaaaatcgtggtactcgtttcacaatcggtactatagaagttataggagaaaaggaatacttttttaatctggatgacggtgataagatgtatcccagcgatactacttacatccataactacactgtggaaaacaaccaacgtgtatttattcatttccttccattggaagaagatatcccgggctatgactataatgtgaaacttatccaacttgagaacatactgacaaaagatattattccacttaccgaggaaacggctgacagcatcggtaatgaccgtatcaatgctacctcattatggattacgggaaattatctgaacatagagcaccagttcttccacagcaataatccagataagaagcacatgctgaacctggtcataaatgaaacagccgagacacctgatccggaagacgagtatttcactttggaattccggcacaatgcctataacgatgaacaacgtacgccgggttggggaatcgtatcattcagactggataaaatagccaagcaattaacaggaaagaaaggattaaaaataatcgtcaatacgatttatgacggaaaacaaacctatacgatagatctgaaaaaatagtaaaataggattaaacaataagagaccaacctaaactgaccgattgaaaacggagagggtgcattcctacagtgaatacaccctcttttactttaaaaaagccttatttaaaagaccttgaaatctcttataactgtacaaggatacggaatacttttccaggattagccgcccactccgtcatagcttccaatgcatcttcaggtactgctaccttcgttattaattcttctaccgggcaagttcctgccttcatatagttgatgaccgcacgaaagtcggccggcaatgcatttctggaaccacgtatgtccaattctttctggacaaaatacttcgtctggaaagcgacttcacttttcgcataaccaatgcaaacgacacgccctgaaaaagcaacttcatccacagccattacataagtcacaggactaccgacagcttcaatcacaacatcagctccaaaaccttccgtaatctcttgaatccggctatgcacatcttccgttttagaattaaccgtatgagacgctcccattctccgcgccaactccaacttctcatcatccaagtccacagcaataacaatggcacctctaagagcggcacgaacaatagcacctataccaatcataccgcaaccgatgaccatcacatattcattgtcaatcacctgaccgcgcgaaacggcatgaaatcccacactcatcggctcaatcaaggcacaatcacgcggagaaatatcacctgccggaataattttagtccagggcaatacagcatattcacacatcacgccattccgctgcactcccaatgtttcattatgttcgcaggcattgacacgaccattgcggcacgaggcacatttaccacaattagtatatggattcagagtcacattcattcctttttcaaagcctaccggaacatccggacctatttcttcaattaccgcacctacttcatgccctggcactacaggcaattttaccatcggattacgccccaggaaggtgttcaaatcggaaccgcagaaacccacatatttaattctcactaacacctcaccggcaccaaccaccggtttttcaagttcaaccaccttcatttcagaggggttgactatttgaactgctttcattttatatatttgaaattaattgtttaatcaataatcttataacctttccagccatagtaggcacagaatataaagcaaatcatcggtacacagtaagctgcataataaatgtgctcattggcgtgcatgaaataagccgtcaactgagggagacaggcattaccgacaatagccatcacgagaaaagccgaaccactttttgtctggtcacccaatcccttcagagccaaagagaactgggtaggatacataatagacatgaaaaaagagatagccagcatagcatataatcctaccatacctccccaaatcattaccactccgcacaaaagaatattcattaaggaataaaccaacaacatatcctgcggacggaatttcaccatcagtcctgtaccaatccagcgccctacaaggaaagcaagcatataaagtccgaagaaagttgttgcggtttcttccggaagtcctgcataagaacagcaatagacaaggaataaactgttgatcgctgtctgcccgccattataaaagaactgcgcaattaccccccaacgcaagtgtgaatgtttcagtacaccaaagtcaatcaacttttctttctttgaaccggaagaaggagtcttactttcatctcctatctgcggcaatttggaaaatatgaacaccactgctataatcaccaacagcaaggccagcatcagataagggaacttcattgcatccgtctctacttgtatataagcctgccagccacccggataatctacgggtaaagtatcacgtgtataatgcgtgccactcagaatcagtttactcagaaacatagcagagataaaggcgccgagtccgttgaaagattgtgccagattcaaccgtcgcggtgctgtttcgggcgcccccaaaacggtaacatacggattagcagcagtctccaggaaacacataccggtagctatgataaagaaaatgcagagataggcccaataggctttcaacatggcagccgggaaaaagagcaaaccacccaatgccgccaacaataaaccgaaaataatgcctgctttgtagctataacgcttcataaacatagctatcggaatcgggaaaatgaagtaagcaagccaataggcagtttcggtaaatgacgcctcaaaggtgttcagttcacaggttttcatcaactgccgtatcattgtcgggagcagattgctgctaattgcccaaaggaaaaaaaggcagaagaccagcgccaaaggtatcgtataagtattttttttcatggtattattatcttcttattcagacatgtttttgatatatggcaatacaggaagatcagtaaatccatagaatttccgggcattttctccaaggaacagccttttttcatcttcttgcaaatcgggtgatttcactataaaatcatacgacattttgtaagtgattgcggtaatagtacgcggataatccgatccccacatcagtttcttcatcccgaccagttcaacagctttccgtatagcttttactgctcccttaaaaggatagaactcatcattgaaaagccaggttattcctcctgattcaatcatcacattgggatgaagagccagccgtatctgttcttcccaatccggacgtgtcaccattccgaaatgcccgatagcaattctcaaccggggacactcctgaatgacctcctgcatctcgggaacttgcgttgctccgtccgccaagtctatggaaagcatcacatcccgctcttccatatatcggaacatctgcatcatttcctcactattcagcatcacccgtccctctgtaagcaacaggcgttgagccggaattttaatagctttgaaacctcttgcaatgagttcttttgcctgtgccagaaacccgggcttacggaactcacacattccgcaaacaaagaagcgatcaggataacgagaaataacttctgccagatattcattctgaataccatcaataaattcctgtgtaataacagcagcagccacttgcgcatagtccatgttcgacaggaaaacttctgcactattcaccccgtccatcataaagggaggaaccatttggcggatttctcccataaacaacgaacgtccattatccagtgtacgaatgggaaatccatccaccaccgtatcttgccgcaaccatagatgggcatgggcatcaattattgtatagtccatatagacagctatattttaagaattagcccaacttacgcgttgctgttccccaataatttcctgtacttcatgcaccagcgcccagtcaatcgactcttcaataaaagagacattctttttcacattcagcggattggctgtactgaacaatgtagtcgcaatccgaggattactaacagagaactgcatagctaatttctcaataggataattctttgctttacagtattccattgctttgcgacaagcatccaccaaaggttctggagctggatgccatgcaggaacgccccgttcactcaacaatcccatggatagcggagaggcatttatcacgcctattcctttcgattcaaaataatcaagaaaatccgctagcttgtcatcacacaggcaataatggcagaaattgagtatagattctaccgtaccactgggtgagtgatcaattacccatttcaggttttcaagttgcaagtcagtgattccgacatgtccgacaactcctttttcacgcaattctaccaatgccggcaatgtctcattaacaacctggttcagatcagcaaactcaatatcgtgtacattaatcaaatcgataaagtcgatattcagacgttccatgctctcatatacactttctaccgcacgttttgcagagtaatcccaggtattgacaccatcttttccataacgtcccaccttggtagaaagataataccggtcacgtggaatgtctttcaaggcctttcctaaaacagtctctgctttataatgcccataataaggggaaacatctataaaattcatgcccgattcgacagcagtaaacacagcctcaattccttctttctctttaacatcatggaaaacccctcctaaagaagaagctccaaaactgagagatgatactttcatccctgtctttccgatttcatggtattgcataactaattaaatttaaaagtttttagatgcgacaaaaatagggtaagaataatttcaggacagcatataagaagcgaaaacaatacgtaatggtttacgtaaaaaaaacatccttccataccctcttttatcgaagaatgtgttttctttgtaaatgaatctaatatagctgacttaagaaatggaataccggaaacatacttcattaaaagatctcgcccaagcattaggcgtatccattcccactgtatccagggcactaaaagacagccctgaaattagcagtgagctttgcgctaaagccaagaagctggcaaaagaaatgaattaccgtcccaatccttttgccatgagcctgcgaaagaataccccgcgtatcattggagttgttgtaccggatatcgttacccatttcttcgcatccatcctgaacgggatagagaatatggcagtggacaacggatactttatcatcatcaccacttcacacgaatcctacgaatatgaaaaaaggaatattgagaatttagtcaatatgcgggtagagggtatcattgcctgtctgtcccaagaaactacagattatgctcatcttgctgccctgaaggatattaatatgccactcatcctcttcgaccgtgtttgcctaaccgaccagttttcttcggtagtagcagatggagtgcaatcggcacaaatggctacccaacatttattggataccggtagtaaacgagtggctttcataggaggagctaaccatttggatattgtgacaagaagaaaacacggttacctggaagctctccgtgacaatcatattcccattgaaaaagaactggtaatctgtcggaaaatagattatgaagagggcaaaatagcaacggaagctttgttatcccttcctcaacctcccgatgccattcttgccatgaatgacacattagcctttgccgccatagaagttattaaaagtcacggccttcgcattccggaagatatagctatcatcggttatacagacgaacaacatgccaactatgtagaaccgaaactatcggcagtatcacatcagacctataaaatgggagaaacggcttgtcgtttattaatagaccaaatcaaaggggatagaacagtcagacaagtaatcattccgacaaatctgcaaatcagggaaagtagtagaaagaaataataaaaacggtttatcaacctgcggagagacggggattcgaaccccggataccctttaggggtatacacgctttccaggcgtgcctcttcaaccactcgagcatctctccttgtatattccggtaagtattttcaataaaaaagcagccattatttagctgcttttagcggagagacagggattcgaaccccgggtacctcgcagtacaacggttttcaagaccgccgcaatcgaccactctgccacctctccaaactcctctttcaagaagtgcttttctcttaaagcggtgcaaaggtacaaatcatttttaaatctacaaacttcctgctatttttttcacgaataaatcgtacttttgcaacatgatatacccgcagaactttgaatataaaataggtttcgaccaaatacgccagttactaagtgaaaaatgccttagtacgctaggcgccgaacgagttaccgatatggcattctccgatcactttgaggaagtggaggagcgcctgaacctcgtgactgaatttgtacgcattatacaggaagaagacaacttccccgcacagtattttttcgacgtccgtccatccctcaaacggatacgcgttgaaggaatgtatttggacgaacaggaacttttcgacttacgccgttcgctggaaacgatacgggacatcgtacgctttctggaaaaagaagatatggaggaggaagattccccctacccttgccttcggaatctcgccaaagatatcctggcattcccgcaattgatccagaagataaataatatactttcaccgtacggaaagataaaagacaatgcttcatccgaactggcacgtatccgccgggaattgacaaacaccatgaacagtatttcccgttcattgaatggtatcctgcgcaacgcccaatccgaaggtgtggtagacaaagatgttactcctactatgcgtgacggacgtttggtaattccggttgctccggggctgaaacggaaaataaaaggtatcgtgcatgatgaatcggcaagtggaaaaaccgtgttcatagaacctgccgaggtagtggaagccaacaaccgtatccgtgaactggagggagatgagcgtagagagattatccgtattctggtggaattctccaatctgctgcgtccttctattcccgaggtattgcagtcttacgaattccttgccgagatagactttatccgtgccaagagcttgtttgccctgcaaatatccggtataaaacccgcacttgagaatacacgcttactggattggaccatggcagtccatccgttactgcaactctccctctccaaacatgggaaaaaggtagttcccctcgatatagaactaaccgagaaacagcgcatattgattatatccggtccaaacgccggtggtaagtccgtttgtctcaaaacagtagggttattacagtatatgctgcaatgtggtatgctcattcccatgcatgaacgcagccatgcgggtattttcagcagcatattcattgatataggtgacgagcaatccattgaagatgatttaagtacctattcttctcatcttaccaatatgaagataatgatgaagaactgcaatgaacgcagcctcatcctgatcgatgaattcggcggcggaacagaaccgcaaatcggtggtgccatagccgaagccgtactgaaacgtttcaaccaaaagttaactttcggtgttattactacacactaccagaatctgaagcactttgccgaagaccatgagggggtagtaaatggagctatgctatatgaccgccacctgatgcaggccttattccaacttcagatcggtaaccccggaagttcatttgccgtagaaatagccagaaagatcggtcttccggaagatgtgattgctgacgcatccgaaattgtgggtagtgaatacatcaatgctgataaatacctgcaagacattgtacgtgacaagcgatattgggaaggcaaacgccagaccatccgccaacgcgagaaacatatggaagacaccatcgcccgttatcaggcagaaatggaagacttacaaaaatctcgcaaggagattattaaaaaagccaaggaagaagcagaacaactggtacaagaggccaatgcccgaattgagaataccatccgtaccattaaggaagcacaggctgaaaaagaaaagactcgccaggcacgccaagagttgacggaattccgtcaatcgatggaagctcttgcctctaaagaacaggaggagaaaatagcccgtaaaatgcagaaattgcaggaaaagcagaatcgtaagaaagaaaagaaaacaagagatactgataacggattatcagcacaggagcaggctgcgcaaaaagccaagcaggaagcagagcgcctggcaagcattgtaccgggagcgatggtgaagataaaaggacagaattcagtaggcgaagtcctggaagtaaatggaaaaaatgccgttgtagcattcggtagtataaagactaccattaaagtggaacgtctggagcgtacaaacattgttccgcaaaaggtagacagttctaccaagagcacattcgtcagcaaccagacgcaggacagtatgtacgaaaagaaactgaacttcaaacaagacatcgacgtacgcggtatgcggggtgatgaagctttgcaggcagtgacctactttattgacgatgccattcttgttgggatgtcccgcgtacgtattcttcacggaacaggcacgggcattttacgtacacttattcgccagtacctgcaaacagttcccggtatcagacactttgccgatgagcatgtgcaattcggcggtgcaggaattacagttgttgacctataaataaaatagtatgaaatcaatcaaagaactctaccgtatcggtacagggccatcaagcagccatacaatgggccctcgcaaagctgccgagctatttctggaaaaacatccggaagcctcctcatttaaagttactttatacggtagccttgccgccaccggtaaagggcatatgactaatatagccataaccgataccctgcaacctgccgctccggtagaaatcatctgggaaccgaaaatattcctgccttttcatcccaacgggatgaagttcgtttctgtaaatgcagcaggcaatgaaacagattcatggacagtatttagcgtgggcggtggtgctttagccgaagaaaacgatggtgcatcttccgtcaacactcctgatatctactctatgaaccacatgactgagattctgcaatggtgcgaaaaaaccggaaaaagttattgggaatacgttaaggaatgtgaggaagaagatatctgggattacttgcaagaagtttggaaaaccatgcaggcagccgttcgccgcggactggaacaggaaggcgtattgcccggtccattgaacctgcgtcgcaaagcctctacttattatatacgcgccagcggatacaaacaatccctgcaatcccgtggactggtatttgcctatgcccttgccgtaagtgaagagaacgcttcaggcggaaccatagttactgcacctacctgcggttcctgcggtgtaatgccggcagtgttatatcatttggcaaagagccgcgatttcagcgatatccgcatcctccgcgcacttgccactgccggtcttgtaggaaacattgtaaagacaaacgcatccatatcgggagcggaagttggatgtcagggagaagtgggggtagcttgtgctatggcctcagccgctgccaatcaattattcggtggcagtccggctcaaatagaatatgcagctgaaatgggattagagcatcatctgggaatgacctgtgacccggtttgcggattagtacagatcccctgtatcgaacgaaatgcctatgccgccgcccgtgcactggatgccaacctttattcctcattcaccgatggaatgcaccgtgtatctttcgataaggttgtagaagtaatgaaagaaaccggaaacgacctgccttcactctataaagaaaccagcgaagggggattggcaaaagattaccgaccaatgtaattgagttacaagctacgagttacaagttgctgcgctatgtcagtctttgaactgctaaacgctatcaagccgcaggactcttgtagctcgtagcttgtagctttctcactcttccggtggataaatcgtatcatcctttcccgttacattcacagtattcatcagccctccatcttccgaatagaataactgatacttctgattcccctgcttcacttcaatcacatattgcatgggttgcaacggatacagcaaaaaataataatcatcttgtacccagtttgcatattcgctattattaaatgcagtctggacagctccgggaacatcattccagtatatttccgattctgtcatccaccagtttccattggcatcaaaccatatatcggaatcttttccgtccagccagcaatcggccacaaaatacgagcttttctgcttccagtctacgtccgtagcatttggatatttctgcttcaaagcctgtgttacagcctccggcacattgatactcttatcatcgtcatcatcatcgctgcatgcactgaatgtcaatgcagtcatgcacatcatcatcgctaacatcaagaatcttgttttcatcattttctccctccattagtcatccaaactgacaaactgtcctttcttattgaatttcaaagagaaatcattggcaagttccacctcaatccccgtacttttacgctctatcttagtgataatttcattaggaaaattagcctttacgtaatcttttacagaggctgggataagggcggcaggcacagcattctttttacagtctacttccatccaattacctttcttgtcgaagtcaatctccgtgcggtcagtcagtgtcacttcatacttcttggacaggaactcactgtctatcttgatgtatgaaatctgcggtttactgaaatactgattgataaagttacgcgcagtcaatggaagttcctttacgtctttggtaatcacatcaccagcaaaagcgaactgaacggctacgatagccaatacgagaatagataaaaccttcttcataatcgttattgtttttaagtgttactaatttatttcctgtttttattcacactgcaaataacgatactgaatcgggaaagatttgggaatattcgcctttagcttttcttttgagattctttaacaagcaagaacagatgcattccttcctgccatttataagtcagactgagagaggcggacaaagcaatggaacgggcgatggcaagccccaaaccggtagaatccttcttcccgtcaatactgcgataaaaacgccggaacaacttttctccatccaacggatgttcaccactgttcatgatagtaagagaagaaggcgtagtcgctatatgcagttcaccgccttcacgattatgcaccaaagaatttttcaccaaattggaaaccaaaatctgtgccagggaaaggttgcagcgaatcacgaaaggttccgtctctttcgtacgtaccagatgtattttcttgccttcatatatatccatcaaatcaggcaatagttcatccaagacttcatctaccgaaacatcttctgtttcggtatattgtccgttttcaatacgggaaagcaacaacaaagatttattcagtctgacagctctgcccaatgtagtatatatttcatccagctctttcaactgttcttccgtcatcgactcattctccgcaagcaactcaatcttgccacgaacaatggcaagcggtgtctgcaactcatgcgaagcattttctataaactgcttctgttcctcatacgccttataactacgatttcccatatccacagccgcatcacccaactgctgaaattcccgtatcttcgtcgggttgtccaacaccggaagctccttgcccggctgaatttgttgcagccagttcagcaggcgatgcaacgggcgaaatacactttgcagtatcagtcgtgtcccgatggatgtgcaaatcaaaaacagcagaaacaatgctcccaaataccacaggatagcctccaccatatcatcacgctccaagatggaaatcatcagttccagttcataaaactgcccatccggcatacggaaagccgtctttagtaccctcaccggctcatcttcatcttcgctttctatatagacagtagagtcataaaactcttcatcatagtccccagcttcttcttcggatataggccggaatttgtagaaagacatcaatgtcccctccgtatcaagaatagacgggtccatcaaggcattattgattaatatctcactgtaattttcaagcgtatcatccgtttcatccatcacttcgtcaataatggcataataaaacaataccccccataccgccatcaacagcaatagcagcaatgagagtttccgataggtataatgaagcagtttcatacttcagagagtttatagccaaaaccatatactgccttcagttctacggtagcctcagcttgtttcagtttacgacgaagatttttcacttgtgagtaaatgaaatccaatgaatctacctggtcgatattatctccccacacagactccgcaagactcattttattaataacgcgatcaggattgactataaaataataaagcagatcgaattctttccggttaagttgtaaaggcactcctcctacctctacctggcgcttgtcaggatacagcaacagatttcccattgtaatggaaacatcaccctttgcttgccggcggcgaataacagacttcacccgcgcattgagctcggccaaatggaaaggcttcgtaagatagtcatcagcacccaattccagcccttccaccttatcatccaaagaatccttggcagaaataatcaacacactgtcactacgatgcaggcgtttgagttcgcgcagcaaatccagaccgcttccaccaggcagcataatgtccagcaggatacagtcataatcgtagtcattcactttatccagtgccgaaaagtaatcggcagcagtttccacaacgaaatgctcttttacaagggaaatgcggatcgtttcccgcaaatccggttcatcttctacaatcaggattttcataccggcaaaggaaactcataaattaggaaacaatctggaatctttgatcaaatactgtctgtttcgtgcaaatcttccagcaattcttctttcgccaaggatattttgccatcggcagatacagtaatcgatagtggaatgtaaaggtcggactgcggatagcacacacttgccgcataaacgatcccctgaggtgtggtcttatcatacaccagtccctcaaggatagaatgtttcatgaactttgcatccactaacgaagcaaaactctcttttgtaaacaccttgtcaacaatagacttgccgccggaagttatacgcagagtaatgctattatcaacaaatttatctccttgttcattaatcacaacaggtaaactgtcatccggcctgcgaaccacgctcgattgatattccttacctttatacgtaaaactggtcttactatcagatacctgcatacgttgcaaaccattggcatccacactgtctttcatcagtacctgtatatctcccctatcctcttttttctgagaagaacaagctgacaacagccacatcgctatacatatccagaagtaaaatacgtttctcattctaccatttgtttacaattaacgggaacaaaggaacaaaaagggaggcaaaaatgcaagggaaaagcaaaagaaataaaaacgggcgaaaatgttccgcccgtttcataaaactaataccatactatattttatttatacctattgaatcttgatgtttataagacaacaggaaaagcaaaaagtttaataggatctttcgttttaacataaaaaaggaatacagcccgatataccctatcgtctgcatcaaagcccggcatattacactaataaaggccaacaacttacggtacccggcttcattgaatttcataaagcgcttcccataatttccggagacaaggaatacaccactgcttccggaaaaacaatcgtgatcaaagctaatccccatatcagtgcggcagatttgactttacgcatcgactgtgaagatccgctttataagaaaatgaccgatgtaatacctcagtacaaagtttctttctctgcctatagccgccaaggaagctgggcttatccgatacgccctgcccattgtcgggaaggcgtggctctgatgttaaacctggcatacgcattctcttcacaggaattcgcagacgaactggagaaatacagaggaaagctacatagcgataataataagacagtcatcaatgtcgatcaattgaagcagaaagtactaaaccacggcgcataccttctcggacacgtcagtggtgtaaacggtttaggtggaggctacactttaggtctggcagaatggtgctttctacagcattatcccgatgatgaatacaacatacataccgtcttccacgaaatagggcattgcctcggatacgggcacgacggtaacatgacctatgaacagacaggtcccggatggatcagatggatcaccctgggacgtgctgtctatctgaagttaggtcaggagaaacgtctccctgtttactcacggcgttttatgcatacccgtaaaaatgcgactaccctatacggtagttctaaatatgtaggttccacattcgtcatagaagatccgaaactggatgcaatagacggcggcctcggttttcatccagtagaagacaacgaaaacattgcagacggtaccccattatcggtgtcattaaaatggccggacgtgcccgaagctacggaaacgactttcaaacctaaagatgttacagcctatcagaatcgcatttacatagttaataatgctaccggaaactatagtatagaagtcttccaagagaagaacgggcaagtaatccattgtggacgtattagaaactggacacgcaacggcacatccgaaacttttgccggtgaacccaatggaattacagccgcccatggcaaaatatatgtaaccaatacgagtagccggacagatgtttttgatgccacgacactgaaatttataacatgtatcggaaacggacaatggggtgaaggcagctatcaaaccgtacatgctttcgaaactttagtaaaaaacggttgtgtattcatccgtgataaaaggcgtgtttgcgtctttatggaaaaagatgtcatagcggataattgtatgcgcataccgaactactgccgtttcaacaatgtaggcgaagtgatgagaacatacggaatgacaatagataaagacaatatactttatactacccacattggtaaaaaggaaatctatgcctatgatcttactaccatgcgtgaacagaaagtattaaacccggtccgcaccctgaagttaccaacgcaagcctatgatgtggtttcctgggacggtctatgtttgtgactttaaatcaaaagacagaatgtcttgtagaaatcaatccccaggatggaagcatcttaaaagactattctaccataaacggaaagtcttttagcaatccggagaaaatagccctggcccgccagactctctttgtgataaaccgcggaacaggtacagtgacaagcatcccattaaatgaattgaagtaagaagaaagaaatgaagataatatatatactattcgcaggtttatgcctgctttcatgtgaaaagatcaagatagaagacgttatccgggaagtggaaccggaccaaccttcatccatacattattactactcatacaaagccggagaagtgattaatgcagaaaagcttgggtatgcttccgatgaattcatgcccggttgtacatatatatacggtgacacccttttcattgccaatactcaaaacggacatttcagcgtggaattatacagtttgtccgctcaccagaaattaggttcattaaatacatggacctacaatgatgtaatgcaaacattcggtaattacgtagaggccatttccgtagctaatgagaggctttatctcgccaatataagctcgtgcattgatgtgtttgatgtacatacactgaaatttatcacccgaatcgggaaccgtaactgggggcatggaaacacacagttgtttcatacacatgcaatggctattgtagacgattacataatagtgcgcatgaaagatggtctgcaagtaaccttgcaaagtgatgtgagtgcggaaaaatatcagaatataaattactactcacgtggaagtctggatggtttcgatgtaaacaacggattttattcacatcagatggcagtagatacaaccggattggtatttctcgccgattacggacaatacggcaaccggaaaatacatgtgatcgatactacccttatccagaagggaagcaatatcacaatgactaccagtcaggctattcctctggattttaatcccagaggaatagccttatacaaaaatctgatgtacatctcagcagccgacggtagtatccgatgctatgacagagagaaaaagaaattcttcctgaccttcaaatcagtgcccggctatacattcaaaggcggacaaaagttattggtttataacaaccggctatgggtcacagatgtctcaacaagagaaatcgtcggagtagatatattccgcaatgtgattgaggaatatgaataataacaagactaaagttacctcacaaagccatttttataataatcataagcagcatcaattttttccggagtatctgcatgcaaaagaagtaataattcacgggtaaactccaaatgcccggttccgttagcagttacgatattcttatcgctgactgcctgtttttcctggtacccggcttcattggtatatgcactacctgcaaactgcttcagatatggaagcgtattactggtatgctttacatcattcaggaaaccatgcgctcccataaaggcagaagcattgcaaatagctccaactatcttgccacgctgtaatgcatcctgcacaattggcaccacctgttctgcttcaggcgattgccagtgcataccaccaaccaataccaatgccgcatagtcagcaggcatcgtttgaaaactataatcaggcaaagtacgaaaaccgccgacagaacgcacaacatccaatgtaggggcaactaccttcggtatatatttcacttcactacctggtattaccccggtatttagggaaatggcaaggaaagcgccttcccagtcggcatattcatttaaaagcaggaataagacttcttgtttcataagattcgtatttagaatgtttttaatatctgctgacaaagttacaccaatactcaaaaagtctactatttggggataggaaaaaacaaaaaagctgatatgactgcctttacatagcaatcatatcagccactcactattattacagagatgaaaattctataacggcattacctcccctatctcaggaatcatcatattcagcgagtcttgttcctgcatcttcttctcattcgtcaaaggctcattccaaggatgctttgccaatgcgtactttgaatgatgtacagtcattattttttttgctttcagatctttagctgcctttgccatattagaaggcattagatggataaggttccaaccttcattatactggccgttttccagaatcgcaaggtctatatccggaaagtgcttccctatttcctcaaaatgagagtcataaccaccgtcaccggccatatatattttctgtgatggagtttctatcagaaaggatgcccacaatgtctgattggcctttaaaccacgaccggagaaatggcgtgtcggaagacaatggacagcaaaaccattttccaaaacagcgtcttcataccagtccaattctacaagccggtctttatcatatccccaatattcgaaatgttcgccaacgccgagtccgcaaatcacttttcctacccggtctttcagacttttcactgtccggtaatccaggtgatcccaatgatcgtgcgaaatcaccatataatcgatatccggcatatcttcgggtttataaacatcagttcctttaaatggtttgttgacgaaagatacaggcgaagccatgcaaaaaacaggatcaacgagaaatcgctttccatctacctgaataaagtaggaagaatgtccaaaccagatcagtacattttcatcacgccccaacttatgcaaatccgttttgataaccggaacttcattctccggacgcaggttctctgttttgcggaataagaaagaaagcatagcaccaaagcgtccttcgtccgaagtcatcatctgcgtcggatgcagattattgaactggccgtcacggtaatgaggtgagcgtttgattcgctctaaacgcgctccctgaggcaaactgccgaaactcggctgattaataaaaataaatacggaagcgcatattatgcctataaccgccaacacaatccaaagccacatctgttttttatttttgctcattctaaattagtttattagctacgagctacaagtacctttcggtgtgatagccggacaagtgatttttcgcccacaaacatagctcagccactcatagcttgtaactcgtagcttttgtgactcttacaatgtttcttgtttcagttgctccacgaacccgtcgatacgacgcaactccttaggaatattaatactctgcgggcagtgaggcgaacattgatcgcaaccaatacaatgatttgcctgtcgcaggcgtggcacactacggtcataaccaacaagaaaagcctggcgtgcctttctataattctcgtcttgttggctcttcggtacattcccctcattcacacatttattataatgtataagcacagcaggaatatcaatgccatacggacaaggcatacagtatttacagtcattgcacggtacagtagggtactttaacatcaattgtgccgtttcttccaaaaactctttatcatcatctgtcaaaggaatcagtggagagtaggtacggatattatcctgaagatgctccatatacgtcatgccactcaataccgttaacaccagttccggtgagcctgcaaaacggaaagcccacgaagccacactatcttccggacggcgctgcttaagacgtgtcataatatgagtcggtacattagacaatcttccccccagcaatggctccataatgattgccggaatattacgttttaccaattcatcatataggtagtccgcatttacattacgtcccgaagaatgtttccagtccacataattgagctgtatctgtacaaagtcccatttcacctcatcatgcagagaaagtgcatagtcataagtatccactgtgccgtggaaagaaaatcccagattacggatacgccctgcctcacgttctttcaacagaaactccatcataccattgtctatatatcgcgctttgaatgcttctattccaccattaccgatagagtgcaacaaatagtaatcgatataatctgtctgtaaatcctcgaaagatttacgatacatggctatagagttttcacggctataattactaaagttggataactttgtagcaataaacagtttctcacgcggatgacgttttaatgcaataccagtagatttttccgaccatccctgtacatataccggagatgtatcgaaataattcacgccatgcgcaatggcataatctactaattcgttcacagcatcctggtcaatcatatctcctttcccatccggtgaaggaacagtcggccagcgcatacagccataacccagaagtgaaacacgatctttctgagccacagaagtgcggtaagtcatcttatcagtaggcaccggagtcgatgcactgcctcccggaatcatcccatccttctgtttgcaactataaagagtcgcagcagccgttgtcgtagcggcactgatacccacaattttcagaaaatccctacggtttatatttttattatgttcttccatatctgttcttctaacatttatcactttatcaccctatcacattaccacctctatatcacccgatgtctctcatgtccctctacatagatagcactgaaaggacgtgccggacaaagattctcacaggtaccacaaccaatacaacgctctacattaacaaccggaatctttggagaatccggattatctacctcagacggaaccatctctatcgccgctaccgggcaatgacgggcacaattaccgcaatttactccatcagtcaacggtacacaattcttcctgatccatacggcatgaccgatctggatagatgatttatcagccagactggtaagatgaatcgcatctgtcggacatacttcggcacacttcgcgcattccggacgacaataaccacgttcgtatgacatctccggctgcatcaacgtcatcagattaccggatgggcgtaaaacttgattagggcacactgatacacaaagctggcaagccgtacaatgctgcgcaaaattacgaatactcaacgcacctgccggtacaataggtgtcgtccgctccggtattttcttatcctcaatgacagccaatccaccatccacttttttctcctgtgccttcagcaatgtacttgtagcaaatatggcaccggcagaaaagaaagcacggcgtgcattgtccacctgttccggtgaaacacctgtcactttttcagcagctaacggtttctgcacttccttatgaggacgctcataacggatagctccttttttacatttaccgatgcaatccatacaagccacacagcggctataatctattttatgattcttagaatcaatgcatgccgccttacaattacgtgcgcacaaaccgcaaccattacatttactcgtatcgattaccggtttcagcaaagaaaaacgtgaaaagaatcccaatactgttcctaccggacaaattgtattgcaatatgtacgcccgttgcgccaagccagcacagccagaataacaaatgtcagaacagctattacaaaagttcccatagccttcatccagacgtctacagaataaaacatgtagctatctgcccgttcggccaaaagagcaagcaggttgtttccccactgataaaccggagcaaacagattagaagctattcgtccgtaagaactataaggtgccaataaggcgaccaatgaaccaactcctcctatcagagccaaaataaatactcccagcactccgtaacgcaaccaactaagtgcaggtgaatacgaatagcgattctttttccgctttttacccaaccatgaaactacatcctgaaatacacccaacggacagattacagaacaatatacacgcccaaagagcagtgtcaatgctatcaggattatcacaaccccgacattcagtgccaacaaagcaggcaaaaactgaattttagccatccaaccgaaccaagcatgcaacgttcccgtaaaatcaaggaacaaaagcgtgatcagcacgaaaaagaatatggcaaacgttagtctgatttttcgtaacatacttttattttatggaatatcatttataaaccaaatacttgataaacaaataaccgccgagaatctgtaatcccattcccggtatgccgatgcggaaatcctggaaagcaagcgcaaggttacctaccattgcccactcgcccagcgtcccgataaactgataagccagtactactaatgctaaaacaggaatagagatacgtttaaaacgattggctgcatatccagcaaccactgccagtaaaacggattttaaaaggatggccggcaatactcctgcaggaggcataccgaaaagcaaatggttcaaaaccggtgaaaagacggctgtcagcaatccaactttccaaccgtatttataagcagcaataagcgtaaagaaataaatcggtaacaaagtaaggccaccctgtggaataagatggcaaagttgtggcaaaaccagattacccaaaatgaaaagagctgcagcaaaatatgtcttcacattgctgtaatccagtgaataaagtctgatagttgttgttttcatataatatgcttattaaaaattgatatttactccacccataaaagttgctttcggcataggataacctgcattgatctcataacgttgtgccaacaagttctcaccacgcgcatagaatgacagataattggttgccttaaagcttccctgcatatcccataacacgaagttctctttggtcgcagcgtccaggtcagtataaagccccttcacatactggataccggtagatgcactccaacgtccttttctgaagttcactcctccatacagtttatgctccggagaagccaataccggattttccatgtgaagccagctgtaatttgccatcacactccacaccggattaaactggtatcctacattagcttccgctccccagttttcaatctcgccggaattctggttcaacatgccgctaccatttggatttggaagacgtataatgagattttcaccattgatatagaacacattgagtccataggacaaacgattatccataagacgttgtgagaaagaaagctcataattccaaagtttctcaggtttcaaatccggattctgcggagggaacatatacatttcacgaatggtaggattgcggaatcccttacttgccattgccttgatttctgcattctccggaagatggaaagccagccccacttgcggaatgaactctgtacccgtttgcgaatgataatctactcgtgctccggcatccagcgtaagccatgcagcaatatcctgacgaaaatctacataacctgctacttcattcaatgacttattcgccgaagtttcacgatgcccatcaaagaattggttccatgcctcaccgccaaagtgaaaataatcagctcctacagtcagtctgttgccttggaaaagttgtacactctgataccatgatactccaagcatctgatcgttagagttgaaacgatactgaagcggttctcctcctggctgatatccgtcatttatccagtgatcaccccaattatagaaaaaactcaatgcaccggaagtcttttcgtaataattctccaatgcaaaagaagtcatgccacgtgtaatacgctgatcattgtctatatatggtttcattaccgatcccggattagtagcattaaaacgagtgacatttacatcgccccaaactttccagttatccgtaaagtcatagcctaatttggcatacccgccgtactgttcaaaggccatgtcagcgcgatgtccgtctgtacggttataagaggcagtcaccgtactactgaagcgccctttccttatgcggttagtggcttcggtctgtatgcttccataggacccggcaccaatgttgatgtttgtacgtattccgtcttcctgcatcttacgggtaacaatgttaataaccccacccatggcgttagaaccataaagcacggatgcggggccacggagcacttccacacgttctgccatcatagtctgatatgcatcggcaatggggtgtcccatcagtcccatatactgaggatgtccgtcaatcaaaaccaataatcctgtagtgggaagaccggcctgtgcgggccctccaatgcctcttaaagacatttgccctgatgcaccggtagctacaccatatcccattacgccacgtgaagtggagaaaaagcccggcacttgtgaattcaacacaggaagtacggaagtctgctggctcgcttcaagttgcggacgccccactaccgatacggtcatgggtaaatgacgcacatccgtttcacttcgcgtacctgttactactacttcattgatcgcataacttcttgctacctttgtgctgtccttaccggtttgtgcttgtaggcttaccgcactaatcaggcagcctgtaaagaatgcaagtacaaatctctcttttttcatcttgaaataactctttaattttataatagttcccgattgcaaatatagggatcgttactgatagaaaccgtagataaattacggttgtaaataccataattactgattaacgtattctaacttacgtgttattcactatccaggacttgaactcggatgctttattcttactgatatagatacgttcgggagtttctacatccagtgttaccagcaagcggttatcaaaccagatagttatatccgtcacactattccttgccaggataaattgcttattcgcccggataaaatctgccggattcagagaagccattatctgttccagtgttttggagtatggatacacattcccgtctttcaagtagatacaggtatttttatccgctgtataaaagcatgaaacttctttcaggtcaataggtaacagcttatctttatatggaattaataacttgtctttatatttaggagtcggcaccagttgagtcaatttggataagtagtgaatcacatcctggcgcgtcaattttttgtatttatccagcgcctgttttacatcttccaccttgacaggttttagcaaataatcaatgctattcactttgaaagcttctatggcgtatctgtcataagccgtcgtgaaaataataggagtttccaactccattttatcaaaaatggtaaatgccgaaccgtccgataaatgaatatccataaatatcaaatccggtgcaggattcgattgcagccaatgaatggtttgagttacgctttctgtattaccggctatttgaatatcataagagacttcgccaagaatatccaccagattctcataagcggcagtctcgtcttctacaatcaacactctcatatctttatgcaattttgatatcagttctgtttatttaaaggaagatatactctgaatgtattttcatcacattctatccgtatttgcctgttcatcaacaaggtaaaacggctttccagatttctcaaccctgttccgttcgtatcaggcggagatagtttaggataaatgggattactcaccaccagttctttttgctcgttcagcctgatagtaatttccattttatgttcactgtctatcctattatgaacagtcacattctctaccaacggaagcagtgaaagcacaggcaacgtcagttcatcctgcatagtctcatccacttggatcgagaaaaccagtttattggcaaagcgtacttccatcacataacggaaagattgaataaattccagttcttccctcaaagtaaccagtcctctcttatcactttgaagaatataacggaagatatcggacaattcatgcacatacatcagtgttttttcatcatccttcttccgaataagcgattgcactccattcaaggagttaaagaaaaaatgtggattgatctgattagccaatgcatcacatcggctttgcagattctctatacgcaaacgttctatctcacgttctttttcacgctgcgtggagtataacatggaaatatgcccgatcaacgtacacagagaacacagaataaagaattgggagatcaatgtactacccagaaaatcagtacggataccataagagtgaatccaataggaaatagacgcgaagcctgcataggcagccaatgaatataagaagttacggccaaaacgttccttaaactgcgctgtcgacagttgtcgcaaattataacgtaacaacaaacaaatcagtccccagaagaaaaagaaacgataaacaaaataccaataaaatcccgtacaacttactccctccagaaattttatatcccaaggtagacaggctatattagggtatatgataaagacagcactaatcagaccgaccagtggcagtttacgacttatataagtatcaaatgagagcataaaacatttcttcttttctacaaagaaagataatttttttgagacttgatagcaccaaagaatcaaaacgaaaaaataaggtataaagacgaaaccacgcaaagagtattaaaattccgaataaatttggtggttataaaaacaatgcccaaatttgcacccccgaaaataaagacaggaatataaaaatcctcatcggagggcattataatcaataattatagtgccggataagatgaatggtgagaatcattcatcctgtccggcactttttttatgccatatctatagcttctactaaattgatgaaagaataaattggatgaaagagttagatttgacacagggcagtgtccctaaagtactattacaatttgcggttccattcctgatagccaacgtgctccaggccctttacggaggtgccgacctttttgttgtgggacaatatgatgactccgcaagcgtagcggccgtagccattggtagccaagtaatgcaaaccattacaggtattatcttaggcattaccaccggaacaaccgtactgattgccattgcaaccggagcgaaagacgaccggcaagtggcgtctacaatcggttcttccgtttggttgttttcaattatcggcatcgtacttactctggtcatggtattgttccatgaccgaatttccagcttgatgcacactccggcagaagctatggaagacacgaaaagttacattctggtttgctcagtcggtatactgtttattgtaggctataatgtcgtgtgtggtatcctgcgcggactgggtgattcgaaaacaccactctattttgtgggactggcctgtataatcaatattgtccttgactttatattagtgggagcttttcatctcggtcctaccggggcagccattgctactgtaacggcacaaggtgtcagctttacgatagcactctggtttttataccgacgcggatttcatttcgaatttacacgacgggatatccgattgaatagagttttatctaaaagagtcctgaccttgggcgcccccatagcattgcaggatgcattgatcaatgtttcattcctgataatcactgtgattgtaaatcagatgggagtcattgcatcagcttctctgggtgtggttgagaaaattattgtttttgccatgttgcctcctatggctatatcatcggctgtagctacaatgacagcacagaattacggtgcaggacttatacagagaatgaataagtgcctactttccggaataggatttgctcttatttttggcctatcggtctgcctgtattcgcaattcctgccggaaacgctcacagcattcttcactaaagatcctgcggtggtggcaatggcagcagaatatctacggggatacagcatagactgtgttgtggtcagtttcgttttttgtatcaattcttatttcagtggacaggggaattcactattccctatgattcacagtctgatagcgaccttcctgtttcgtattccgttatcttactggttcagccagatagacagttcttcactgtttatcatgggcttcgctccacccatttccacagtagtttccttatttatatgtatctggtatctgagatatacacgaaaaagaaattactaaaacacaatttccctacttttaggtattgcttcccttactcaagaaccgtaactttggcaaaaaataaaagtagcctatggaccccggaagaaaatgtgaggaacagcaaaaagagagaatttatcaaagtataagttctctcttttttttgaatgaatttgaatattgttcttttttgccagatcgtattaattccaataattcccaaataaaaatgaaaaagaaatatgaatttaagagtgtagtagctgagacactgctgatacctctttacatgagagccaaagagagtcgccggaaagatgctattttgcgtgatcggcaagccgaacaactggtagaaagtatcgaatatgactactccaaatttgatggtgccaaattgagtgccataggatgtgtcgtacgtggattatactttgataatgctatccgacgcttcattgccacacgaaagaatccaattgtagtgaatgtaggttgcggactggatacccgctatcaacgtattgaagaacatgacaaagccatattttacgaaatggatttgcccgaagtaatcgacttgcgacgcgatttactaccggaacctgcgggcgatcattacatagccggctctttgttagaaacccaatggatggatgatctccgtaaaaagcatcccgaaggagagtttatcattgttatcgaaggcgtactgatgtatttctatgaaaagcaggtacggcaattactcacccgattggccgaccgattcagtggtagcgaagtatggttcgatgtatgcgggcctatgatggcaaactccaagtatataaaacccgactcactccggggacacgaagctcaaatccgctccggcctgaaagacgggcatgaagtggaaaactgggaaccacgcctgcaacttattgaccaggcactctaccaaaaattcttcccaaaaagatggggattaggcggaaggctaatgggattattccctggtatttgcaaaaagttcagttcgttgttagggtacaaaattaaataactacatcctgtattcgttcggggtcatccccaccacctttttaaatagacggcttaaatgatgcggatacttgaagcccagttcataggcaacttcgctgacagtcttattctcatcataaagccgttcttttgccttctctatcacaaaaagctgaatggattcctgagctgatttacctgtttctttctttatcaaatctccgaaataattaggagaaagatgcaatcggtctgcggcatattgcacggatggcaaaccgacagtttgcggttggtctgattcaaagtaatcactgagcagattttcaaaacgcaccagaatatctttatttatgttttcacgcgtaataaactgacgatcatagaaacgctggcaatgattcagcaaaagctcaatcgtagaggcaataatatctttgctatgcttatctatggcacgctccaattcttcttgtatttcaatgaaacaattaaagataatctgccgttcacgctcggacatgtgcaaagcctcattggcttcatacgagaaaaagctgtaatctttcattttacgtcccaatgaagtaccccgtagcaaatcgggatgaaaagccaacacccacccttgaggattcagtgtttctccgtcatcatcaattcctgccacttgtccaggagccacaaataccagcgtgccttcctggtaatcgtacgtgctgcgcccataagacaattccccacacctgagctgtttcagaaaaacacaataaaagccaaaattcttacgtccatgttttaaagacttcaatgttgagaagtcgaccacactaacaagcggatgcaatgtctccactcccattgccatattatactcctgaacagtattcaattttacgattgtacccataatctgataatttaatctgatgacaaaaataacagttttctttcagcattccatcacttgtattgcaaaatctgtaatattggtataagaaactgtaacctgtgtatacagttcattatcaagtattcaatcaagatcttaaaaccgtaattacggtgcataaagcagtaatctgtctatttacaaacttcatctcaccacttacctttgcaacatcaaaaacaataaaaaaatcaagagttatgaaatacagagaattaggaaagagcggacttaaaatttccgcattgggtttaggttgcatgggtatgagccacggttatggtgctgccgctgataagaaagaaatgatcggccttattcatcaagctatagaacaaggaatcaccttttttgataccgctgaagtatatggtccatacaccaatgaggaattagtaggtgaagccttagaaccttatcggaaagatgtagtcattgctaccaaatgtggtattcagatgatcgacggtaaacaagttgtcattggtaaaccggaagtaatacggagttctattgaaggttccctcaggcgtctgcggacagatcatgtagatttgtactatctgcaccgtgtagacccgaatgttcctatagaagaagtggcagaaaccatgaaagaattaaaacaagaaggcaaaattctacattggggactatcagaagctggtgtacagactatccgccgggcacaccaagtctatccgctgactgccattcaaagcgaatactctatgtggtggcgcgaaccggagaaagaattattgcccactctcgaagaactaggcatcggtttcgttcccttcagccctctgggtaaaggtttcctgacgggaaacatcagcagagacacacaattcggtaaagacgatttccgcagtatcgttccacgcttcactgccgagaatctgaatgccaatcaggttatagttgactttgtgagaaagctggcggaagagaaaaatgcaacacctgcacagattgcattggcctggatactcgctgtaaaaccctggatcgctcccattccaggaaccaccaaactgaaacgcttggaagagaatatacaaagtatcaatgtggaaataagcccggaagagttgacctggatcaatgatatgcttaattctattccagtgtcaggagaccgctatccggcagagttagcaaaaagagtaggcaaataaccaaagggcttaaaataatacaataatctgcaatgtccggggatattaaggaaataaagtgttttaatataaaatccaataaagagaaagttattatgcagaaagtaaaattaaataatggcatcgaaatgccaattcttggtttcggcgtatatcagatcgaagatcaagccttgtgtgaacaatgtgtatatgacgctattgaaacaggttaccgttctatagatacggctgccgcttatggtaatgaagaagctgtaggaagagccatcaaacgcagtggtgtcccccgcgaagacttgtttatcactaccaaactctggatatcagatgccggttatgacaaagcaaagaaagccttcgaagcatccatgaaacgtttgcaactcgattatctggacctgtaccttattcatcagccattcaatgactattacggtgcttggcgtgctatggaagaattatacaaggaaggcagtattcgttccatcggcgtcagcaactttatgcccgaccgcttggtagatctgatccttcataatgaaatcacacctgccgtcaatcaggtagaaactaatcctttctatcaacaaatcgaagcagaggcattcatgcaagagaaaggcgttcagatagaatcatgggctccatttgccgaaggaaaaaacaatatgttccagaatgaaacattggcagccattgcaagcaaatatggtaaatccatagcacaagtcgtattgcgatggttgatacaaagaaatattgtcgttatcccgaaatccatccgcaaagaacgaattattgaaaacttcaatgtattcgattttgaactgacgaaagaagatatgaaaaagattgcagcgctggataccaataccagttgcttcttctcgcatcgtgatccgaagatggtagagtggctgagtggactacactaaaacagtccaagcccggatatatttcaataagattagttgcatacaatcggcatattagttacttttgtagagtgttttataaatcagaaagatatgaatagaatagatatacaaaatagctcttatgccgattgtcctatccgaatgatactatcacgaatcagtgataaatggtcgatactgacgctcttcacactaacgcaggcacccgtcatgcggttcaatgaactgcaaaagacaatacctgacatatcacaaaagatgctgacagttactctacgcacattagaagaagacggacttgtgaaaagaaaaatctatgcacaagtccctcctaaagtggaatactcgctgacagatagagccatgtcgttattgccccatataaactccttaatttcatgggcacaagaaaatatgaatgatatattagatgacagaaaatcttataggaaagcgtaattacatcgctttccagaacttctggaagtctttgtaacgtccataacaaaccagttcatcaccagcttgtacctgatcattttcaggcaattcattcatcacatcatgttcagtaaatgaaatacccagacagtttttcaaagtcttggcacgctttaaagccaataacttcaagccgaattccttatccagattcaattcattagcataatatcctatcatcttctccggcacagcgaacttcaccacatagtaatccgtatctacccggaaggtttccatattggagccaaactctaacaaatgcaccaaaccacgggctgcatcttcctccggagtaagaatccgttccaaaccaaaagcctcaagtacggaacgatgtacattatcaatggcccgcgcataaatgtgagccactttttgttgtttcaacaaagccaccacgcgaatagaagcaccaaaattctcgccaatagccacgattaccacatccacaccactcaaggggagagcggcaagtgcctgttcatctgttgcatccaacacaaaagccgtagcaatcttttctttgatactgtctacgcgacttgcactcacatccgccccaattacttcgtgtcccaacaccgataattcttcggcaagcatgtgcccgtaatttcctaaaccgataataatatacttcataatttctgtttttactacttactactaatttataatgatctgcccactcggatactgatatttcgtatgtttcttttgcttgatgatacccaacatcagagtaatcagtcccacacgtccgatgaacatcagaaaagcaacaagcaatttactgttatcccccaaagtcggagtaagattcagactggaacctaccgtactcaacgccgacacacactcaaacagaagtgccatgacagatgcctgaggttcccagattgtcagaataaacacaaatacaaacaaaacactgatagacatcactaccgtcgcattggaacggcgaatggaatcgtaagacagttcacggccaaatacttccacccgctccgtaccgcgcaacacagcaaccagattcaatacaactactgcaaacgcattcaccttgataccacccgccgtggactgtgcagcaccgcccacccacatcaggaagatataaaccaatacactctgtactcccagcgaagccaggtccacgcttgtaaacccggcagtacgcggacaagtcgcattaaagaacgcctgtgtccatttatcagcgacggacataccggcaaaagcatgattccactcaaaaacagcaataagcaccgtaccaaacaccaatagcaggaaagtcataatcagaacaatccgtgtattcagattatacagatgataaaaacgatgcctgtcccactcccacgtatgcaaaaatttccagatgcggcgcaaatgatggagtactatatctttgaaattcaccaatatcgggaagcctatacctcccagaataatcaacagggatatatagataaggaatggattatgccctgtcatcaccagcggattgcctagatttccgggcaacgtggaaaaaccggcattacagaatgcggaaatagcatgaaaggccgagaacgccacttcttcctcaaacgtcatccccatcgtaccgtgaatgtcgctccagatggcaagcataccaataccttcaatagccaacgtgaatcccaatatgtacagcaaagtggaaagtaacgaattcaacgaattggaactgaccatatcacgaaccaccaactgattataaaaggatgtattccccataaagaacatcgcaaagaaactggtcagtgtcattacccctaggccgccaatctgtatcagcaggataatcaccacaaaaccgggcgtagtaaaagtagacgctacatccaccgaagtcaaacccgtgacacaaaccgcactggtagagataaacagcgagtccacccacgaaataccgctcaccgtacatcggggcaacattagcaaacctgttccaataaggatgattatcagaaaactaccagccagaatcaaagaaggattcgttcgccgtcccaacaccctgaccaagccattggataaattaaggaaagagaagatcaacagaagcactatatgatagggctttccattcaatatttcccaaaaatgcagaatagctccctcctcttccggtcgatgaaaaataacagggataagggtaaggtaaagcaaggcaatcaatatccacgtcaatttcttaaaagtacgctttgtgtccctgtattccaataacaggcgcaaagtgacttcggataggaaaacaccccatacaaaccgatagagtgtttgcagttgagaagcctcgtgttcggaaatagtaaagccgtgttcatataccactcccataattaacagaatagaagccaggtaggctatataagtcacccctccaagaatgatccgagtgtacggatgaatccatttattctgatacaacaagaatttatgataaatcttcatgtagacatcaaattaaatatcgggcaaacataaacaaaacaatgcgtatagacaaaaaacaaaagaaaaaagaaattgttttaaaaataatagttacatttggcctcgtaaaaattttaatagaagtaaccactatgagcaacaagacaaaaagatatttcctcccggaagaggaaataccacattattggtacaatatacaggcagatatggtgaacaaaccgatgcctccgcttcatcccggtaccaaacaaccactgaaagccgaagatttatatcctatctttgcacaggaactgtgcaaacaggaactgaatcagaccgataagtggatcgagattcccgaagaagtacgcgaaatgtacaaatattatcgtagtactccactggttcgtgcttatggactggaaaaagcattaggtactccggcacatatctatttcaagaatgagagtgtaagtccgatgggatcgcacaagctgaattctgccattccccaggcttattattgcaagaaagaaggagttaccaacgttaccactgaaaccggtgccggacaatggggagcttcgctggcttacgctgcccgtctgtttggactggaagctgccgtttaccaagtgaaaatcagttatgagcagaaaccttaccgccgcagcatcatgcagacgttcggcgcacaggttacaccgtctccgtctatgtctacccgtgcaggaaaagatattctgacggcccaccccaactaccagggttcattgggaaccgctatttcagaagccatcgaactggctcagactacaccgaattgtaaatatacattaggttctgtattgagtcatgtagctctgcaccagactgtaatcggtctggaagccgaaaaacagatggaaatggcaggagaatatcctgatatggtgattgcttgttttggtggtggttccaatttcggtggtatcgcattcccattcatgcgccacaagatcctggaaggtaagcaaacacgcttcattgctgccgaaccggcttcttgcccgaaactgacacgcggtaaattccaatatgatttcggtgacgaagcaggatacactccattactgcctatgtacacactgggacataactttgctcccgctaatattcatgcaggtggattgcgttaccacggtgcaggcgtcatcgtttctcaactattgaaagacggtctgatggaagctgtagacatcaagcaactggaatcattcgaagccggctgtttatttgcccaagctgaaggtatcattcccgcacctgaatcttgccacgctattgctgccgccatccgcgaagcaaacaaatgcaaggaaacaggtgaagagaaagtaatcctgttcaacctctccggtcacggattgattgacatggcctcatacgataaatatctctccggtgacctcgtaaactacgaactgaccgatcaggatattcagaagaatctggatgaaataggcagtctggcataaggatacctcatacatatcaataaatgtttgccaggctgacgagcggctcatagagtttttcaatatcctgcgcatccaattcaatatcaacctggtcccccggaatcaaccgtattccggggggctttgcgtctttaccatcccggtgtacattgataatggtacagttttcaggcaaagaaagttcgtctacaagtttgccatccatatatgaacccgtcatcacctctatggatagtttataccttgtctgttcctggaaagcaggagtattgatcatatcctcataaagcgtcacgttgaaaggtcttatctgaagaagttccgtaaaataataagtcaatccacccactaccaccgatgggtagaacacctcaaaatgtcctgttatctcggtaatcaatacaatagctgtcaaaggggtacgtatcacagccaccaagaaggcagacattgaaatcagcattacataactgacattctccggctcaataaccccatattccactcccaacagaccaacaatctgccccagtaatccaccggtgaccagtgtaggaataaaacttccacccggcaaaccggatgaaacgcagataacggaaaaaccgaaatgcaacagcatcattgccgttacccacataattggtgcatggctgccggattgcgcctgctccaaaagaaactgttctcccccacccgtcaggttgacctgcataaaggaaataatataagcgaccagcaacagatagaacatcttcatatataccgaagattttaccgttgcatacacccgtttgaaagaaaccatcatcatggaatataattttccgcaaacagaaataatcactgcaagcaacaggaagtacttcacctggattccaaaagaaaaaccgggctcggccacttgtatcaaatgataagaatttaccggaaaaaccatgcttgccaccgcaccggccactacaccggccagcaaggtagtaatagcggttttgggagcatcaaaacgttcgatggattcgatgacaagcaatgaagaagccagcggcgccgcaaacgcagccgcaaggccggcaccggcaccggcagcaagcaattgctttcgttcaccacgtagaatacgtgtccagcgtgccacaaggcatcccacatacgaacctatttgtacggaaggcccttcacgtcccagcgataatccggccgaaaccgaaagaattccaccgaaaaacttagaaaccaactctatgaaaggatgcttataagtaatgcgcccgttgatggcagcacgtgtttgaggaatacctcctccggtgataagcggcattttcatcaccagccaggatacgaatatcagtaccgcccaaaagaaaagaaaaagaggaatatgccagtaccactccggacgggaagcaaaaaactcacttcgcaagttaaagaaataatataggcagtaatgatagggaacagccaccacccccgtcagcaatcctacgaagatgctgacgaaatacaggcgggcatcaaccagtttcagtttcacaacataccacttcctcagttttctaaagtttttgaacctttgaaacattcctcagagttttcttttattaatttgagtatctacaacaaattaaccctgttgaagtttccacactttgcgttttttactttttccccatcatattcaatcgcaggatagcgtgcaccataaaataacgtcccaatacattgtaatccgcatcacgtatggcagtagccgagatggtgcgtaccattgaaatctcctggcgaagaatatcataaaacttgaaacgcagtagcagttgtttctttttcaagaaagctttcgacagttggcagttccatatcaggttcttccgcccgctgctgtcgtatccatatccggtacgaagaaaatatgtgagatcactgctgcactcgaagccccaggggagataatactgcaagtctcctccaagttgatagtcgaacgtttccgtgcgcatatctttcacgttattatacgaattattatacagcacttctccacgcgcactcagttcgagttgccgggtacgaaaagtaaattgcaggcgttcacgcgctgtgaggtgcttcacggaactcttcatcggctcttctttgttctgagtagtatatccgttctgatttctatattgcaaataggaataggtacgaaacagccagttgcggttcttgaaaggcccgctcaatgaaagtgcacctgatgcccgccagttaccattcaaattaacaggcatggtgattctgcctcccgtttcgctgtcgtaagtcacctggttcgttacactgttgagcacattctccacaaaaagagagaccaccatgttgcgctgatgtttcacattatacgaattataattcagtgtaaacgtattggtatatgaaggtttcaaagaagggttaccgatgcggatattcaatggattcgtcatgtcggcaaccggttgtaggtcacgaacactcggctgtcgtccttttcctctataaattgcctgcaactgtgtacgcttggaaaacttataacggaaattcagcgtcggtgaaaagttcaaaaccgttttactcatttgatgtttggaaacatcatccagaaaagaacggctatccagtttctggggttccagatcgacacctatattgtagttgtactttttccgggaagtacggacagccatattgaaaagatgggtactgtattggctctcaaaactattactggccagagaatcgtaatcggcaacaaaatcttccattgcctcatcccagttatagacaaagcggtccgaattagttacccggtattgatagctgtaacgaaactgaagaaaataacggttaggcaacggctccacatacaccagttgcagacgataattatatccgtcaccttcatcatccacacgctggttgactactttctctgtatcattcttaaaataatgtgtagtagaaaagtttttcctgtcggcagaagaagtattcgttccataatccactttcaaagccagattccgtcctttacgactgaacttacggttgacttgcaacataaaggtcagattatactgagaattatcgtaaagattagaagccgttctttcattcagaagtgtttcgtccgaccaactctgttgatatccactattcctcctgtcacttgccacatagcgatattgcggacgaaacaccagattggtgactgaatcaattttccattccagataagcattcgccgtcaggttgtggttcttcatgtgattgctgttagtgctgtggcttatcgatttatcctgtttcaggaaattatccaccgtagtactgttatcctccgaacggtcggtacccgtatattgcacattggagcgaagcttcactctgtcccagtcatgagtgaagttcatgcctaaagaatgtgaggtgaccagtcccaccctattcagaatatttccactggcagccgacgactctcgttgcaactccgagaagccttgattgttcgtgttattcagattaccgataatagtaagttgagaattatcccggaagcggttcagggtattggcaagttcatacctccctttgttacccgtacctgccatgaaattatccatccatcctttcttcatgtcctttttcacgcccagatcaagtatcatttcctcatccccgtcatcaattccggtcagacgtgccaaatcggatttacgttcataagctctcagcttctccaccatttccaccggcagatttttcaaggcagctttcggatcatccgcaaagaactctttgccgtctaccaatatcttcttaacttccttgccatgaatcaacagctttccatcaccatctatctctccaccgggcaattgttttacaagatcttcgagcatagaaccttcgggggtacgataggcagaggcattgaagaccgtggtatcctgctcggtaactgccagaggagctttacccaccactaccgtttcgcccaacaaaatgccatcggaaaatagtgcaatatcacccaagttctgcgaagtacctctgaatgaagaaggaatagatttagaaaaagtggtatagccaatgaaagaaatctctaaaagcaatttcttgtctttaggccagacaaccggcatcctgaatttaccatcgtccgtagtggctacacctgccagaaaagtactgtccggcaaggtcaataaacgtaccgccgcataccccaccggctgcttcgtatccttatcaacaacacgtccggcaaagcttcctttgccggactgtgcattaacagtcatacctgaccacaacaaaacaacatagattaagatgtttcggaaagtcaaatatgtatgcctgccatgatccattcgtgtttatcaagtagtttaatgaaaaatgttatttattatttgaagctggtcttgcatgagccggccgttttccctgaccatgtttctgaccttttcttctgtcaaattcttttctgaatttattcgcattgcttttttctgtctgatagatttttgcaatctgcttgggagacagaatcttgcggaattcattataatatttctcgcgaatatccagtatcttacgactttgcgcaaactgatccttgatctgcttttctatttccgcatctgtcagtacaggtttggtagccggggttgcttccgcattattgttcctaggcctttccctgcggttcatcatccgacattcgcttaaatctttcagatatttttcgtaaaccggagtgaacttggcagctgttgcatcatccagcatcagtgtcgtcaccatctgattggcttgtctttgaatcatttgttcaggtgtaggacgttgcttattggttttgttatccttgttctgagcagaaattgtctggctgccaatcaggagcgcagccaaaattacataaataaacttagtcttcataatcttcttgtttttaattaatacctaatttaaaaatatgtcattctcagagaagttgacgagctcttccaactcctcatccgacagttcgtgaatccatttatcaaccggatcgctgctacttctttctatagccaacatatccgaagttcctgcaggtgcatcttccgtccggagataagacggaacaaacaatacccctgccagtattgcagctgccgctatggcagtagagaacattatctgtaaacgatgtttccggcgttgcccgccgcaagtacgttccatcaccttctgctgcatatcctcaaaaaaattatcaggagtgcggtaaggtgtctttttaccgatatcgtcaaaatcaaattctttattcatcgtcctatctgtttaagatgtattcttttattttttctttcgcatagtgataattcactttgagagtatcgaccttactatccagtatacggctgatttcttcataatcgagctcatcgtaatagcgtaggttgaatattagccgttgtttttcgggcaaactcagtatggcttcctgaaacttgatcgccagttcattttcgtaatcaatgtaatcggaagccttcagtttacctatcagttcctcttgcacttcttcggcaggaattgcttcttcatcctttcgtgtattcagcaagcgcaaactttcattggttgcaatcctgtatatccaggtgctcagcgagctttcaccacgaaactggtctaaattacggtacacccggataaagacttcctgaagaacatcttctgcatcctcgtgcgacacaaccaaacgccgtatataattatatataggtacctggaagttatccatcagcatcttaaaccctttcttcgggtcggaagcatatacctgccggatcttatcctcgtttatcatcaattcagtttcttagctttattaggttagaaacagaaagaaggatgaagttaaatcgggaagttcacattttgcatttattaaataagtggttaaaaataaagtttcttatctttgccggcaactctcccgtttcagattaactaaaaaagaaggatatcgatatggaatgtaaaatcagaaaatggaaaatagacgatgccgccgaacttgcagcaaccctaaataacaaaaacattcaggacaaccttcgggacggtctgccttatccctacactgaagacgatgcaaaatattatatcaatgaaatgctgaaggccgataagaacagtattttcgccttcgccatcaccgctgatgacaaagtagtgggaaatattggtgtgtttcgcaaagacaacatccactcgctgactgccgaaatgggctattatatagcagaacctttttggggcaaaggcttgggaacctgcgctatcaaacagacctgccagtatgtttttagtaacactgatatcctccgtatttttgcagagccgtttagctataatatcgcttcctgccggattcttgaaaaaagcggattcaaagacgaaggaacactcagaagtaatgcagtcaagaacggacagattctggatatgaagatgtattcactcctcaagactgataacgaaaggacataaaaaaaggctatctatcccagacagccaatcttttgttaaccttaaatctaatactatgaaaaacacattgcaaagatacggactttgaggatatctccaaattttcagggtgatctacaacatattacaacatgttttaatagacactatattttcgttaactattaaggattcgttgtgttaataattaacatatccaatctttgactgatgcaatattggtaagtatagtaataatctattgctaacactgtatctcctttctctgcattatctgtccgattatattaacctctgcattttctgatttgtttcattgcttgaaactcatagtttcatgccgagaaaccaagagtttcatgctttgaaactgacagtttcacaccgagaaaccaacagtttcaagcggtgaaactacagacgaggaggaacaacgaaaaagaagaggtataatgaaacaatccctccatattattggatatatgcaaaagaactgttaaattcgcaaatagaacaattgcactttttctttttgcgttgtttatagcatagagacccgaactattaattaagaaataagattgatgctgaaaagacttatcttctgcctgtggatattgttgcccttctctttgtttgcgcaaaacgaagaggaaagttctaccgcacacgatagccttagtaccgaaaagcatcagggggccttcatgaaggctataaagaagttcctcaacttcaatgacttcgacacaacttatataagccccaaccgatacaactatgccttgatgctcgatcatttcacaaactacgaatattactccgtaggtaccgccgcccccgagccccaacggctccgcttcacccccaatcctcgcaacaagataggggcttactttggttggcgctggatatttttaggatggtcagtagatacggacgggctccttggaaagaaaagtgggaaaaacagagggacagaatttgacctcagcctttacagttccaagttaggggtggatattttctaccgtcgcacaggtaacgattacaagatacataaagtaataggcttttccgaccgtgttccttctaattattcggaagacttcaacggtctgaaagtaaatatgaaaggattcaacttatactatatcttcaacaaccggcatttctcttatccggcagctttcagccagtccaccaaccaacgtcggaatgcaggtacactcacagccggcctttccgtatctacgcataatttgaagtttgattatgccaagctacccgaaatcattcaagaaacaatgaaccccggaatgaaggttagacatataaaatataccaatatcagcctcaacttcggatatgcctataactgggtatttgcccgtaactgcctggcatgcctgtcgctcagtccggctgttgcttataagacgtcgcgcatagagaaagacacagaagagcccagcgactggtacaagaacttcaatattgattttatattacgggcgggtgtggtatacaataacagcaaatattttgtaggtacttcctttctgggcaggacgtatgattattaccgggataacttctccctgaacaatggattcgggacgttgcaaatatatgccggattcaatttctatctgaagaaagagcaccggaagaaaaaataatctatccgcaaattaccagaacttattatgttctgcgctatattcaaatccggctgactgcaacagtcctacaatcgtctctttattgacattcatatcatcacagagttcatccaatgaagaataacagtcacgcaatttcgtattgatgaagctgaaaagcatcatcgggtctttaggtaattccatctttctactaatacttattgattccggctgcaaaattacaattatccggactatcttattcctcctgctgatctattttttctatctttaacgctactttctctataattctactgagttcttcctccaatggaataacgttgaagtcctcccagaaatgttcatcatacttaaactcttcatctgcaagtacggtacggggaggcaatctttcagctcgggagaagcgggttacattctccgtatccaccagacaggtcaccatctcgaaccaagtatgcaaagtagggttgctaaagaaaaaacgtttccgcttcatcttgaagtaaaggtcgccacggatatgatggatataataagtacctttccacggtttatacgaaatagtatataccaccttctgtgtcgtcagatttatctttggcgcctgtctgacaacaaagatccgtgtagcctccttgatgtacttgggatttatctcaatgcgggcctgcaccaaagcactgttctcagagtcaatatacaacgccccacaataaagaggcgacctgacactccgcttctgctcaaaataaaccacattgacacaacggtcatctatgaatgtaatgtcaccggaggtatacatatacggattatcttccgcatcaaccgacagaaaatccggcaggtctttcattatatccaactgcaaacaagcctggataccggctctgatcttagcaaccagactgtctgtactctcccggttatcaatcttactcatctttagcagcttcacctgatcggatacgttcatctccggcaaagaagatttataaactttgaaaacagcttccgtcaagctctggaatttatttttcaactgcaccccctcccgatagaacgtagtcagataaacgggattcaatgaatagttttccccgcgctgatttaccatttcacgcaatagtttcttgggttccaccaaccgtatcaacacttcttgcaaaggaacaattttaggttccaggctcaacacattgtcccggccaatcagcgtagatgcttcaatgctttgtgcaacatatcctaaatgggaaaaagaaagcttgccatttttcagggagtcaggcagattaagcctgaactccccgttcttatttgtaatattacctattgaagttccttgaaggatgaccgacgcactcacaacgggatcacccgtttctttatcccgcaaaagaccggtaatggtgaaataggctggcaaaggtgtctcttccgagactttccgcttccgtacgaccttctccgcaggaggcagaatcaagatgtgatttcctatcactttcagttctaatgtccggtcgcctacaatttcatagatggcttgccggaccgtacagtttttcttttttgtcctaacttcaatgtcattattcaccaccttactgtcatatacgaaaagatagccggattgttccgacactttgctcaacagggaatataccgttcctttcgtcccgggtaaccggatgatacgttccaacacatctcctccgtccgccctcatatcacaggtaatgagaagcaggctcagaaaaattatgaagaaacgatgaagtttcatgatttatatagttaagttatcattcggataaaatcagtttatcaccttcacgtgaacatttcaaactcagcgcccagcaaataagttccgctactgtttcgggggaattattctcaaattcaatggtcagcttccgtttactcagaactggtgatgccgtctgtatctgcaaagcggaagcctcggcattcaccactcgcagaatatcttccaggcattcgtccttgaagcgtatattctttgtatattgtctgaactcatcggaatctcctgtctcactcagttgtaactgccgcgcctgcaaggtaacggtttccccggcatttaccagtacactttgtccgccttgcttcagcgagaccttcactctgccccgctgcacggagagccggaaagagtcatctccatgactacggacattgaaagctgtacccaacacttctatctgtaccttttccgtttcaatcagaaaagtttgttcatgtttctttgctacatcaaagaaagcttctccctgtaagttcacttcccgcttgtccgtagcaaaatgttcgggatacttcagcgtgctctcctgtgccagatatactacagaaccgtcttcgagtgtggtaaccaacatggatgcttcacgattttcttgcgtcaccagattgaggctttcgatctctcctcccggaacaaaccacaacgcagatgccagatagacgaaaccggcaattacggcagccgccaatgttccccatttcaagagaagtttgcgacgcactaccccttcccgccctgctccgacgagcaggttatcttcatccaaacgggcatacaaccgttcccatgcctcatccgttttcgtcctatttttattcacttcaatcatttcgtaaggatataattatcaatttcatttcgtaaggttcgcagcgctttcgtcatttcagcctctaccgtcttgacggacagagataatgaagaagctatctccgcatatttctttccctccatgcgatgcatttcaaatatccggagtcggcgcatgggtaatttatcaagagtatgacggatcagtccttgtaactcttcatactccaactgccggtgaggatcagaatcgtgttccgtagcattacccgccaatacatattcgcgataccgctccttgacttccttatgctcgcaaaactggagtgctgcatttcgtacagctttatataaatagctttttacggactggaatatctgcaaatgttcccggtccttccaaaacacgtagaacaattcttccacaatttcctcggcagcttccatctctcccgtaatacctgcggcataccagcaaagaggggaatagtaacgacggaagatttcctcaaacgcctttatatcgccctcttttattttagtcagtatgaacagctcattcagcatactccggaattattgttgatctccaaatataagaaaactatctgaaatctaacgggattgctttttcaatttactcacagcatgttccagagactctgtaggttcaataatattgtatgtcttccagaaatcctcattccaatattcgtctaccaaatcatagaacacttgtttttctttgaaagccttcttgctaggaatgactgcaaagtcgctctttctatctgttaccaccatttcggaaaatacggtatagctggaagagaataaacgctttttccagtcgcacttgaaacgtatttcattccgtatgtaattcagataagtttttccattctgttccttatacgtcaccagataggagacttcctgtggtctgaaacgtaatccgagaggcttcttatgaagaatagcttccaccgccttcaccctgttttgcatatccagagagaattccgcacgggtgaatgccagtttctcaaaatcaatatagagttttccgtaaaacaatgcatacatcaggctgactctgggacgaaaactgactacatattgcatacgattatccagattcacaggttcctcaatatgaaaatcataataattcagattttccatgctcaacaatgcatctccgttcttcacaatatccagataaatagaaagattaggtccgcccaccacttttactgccagtgtatcactggttttcgggctcagcaggcgacgtcctttttgtagttgcactctatcgttcgatggttcccggtcattgtacgcagttttagacacatctatcacagcctccgatacactgatatagcgtcgccttttctgtactgtctcccgataaaatgcagtcagcaaattcttatcaaccgaatagttcaccggaatttttttaatcgcctcttccacaagcccccgggcgttattgccaaagacaacaatctcactcagtagattaggagccggcagcatccagatagtgagatcagatacatcttccttatccttcagagaaacttgagaattcaaatacccgatatgtgaaacctccaatcccagaatagtctccgtgccctttatcttcagagagaacacaccatccgcattcgtaacggttccgatgttcgtaccgggaacagacacattcacattctccagttttctcttattatccttatttttcactattcctgtaatagtgaaatagttcccggcttcttcctgtgcccataaaggtgaaatacccaacagcaaaaatgctatcaaccacccaactgcaatactagctaactttttcatcttcgtatgattttaaaggtgaacaattctcgttttctactactaagatcgctcagaaatgaaaaaccctatcggttttggaagaaaaagtgaggaaaatgtttccggcttaaaatatttcgaacagttattttgtcgtctggtttattataaaagaatacaaaaaggggaaataagtaactgttaatgtgaaccttgatatctttctattgttctcatgcgattaataaacaaactattcaccttacaaaatatttaacagctatgagaactattcatctgatagttattcattgctccgcaacgaaggagaatgaaacattaacggaaattgaattggaaaagtcgcaccgccaacgtggactaaatggtatcggttatcattattacattcggagagacggaaatattaagagtacacgttctgttcgaaaacccggagctcatgcccaagggcataatcttgacagcatcgctatatgttacgaaggtggtcttaaccggcacggacttcccaaagatacacgcactcaatggcaaaagcactccatgattgttttactcaaaacgctccttattgattatccggactgtcatatttgcgggcatcgtgatttacctcaaattatggataaccattcattaatagaaccggaatcatggctggaagaatgtccttgcttcgacgcagcgactgaatatcattgcttacgctatagcaatggctagaagaaacctaaagcaaaaaaagagtcgtaaatcattgatttacgactctttttttaatatgacagtctatttacttcacttcctcgaaatctgcatcctgcacattatcaccatgcttaccactatcctgagcaccgccagcttgtccggcattcatatcaggaccagcctgtgcaccaccttgagcaccactttgtgcatacatttcagcacttgcagcctggaatgcagtattcaattctgccatagcagtatcaacagcagccaaatcctgtgctttatgagcatctttcagtttctgcaaagcagcttcaatcggagctttcttatcagccggcaacttgtcgcccaattccttcaactgattttcagttgtgaagatcattgagtcagcctgattcagcttgtcaatcttttcacgctctttcttatcagcttctgcattagcttcagcttcagctttcatcttttcaatttcttctttactcaaaccgctggacgcctcgatacggatagcctgttccttaccggtagccttatccttggcagacaccttcaagataccgttagcatcaatatcgaacgttacctcaatctgaggaacaccacgacgagccggagcaatacctgacaggttaaactggccgattgacttattctgagcagccatcggacgctcgccttgcaatacgtggatcgttacttcactctggttatcagcagcagtagagaatgtttcgctcttcttgcacggaatagtagtgttagcgtcaatcaactttgtcattacaccacccagagtttcgatacccatagacagcggagtaacatccagcaataccacacctttgatttcatccgtcaacacagcaccttgtacggcagcacctacggctactacttcatccggattcacacctttagaaggagctttaccgaagaaatcttcaaccagtttctgtacggccggtatacgtgaagaaccacctacaaggattacctcatcaatatcagcattgttcaaaccagcatcagacatagccttcttacacggttccagacaagcctgaatcaaagtgtgagccagagcttcgaacttagcacgagtcaaagtcttcaccaagtgcttaggcacaccacctaccggcataatgtacggcaagttgatttcagtacttgtagaagaagacaattcaatcttagctttttcagcagcttccttcagacgttgcatagccatcggatcctgagtcaggtcagcgccttcatcattcttgaattcatctaccaaccaagtgatgattacctggtcgaagtcatcaccacccaggtgagtatcaccgtttgttgacaatacttcgaatacaccgccaccgaattccaggatagagatatcgaatgtaccaccaccaaggtcgaatacggcaaccttcatatctttgttcgctttatcgataccgtaagccaaagcagcagctgtcggttcgtttacgatacgtttcacttccagaccggcaatctgaccggcttcttttgtagcctgacgttgagaatcggagaagtaagccggaacagtaataactgcttccgtaatttcttgtcccaaatagtcctcagcagtcttcttcattttctgaagaatcatagctgaaatttcctgcggagtatacagacgtccgtcgatatctacacgcggcatgttgttatcaccctttacaaccttatatggcatacgggcaacttctttctgtacctgatcccaagtttcacccatgaaacgtttgattgaagatacggttcttgtcgggttcgtgatagcctgacgttttgcagggtcacccactttacgctcaccgccgtcaacgaatgctacgatagacggagtagtgcgttttccttcactgtttgcaattactacaggttcgttaccttcaaatacagcaacgcaagagtttgtagttcctaagtcaataccaataatttttcccatgatctttaatattttatttgttattattcaagtttcggtcgcctgcatcagcagcagacgccaataaaaagacaaacgtcgtgccaaaatgttcagggaggttgtaattttataggttggcagaaaggctgtcagtttggcagaattcttctttgtttttctgtcgaaaattaccatttgttaatcgtcctcccacataaaagcagtaattttgccgacgaaaaagcagtagagtacaagctacgagctacaggctacaaactacgagtacctttcggcatcatagcgcagccactcgtaactcgtagcttgtagctcgtaactaaatataattatggaaagagatagcattgattttaaaaacacagacatcgcggcattgttccgcaaattattactccctactgtactgggaatgatattttccgcattatttgtcattacggatggaatattcgtaggaaaaggtattggcagtgatgcacttgcagcagtaaatatagtggcgccattatggttattctctacgggcatcggactgatgtttggtgtaggagcatctgttgtagcctccatccacttgtcacatggaaaagtaaaagctgcccgcatcaatattactcagtctatagttgtatcttcattgttgttgataggtacctccacgctattctgttcgttcgccccacaggtagtacatcttttgggcggttccgagcgtttgactccactggctgtagagtatatgatatggtttgttccgttctcggtgtttaccgccttgcttaactcagggatgttcttcctgcgcctggacgggtcacctaactttgccatgatgtgcaatatagtagctgccgtcctgaatatcattctcgattacctgttcatctttcctttcggttggggcatgttcggtgcagctattgccagtgccatcggcactacggtgggagcattgatgataatcatctacctctcccgccgcaaatgcgctctacgcttttaccccgtaaaattcactcgcaaaagcatgcaactgacgcgtcgtaatataggttatatgtgccggctagggtcttctgcttttctgtgtgaagtagctattgcctgcatgatgtttgtcggaaacatcgtgtttatacattatttacaagaagaaggtgtagctgcattcagcattgcatgttacttcttccctattatatttatggtgtacaacgccattgcacaatccgctcaacccattatcagttacaatcacggacttcatgaagaaacccgcgtacgtcgtgcctatttattggcgctgaaaacagccatcggctgtggtactgtcttcgctctggtcaccatctttttcagttcggagattgtttccatgttcatcgaccgcagttatccggcctatgaaatagccagcaaaggacttcctctatatgccaccggctttattttcttcgctgtcaatatcgtttccatcggatattttcaaagtgtggaacaggctcgttatgccactatcattaccctgttgcgtggtttcgtcctgctgacagcgtgcttcttcggacttcccctactctttggtaatccgggtatctggttggcaacccctctggctgagttactgaccacccttttcatacttactatttatataaaagcaaaaagaaagcacaaaaaaaatatagtatctttgcagcatggaaatgatgataaagaaattctgcccaagatacagactcccggaaaaaagcctgcatgaacttttgtcacacatgacagaatatcatttcggtaaaggggaatccattgtgaaagaaggagaacgtaacagtaacttctacatcttgaaaaagggtatctggcgtgcttattatatgatagacggtactgaaagttccctctggtttgccggaacaggagaaatagctttttcatcctgggggtatgtcaataatgaagtttcacaagtgaatattgaatctgtaaatgaaagtattgcctatggtattgccaaaccggatttagaagaactcttcaatagttctatagagttatccaacttcggccgaaaaatctttgaacaggaaattttatttattgatagctacacattggcatacggtaccccaagtgccaaagagcgttatctgaccttgatggaagaaaatccggaactgttgcaatatgttccgttaaaacatttagcatcgtatttatatattacaccacaatctttgagcagaatacgggcagggctgaagagaaggaaataaatcatcccaatacatccattcccttttcagaatctatgcttcacaatctgtcagctccgtatctgctccgtatctactccgtaccaaacctatacctataactatggagatggtacggagcagatacggaggcggtacggagatagcacggaaatgctacggagatagtacggagataatgccgtgcaaataccataagaaagatacataatacagtactcaacatggatttagatcagattatcgataatataggcaagctgccggagccgtcaaagaatgcgctgaaggagatcatctccgaagtcactcaccccaaaggacatatcctattcagggcggacaaagtagaaaccaaagtatacttcatcaagaaaggcattgtacgtgcctataccgagttagctgacaacgaaataacattctggttcggacgcgaaggcgatacggtggtatccatgaaaagctatgtgtccaaccaaagaggctatgaaaatatagaacttctggaagaatgtgaactatatgaagtcaggaaacgagccttacatgaattattcagcaaggatatacacatcgccaactggggaagagaatttgcagaaaaggaattgctcaaaacagaagaaaggtttatcggccgacagttcaagacatccctggaacgttatagagacctgatgaatcatactccggatcttttgcaaagagtacaattaggctatatcgcttcctatcttggtattacacaggtcagtttaagccgtattcgggcaaaattcagataaatcactttttatcatttgttaaataagaagtcaaaccaattcatgaactttgcacacaaaaaataaaagttatgagttggatatatttgattgtggccggattgttcgaagtagcgtttacctcctgtatgggcaaggttaaagaaacaaccggcagtgaaatgtactggtggttcaccggtttcattatttctatgagtatcagcatgtttttgctgataaaggcaacgcaagccctgcctattggtacggcttatgctgtatggacaggaataggtgcggtaggaaccgtattggcgggcatactaattttcaaggaaccttccactatatggaggttattttttattgcaacgctgataggttcgattatcggtttgaaagcagtatctcattaaagcaaaaagaggttgtgtcaaaatgctggcacaacctttttttatgcgcaaagcccagactttcccaagc

SEQ ID NO: 6344 - DNA, 30791 bp, Unknown
  gut microbiota DNA sequence
tattgtccgatgacggttgctactatttttcttccaccgccacgattgcggaattcacagaggtatataccttgccagatacccatattcagtctaccgtcagtgataggtatgctgagactattacctgtcagggtcgatttggcatgggcgggcatgtcatcatctccttcacaggtatgcatatagtagggttcccgttcttttaccaggtggttgaagatggcttccatgtccgtctggacatccggatcagcattttcattgatgctaagcccagcgctggtatgcttgatgaacagatgtaagattccggcttgcggcagacgcggcaggttacgtattatttcatccgttatcaggtgaaaaccacgtgcacggggacgtagggtaaattctctttgagtaacaaaactttgttccattttatatatttctatgcgttattattttccgatatgatttagaatgaaagtctttctattctttaggggctttatcaagtgatgatccgcaatacttacagaactgtgcactttcttcgtgtcctcgcctgtgacagttggggcactctcttgctacattcttttcatgtcttttcatcagcgatacggaaacgatgccggtgggtactgcaatgatagtgtaacctatcagcatgacacaacctgaaaggaatttccctagggcggtgacaggagttatatctccgtaacctaccgtggtaagcgtgacacaggcccaataaatgctgttgggaatattgctgaactgtgtattgggttttcctccttcaatcatgtacatcagtgttccgatagatatcaccagaatcaccacaaacataaagaaaactgcgattttcttgctactgtctcgtagtgccgtcagtagcatttgcccttccatccagaagttgaataacttgaaaacgcggaatatccgtatcaggcggaatgcccgtataataagcagatagcgtgctccgggaaacaggaaagcgagataaagcggcagtgtagccagcaagtcgatgatgccgaaagcactgaaagcgtatttggaaggtttgggcgaacaatacaaccgggtgatatattcgaaagtaaagaaagcagtcagtaaatactccataacaatgaatggagttttcagccataccggtaatccttgcaggctttccaggataacaagtcccacgctaagcaatatgcaccagatcagggtaacgtcgaatagcttcccggcaggtgtgtcagcttcgaatatgatgacatatagtttttgcttcaaagcctgattatgcatcagttctgtgaatttatctttcagtttcatgtttcacaatgtttgttacaaaagtaggaaaacctttccgaatgagaaaaagggtacttgactttttgtaacttgctggaatatggagtatatttgttacctgttttcacgatttaaaagtaaacaaccatgaatcgaataataaccttcgttatcggggttttgttcatcatacttaaaataaagagcgtatgaataaagtatgtgtagtaacaggtggagccgccggtatcggtcgttgcattgtcgagatgtttgcagaatcgggatatacggtgtatttcattgataagacacccgaggcggtggaactggcggaaggaaagatgtcggaaagagggctttcggttacaggctttgtcgtttaaagactatttcagtggtgcaggtgctattgtgaatatttcttctacccgtgctttccagtcgcaggccaatacggaaagttatacggcagccaaaggtggaataacggctctgactcatgcacttgcagtcagtctttcgggaattgcccgcgtgaattctatcgctcccggttggattgatacgggaagctatcatgaagaggattatgtgccggcatatacggaaggagatatcatgcagcatccttcgcaacgggtaggagaaccggctgatatagcccgtgctgttcttttcctttgtgacgaacggaattcctttatcaacggggagaatattacgattgatggaggcatgagtaaactaatgatttatcataatgattatggttgggattatcaaccgtagaaactattaaatataaaaagagaataatggaaaaagtaattatcaactcgtatgaggattttgaaaagctggtaggtcagcaaattggggtttccgattatgtggaactttcgcaggaacgtatcaatctgtttgctgatgctacgttggatcatcagtggatacatgtagatacggaacgtgctaaaacagagagccatttcaagactactattgcgcatggttatctcactttgtctatgttgccgtatttgtggaaccaaattattgaggtgaacaacctgaagatgatggttaattatggtatggatcagatgaagttcggtcaggcggtattgtcgggacaaagtattcgtttggttgcgaaactgcactcattgacaaacttgcgcggtgtggcaaaggctgagattaaatttacgattgagataaaagaccaaccgaagaaggcacttgatggaattgcggtgttcttgtattatttcaattaaaattctttcattataaattacacggatattcacagatttaatgatgaagcttcgataaagctcttcttcttaatttgtgaatatccgtgtaatttgtgatgtattctttatttcttcctgatatattcctgccacaaatgccggatagccgctaccggatgatacaacaacattcttggccctgcccatctcatgatttctctcatccgttcccgcatctccggtttgtaacaatgtatggtacagagtcggcaagtacctttcttttctccgaatggacaacgtgacaaccgtgcatgtgcatattccaacacttccctgcattgcgggcacaaagtttcgttcccctctttcttccggcagtagaggcggatcatttgttccacggtttgtttttcctgttcgatgcgggacattatttatgcttgccagcgtttcaatttcggaaactcttgcttcatcatcgcaatagcttcttctttagtaactttctgctccgagtctttattgaattcttctacaaactgggcacaatgttctatcatttcatccatggtgcagtcttgtgcgaatttaccttgctgatagcagtaagtacaataatctgcgctgaggctaccgtcagcatttgttccgcatacttcatcggatgtgagcggcattccgcaactttggcaaaatttcatttccataatctttttgaattagagtttgtacaaatatacattcttattttaattgcagcaattttttcagtaaaccttcattcaacaggtgcacagtttcgaactttccgttatagaatacagcccaattattaaagatacaaggcagttgtttagctttctccaaagtatctatctctaccaaccggagaggtatttggttgttctcgcagtaattgtatatctgttcgatgcaattgggaatatagggacattgcacaccgtaataaatggtcagttctttgccctcaatgctctgtttccgcacgtttgatgtgaattgcggttgggtgccgtcaaaggaaagagctaataattcatattcgtcattgatggtatccactactttgaagccatatttcaacatgaacttcttttctgataagaaaggtttcttctttttggaagaaaggaggcagatgccggattttccttgcgcttttgcatcgtcaatgcacgattgcaacaattcctttccgtatccctttcctttgtaactgccggatacccacaggcaataaatatagaaataattatcaccagttacgggaacccaggctttttccaacggggcatactcgatgaacacctttccctgcgtatccagtttgcggaagatgtgtccttctttgatacgctctgccagccagttgcgtttatcgtttacgccggtctggtgttttttgtctgcaatggcgcaacataggtgttcgctcattacgttctcaggggttagtgtgatgaatgccatacttttattgatttagacgaatgggtatatagattttagtgatttgttctgacggatttttcgaccacgtgacgtactcttcaaaagaaagcgcatttcgcaatctttctttctcttttgaataaatataagtgtaagctcgaagcaatcctttataacttccccgataggtataaactacatacggtccattctctatcgttaaactaccgatggctcccgatggttttatcttttgtggtacggaagcgcaggcatagaaacggcatcgcttcttttgcgtaaccgtgggatcgtcgaaactgatgccgaaccagcgggtagcggacgattgtaatgtacattctttcaggaaatcgcaaagacttccccaaccgcgttcgtaactttccttctctccatacggaccgataatacggatgtatgccacatgcatggtagggaggagcagtacttccggttcttgcaatccgattgaagaaatatcctctgccatagttgtttctgtagtgacgagcggcaatgtatttctgaatgctatcggtgagaaaccgaaataccgtttgaatgctttggagaaagattgcggtgtgtcatatcctaccttttcggatagttcctgaagggaaagatcacgtgtttgcaggtacatcacagccctttccatcctttggcgggtgatataggccgagatagtctcttgcagatatgacttgaaaagccggtgaaagtgatatacggacatgttcatctccattgccagcatttccgaagataatgtctggtgtaaatgggtatgaatataatcaatagcctggttgattaattcctgatgtccgtatgtcgtttcttccttcatttgtcaggttttggcacaaaggtaggcgaaaccagcggaagaagaattatccattcttgctaattttgagataaaccatatctttcagaagctttccatcttcatacatgggatgatcgtagttatcagtaaaaaagttgggtatgcggtgcgagtaggtaaatccgcattgtttgtagaaatcctctgtgtacgtatcttctgctgtacctaccaatagcgtatgataacgatctttgtagtgttccaatagaaattctatcagccgttttccatatccttttcgttggtagtgaggataagtggcgatgttcttgatttcatagactccgtttccttcatctgttatcacacacgccgcctttaagtcgccgtcgtagagagcatacatttctccccgttccaggtagaggtctatcatggactcttgttcgtcggcaagtagcagtagttcgaggaactcctttttgttctttaaaatagggacgatgtttatcattcgtgtagatttaattgttcttgaatcacctcaaaggtaggcaattggtatgagaaagacaaattctgctaccaagttgaaaaacattattccgaaatttgctacttataattaatttctgttctttcgtacaggaatttatggttgcccgataatggtctatgctttttagggagagcgagttttccaagtcaattcattggggggataagattaaaagtagtcaacctatgtaagaagactatgtgctcaatatcagtagattatgattctcagttattctcactatattgagaatgttttctcaccacgatgagtatttattctcatcgcattgagaagttcttctcatcgtattgagaatactttctctttacgttgagaaaatcttcattataggcatcctgtttccgactgataagtattgtattgcaaagtaatataggttatggataaaacatcctttggagaagaagtatatagcgttgtcgcctccatccctccgggacgtgtgctgacgtatggacagattgcttatcttataggtaagccccagtgttcacgtatggtggggcaggccatgcataacgcacctgaggaacaaaatttgccttgccaccgggtagtgaatagtcagggacgactggctcctttctggcccgaacaacgggagttgctggaaaaagagggtaccgtctttaagaagaacggatgcgtagatgtcaaggcatccggttgggaaatactgaaggaggttatttcttagcgaatatattgataagcagcgagcaacttgtcagcaagatacctgttcctaccactcccgtccagccgaaccattgccagaaggttccggcaaggaaagttccggtggaaccgccaatgaaataggtagtcatgaaaatagtattgatgcgattggatgcctgcggacaaagggcaaatgcacttgtctgattactgagctggatgcattgcatccctatatctatcaacagaataccggctatgatacctgcataactatattgtcccgcatagagcactatccatgcactgattatcagcgaacatcctatataagtaagccgtttcaccccgactgtattgatgaattttccgatggaagaagcggtcagtgccccggctatgccgcaaagtcccagcattcctatgatattgtttcccgcaaagaaaggcgcctgttccatcttgaaagccagacaactccacatggcaaggaacgatccgaacgagaaacctgcacgcaacgaagctatgcggagttggggatacttcttgacgatggaaaatagggatttcatcagtccagcataacttccctgataattggaaggaaggtccgggagtatccttattataataagcaaacaaacgaccatcaatcccgcggcaataaagtaaataaaccgccagcccatgtattcgcctacaatgccgcttactacacgcgaagcaagaatacccgtcagtagtcccgaaaggataatacctacattctttcctttagtttcgggagtggaatattgtgctgcaaggggcatgaatatctggggtataaccgaacaggcacccgtcagcagagaagcgaacagtatcaggtggatattgggagctaaagcaatggtgagcagtgagactaccagaatggaaatatttacgaggataatatttcttctgcggtataaatcgcccagtggaatgatgaacaatagtccgatggcatatcctatctgcgagcacatggctatcagattggcggtgaactcactgatgttcaggtcacggctgatacggttcagtagtggctggttgtagtatatgttggctaccgttacgcctgagatgatggccagcgtccaaagcagggacgagggtactccttgattttcttttagttccaatttcatgccgcaaaggtagtaatttcatgaaaaagaaacatgcacaatgatcaatgattcatatacaggggcatcaggcgatggtaggctttcagatatttcctgagtctggtgacttctttttctccgatgcagggcatgcggcgcacatccatattatccgtcaggtcgtgaatcttaacggcaacggctatgggattggaggcacatctttcgacgtattcttcgtaatcttcctcatcggaggtctttgtgacacaccgcacggcttcaatgatttcggcagagaatccttccttttccagatcttcgaatgtccattccgtatcttctacaacatcgtgtagaataccgacaatcctttctttcagattccgtcccatattcattacgcggatgggatgatgcagatattcctgtccgtatttgtctttttgtcctttgtgggcttcggtggcaatagcgatggcatgtgagagaagatgattgtccataagattttttttagaattgttcgatacaaagttactgaaatctgttattaaatataagagaggcttattattaaaatagtatattaacccaataaatgaaacagattatgaatatagaacattttccggagaaaaaagtttttcagaccgtagtcgatggagagactgcccgcctgatgtatcatgtagctgacggtgctttggatgtgcgtcacacgattgtacccggtgaaataggtggtaggggaattgcttctgctttagtaaaggcagcctatgattatgcattggctaatgaactggtacctgtggcaacctgttcctatgccgtgaagtggctggaaaggcatcctgaatataatggaaagacgggaaaggattatgcgggggaggggacttgtgcattatagaaactccttaaaactttgggcagccatatattatctatatatgactgctcaaagtttattcacttaattattctgattgataaggtttatcacaacctttaccattatatctttttcttctgttctgctttctgcaatcattaatgtaagggcgactaatgtgttgttgcttattaaccgggaaccatcaggtttatataaaattctgtttttctcgagaaaccataggaagagaaaagcagcaatacgtttgtttccatcgctaaatgaatggttttttacaactaaatagaaaagcatggctgctttttcttcaatgctgggataaagttcttttccatcaaatgtctgatagatagtattgatggagctatgaaatgattggtccttttcatttccgaataagccgctacttccaaatttcttttgcagaatgtgtattgccgccattgcctcttcgtatgtagcccggaaagaggtggttcgtgtagttgcttctacttctaatctctgatagtcatacttatccaaagtatctaaaccgtatgtgtaatcggtaataacatgtaataacccattggcttcattcaaggttaattctttgtgttcgattacattggatagtaatctaacagtattcttcaaatcagctaattgttgtgctttagcctgtttattaatagcataacctttgattaggtattctttcagaactttattagcccaaatacgaaactggataccttgttgtgattttacgcggtagccaatagaggtaatcatttcgagattgtaatattctacctgataagtttttccatcggtagcagttgtcgcaaattttgcgacaactggaatttcttttagttcttcctttagtgcattagtgatatgcttgccaatagtttttacatcacggtcaaacagttcagccatttgttggcgattaatccataccgtttcattttccagtctcacatctatcaaagtttgtccatccttagtctggtagatgataatatttcctttgtcgttcattttttattctttttaaatacgaatttgtaaaggtaagcattttcttctttgttgccttcggatttttctctatcttgcttccgtttttaatcattcactaaagaaaaacagaatatgaagaaatatataggagcgcacgtaagtgcgagtgggggagttgagatagctcctgttaatgcgcatgagataggtgcgaatgcatttgctttgtttacaaagaaccaacggcaatgggtggccaaacctctgaccgaagaaagtattcgcggatttaaagacaattgtgagaaatactcttttgatgcccgctatatcctgcctcatgatagctatttaatcaatctgggacatcctgaagaagaaggactggagaaaagccgtgccgcatttctggatgaaatgcaacgttgtgagcaattaggtctgaagcttctgaatttccatccgggcagtcatctgaataaaatttcaatagaggaatgtctggataaggtggcagaatctatcaatatcacattaagtaaaacgaaaggagtgactgctgttattgagaatacagccggacaaggaagtaatgttggtaatgagttttggcaactaaagcatatcattgatcgtgtggatgataaatcccgtgtaggtgtatgcttggatacttgtcatacttactcggcaggatacgatatcgtaaaggaatatgataaagtgtttcaggagtttgatgaagtcgttggttttaactatttgcggggtatccacctgaatgatactaaaaaagaactgggtagccatgtagaccgccatgacagtatagggaaaggcttgttaggcatagacttctttaagcgttttatgaaagatgaacggtttaatgatatgcctgttattcttgaaacgccggatgagagtttatgggcggacgagataaagttgctacgtagctttgaagaatagatacgcggacgacgcggactaaacagacgaacacggacttcttattatgaattaagaaaatccgtgttcgtctgtttagtccgcgtcgtccgcgtatccttttattgatttaccttcacattattccattcagatgacgggataattgacttgtcatactcaccatctttcgctttaatattcagattctcaaatttgaaattcgtcagtttgtactgctcggatgcacttacgttgaaaaatacgtcacattcaaagtctatattacgcattgttacatggtccgagtaagacatcggaatatctttacggtctttcagatcaaagaactgagtccatggtttgatgtataggaagcttttggcatttcctttaatatcctccacaaggatatatttataattttggggagtatcggcacgcatcttcaaccacaacagacggcttgcctgattgatggtacaacgacggagaataatattgcggttatggatagactcgctaccgcaagtcagtgcactatggcagaaaccgtacgtacaatcttctataataatattagtgttacttccgttgttagaatccttatcagcccaggggccttttccacctttaagagcaatagcatcatcgtttacagaaaggtagcagttcttaaccaacacattattgcatacatcaatatctatggcatccgtgctgggtgccttaacaggagcagccggagagaaaatatatagacctaataacttcacattgttacatttgtaaatgtgtgtcgtccagaaaggagagttgatgaggcgtacaccggaaagctgtacatcattgctattggaaatgtgcaccaggcgcggacgcaactcatccatattcgtgcatttcggaataacggtgcggcgcaaccagaaagatttccaatagcgtagtccgttgccattgatggttcccttaccggaaatggtgaaaccatctactttgtcggcattcaccagtgcggcaaagtatttaagtgattgcccctcgatgcgggtattgattatagggaagttgctgatatcatcgctacctttcaatactgctccttcttccagataaaggtgtgttttaggcttgaaaaagagtgcaccgctcagataggtacctttcgggatgatgatcacaccgccacctttggatgatgcctggtcgataaccgcctgaattttctctgtttgaagtaaggtgctgtcattcaccacaccatgatcagtaatcttatatttaccgccaagggtttcgatatttacaatttcgttctgtctgaaccagtcaggaataagggtaccatcggggaatttctcttgtgcaaaagatggtaggcagaaaagcaaactacatactaaagttacgaatttcatggtctttatcattaattgagttaatagtgtcttgatcggatcgatttatccgtttgcaaaaatagggattaaaatctacatgctgctcatgaggataagcccatttcctaagttatttgttggtttatataggctttttgattcttcctttccatacagaaaggaagttaactcgtcaacttttcctctatccgagctttttgaaaaagcaataatcagaagtctgctttttccgtaatacacatggactgcccgttgacgggatgggtgaactctatggattcagcgtgcagatagagccttttgtctttctttccataaagttcgtcgcctatgatggggcaatgcagtcctgacggatgtgccgcatgtacgcgaagctggtgagtacgtccggtatggggataaaaggctatacgtgtatatttatctgtacgttcgagaacctgataataagtgatggcaggcttgccatattgtgtgtttaccatttgtcgggggcggtccaatggattggggcaaagcggtagttcaatagtgccttcatcttccgggacgatgccatcgagcaaggctatgtacttcttccggatactacgattcttgaattgtgcctgtaagtgttggtgcgtcttcttatctttggcaatgattaaaagtcccgatgtagccatatccaacctatgtacgatcatgggaccctctgcttccggataagcttctcttgccaggtcgtatatggatgtttgtctttcttttccgggtactgaaagcattccggcaggcttattaataatcaatagccattggtcttcataaactatatttaatttttcattacctcgttccgcctcctgttgcatgggatttgcttctacctccaatccctgtaacatgtgccggagaattggttcgcatttacccttacaggctggatagtaataaccgtgatgccgtacttcgtttttgggagaattaccccaccagaattcggccatggctatcggtttccaatgatgcagataggcttgttgtaacaatttaggagcggcacattcacctgcaccggcgggaggagtcttatgtacggtttgctcgaatatgtcgcataaagttatcacttctccccggtagttcaacattctgaattgttcgaatagttgttgttgcaaggcggcagagcggactttacgttctgctttcagctcctgtatttgtttttcccaattacctgcttctacttgcaaggaggctatcttatctttccaggagcgttccaaccgtttatattctgccttctggaactggctctctcgtatcagatcagcttcttcctttgcatcaagctgacctgtttttctgagtaattctcttttttcttttgcttctttcaattgtgttttggcaattgacaatgcatcttgtgcagattgggtggtctgggtaagatctgataataggtcaatatatttcttatcctcttccaaccggcagatacgacggttgatagtggatatgttttcttcttctattttgaagaagccttgaggttgcaataaatcgtacacaggaggtacaaaatacggatgtatattcttcccggctaatatgcccgaaaaggcggttaaataacctatgcttccatcttcggtttgcactatcagcactccgaacattttcccctggcttaattcctcttgccagtcgctttgcttgctgaggtagttttgtacctcttccgccgccattacacacaatggatgaggagtataacagaaaggataagtaaacctttccggaagtggaatatcgctgattgaagtagtaaaacggtgcaacataatggtgcaaagatactacattctttgggtatctgtgaagttatccggcagaaaagaattcctcgctttcattatggtagggtaggaggaaagtgaaccggcttccttttccaatctctgaggccacactaatcttcccaccgagtttttccgcaattaccatgctaatggaaagtcccagacccgtgccttgaacaaattcatcttgtttgtagaagcgttcgaatatcattcgttgctcttctttcggaatacctttgccggtatcttctacgtaaatggagacttcgtatgttgaaaaatcaatttcatagcccagtttgatatatcctgatttggtaaacttagtggcattattcaggaagttagtcattatctggctgaggcggttcacgtccgtattgatgaagaatgcggcatcgggcacttctttgatgaactctatttccttgggtatcaataaggaatgtgtcaaatacatactatccacccaattattcagattacacgttgaataggagaaagtcatgttgcccgattcgatacgggagagctccagtatatcattgatgagtttcagaagcaattcgcaattcgtattgatcgtattgatgaagtcagctttctcttcatcggggaggtcgtcttcgctgacaagtaagttggagaaccccacaattgcattcagtggagtacgtatttcatggctcatattggcgaggaaagattgtttcagttctgcctctatcgccaggtcttttgctctcatgagttcctcttctttgtccttgaagtgttgcacattggtgattaagcctataatggaggccgtttccgccattgcctccgtaggattgacataacggagttcataccagatataccctttactattaaagttgcaccggcattgggtgtgcgttttggaatccggttggtttttcacatgataaaacgtgttcaacacatccactctatcttccggatgtatcgcttcggccatttcttgtagggtaaaggcacggaaaggcatatccagatgctcaaagaattctttatcacagatgaaagcatttgttttctctatgtatttccaggcgtagatgttgctcttttcgagtgatagcgataataattccttttccctggttagttccctttgggcggtgcgctttcttttagactctctgacatagagaagtagcggatagatgatgaaaaagcaaatggaagagagagccagaacaatgatacaaataaaaagaggcttgtacttggcttggaaaggtatcttgattacaatataatcttgtggatgttcttcaacttcaatattggtttctgttttctgaatatcttggggttcagcgtactggggttctaccgcatgcatctttgtaaataggacaaagaagatcagaataatcgaaactcttttcagtagctgatagcgttttttcatagctgaagaataactcattttgcaaatgtacatgaatatttttaattcttgcacaaataaataaaaatgtgagaattaactcgttttatgtccgaatagcagattctgttcatcttaaaaaaagactattttaatgtaaatcttatttttttattttatatactgatttttcgcaattcacggcttagccagatagtaacattggtggtcgtataaatgtccatcgtaggttaactcggcctgatggagagtgccttcatagataaaaccgtggcgtttcaaaaccttttgcgagcgctcgttatggggatagcaatttgcggtgatgaggtttagttggagggtgttgaatccgtaatcgagaacagattgcaccgcttccgtcatgtaaccctttccccaatgggattcatcgagccagtatcccagcatgcgtgcttgcgggttttcacgcttgggatctggaatgatgccgactgaaccgatcaaacgtccgtcttcttttagggtgatagcccatattccggactgggatataaatacagaacgaaggatttcttgtgattcttctaaggatccgtgaggtttccagccggcattgtttcctatattcggattctggcaacattcgaagaaggcttccgcatcactttcccggaaagggcgtaatagtagccgttccgtttcaatcggagcatccggttcattactggtttcttccttcctgtatacacattccactcgattgccatccggatcgagtatgacgctttcgaaatatccatcgcccgaagtccgcggttcgccggctatggtatacccatcgctacggagttgttcagtagtgcggagaacgtcttctttgctttggaaagagagagcaaagtgcgtgagtcccaacttgttctcttctatcggagtgttttgcacatctgtgcggctcattaattctaatgccgcgccatcatcaaaataaatgaaataggactcgaaaccctttttcggattgatgtatttttcattgcttgttccgttaaagtagcggatataaaactctctcaattcttccaggcgaaaagtccagatggcgatatgatgtattttcatgcgatataatagtttgaatatctgttctttgtagttaattaaaaactacttttcatgcaaatataatgattattccttataaaagcctacctttgcgccctaattaaaagaaatgatgacatttaaacagatgaatatttcggagccggtgtgccgtgcgctccttgaaaaaaactattctactcctactcttatacaagaacaagccataccggaagccctgactgggcgtgatctattaggactggctcaaaccggaaccggtaaaacggcggcatttgccatacctatcatagaacaattgcttgccgaccccacatctcagcagaaaggtgctccacgtaagattcgtgctcttattcttactccaacgcgtgagttggcaattcagattgatgaatcgctggcagactatacacgatataccacgttgcgccataccgttattttcggtggggtaaagcagaagtcgcaaaccgatgaattgcgtgccggaacggatatcctgacggctactcccggtcgtttgctcgatctgatgtcacaaggatttatccgcctcgaccatgtgcggcacttcgtgcttgacgaagctgaccgtatgctcgatatgggattcatccatgatgtaaagcgcttgttgcctaagctcccgcccaagaagcaaaccttgttcttttcggctactatgcctgatagtattgaccgtctggctaaaagtttattgcgcaatccggcgagggtggaagtcactccggcatccagcgtagtggaaataatcagtcagtccgtctatcgtgtggaaaagcctcagaagaaggaattgctggcacaactattactcggagaggccggacaccaggtacttgtattttcccgtaccaaacatggggcggataatatagcacgttatttatcacgtcgtggcatcacttgtgaaagtatccatggagataagtcacaaaattcccgccagcgtgcattgagtaatttcaaggaaggtcgttccaatgtaattatcgctacggatattgcggcacgcggtattgatatcaaaggtttggatttggttctcaactacgatttgcccgatgtgccggaaacttatgtccatcgtatcggacgtacggggcgtgcgggttgcgagggacgtgccattgccttttgttcgggtgaggaagtgccgatgttgcgtgagatagagaaacttacaggtatcaaactggagcaacggaaacatgatttaccgcctttggaggagacgaaaacaactccggttgccaatgttgcacgaaaggtacaagcgaaagcaccggcagagaagcaacaaagcaagcagaacaataagaggcgggagagtagaaagcctgccgaacccttgaagaatactcagcaagcaacggttgttgctgaaaagcccaaacgtcataatcgtccggcgaaaccaaaattggtccgcgaaccgcaacaaaagcaatcggcggataaaacggagcaagcatccagtcgttcggcaaagttgcgttcgcgttatgaaaattatgaatgattggctatagtttatctaaacatttaaagttgtatttcttaataaatgaacttgtaaaataaattagcttttatgcttcttattttgttcgaaaagaagaaaaaaggtgatagttaagtacatagaaaatcttttttattcttttaaaagtttgtatattagcgccttgaagatactcgaaaatgtattttatttttgttttaagtgtctctaaccctaaggtgtaaaaagtaatatgatcgaaaagaacaagagtttaagtgtatttctccttcatttcttagagcgtttaaatggatgtgaatccattgaaaagaaaatcacggaatcattgacggatatttgtactttctataagtttaaaaaaggatttgtctatcagaccgatggttttcgctatttcttcctgaaagaaaccattggaaatgaagaccattctctgaagcctcgctttgagatgagtgaaatgaccaaaatacattccgatcgtatgaaggtcaagaaccgtcctttttatgccagtagaaacgatgacaattccttagtcgatattgacgttcttgattttcataaaacagattccttgctggtccgtcaatttgaagatagtgaaggaaagattatcggttttataggatttgcggatagggagaatacaactcctttcacggatgaggaattgcaaaccattcatctattgctggggtcgctttccaaagaaatagccgttcgtgagtataaagaacgggaagtgcgggcaagcaatacgctgggtagcatcatgaacaatatgggagtcgacatttatgtgaactcttttgattctcatgatatgttgtatgccaatgcgtctatggcagctccgtatggtggcattaagcattttgaaggaaagaagtgctggcaggccctttataccgataaaacgggcgaatgtgagttttgtcctaaaagacacctgatcgacgaaaacggtctacctactaaagtttattcctgggactaccaacgcccgttcgatcaatgttggtttcgtgtattcagtgcggcatttccctggatagacggtcagatggcacatgtcattaccagcgtcgatatcgatcatcagaaaaagatagaagaagaattgataatagccaaggataaggccgaaaatctggatcgcttgaagtccgcctttctggctaacatgagtcatgagattcgtactccgttgaattccatagttggtttcgcaagtatgcttgttgaggaggaagataaagaagagcgtcagggctatattgaaatcatgcaagagaatacggaattgctcttacaattgatatccgacattctcgatttatccaagatagaggcgggaacgctcgatttcaacatgggatatttgaatatcagggacttctgtgaagatatattgcgtggttatgaaattaaggaagataagcctgtaccggttgtgctggcttccggtctgcccgattatcgtatctatacggataagaaacgtctgatgcaggtcatcaccaactttataaataatgctctgaaattcaccagtaaggggcagatcactctggagtaccattttaaagagggtaccaatgaaatagagttctcggttacggatacgggtatcggcatcgcaccggatgcggtggggcaggttttcgaccgatttgtgaaactgaacacattctccaagggcaccggcttagggttgtccatctgccggagtatcgtggagcaccttggtggtacgattggcgccgaatcggaagtaggggtcgggagtcgtttctggtttacgcatccttgcgcggaatcggcctgattatggagtagtctattatttataaactaaatttataagctaatgagaaacaaaacgtggaagtatctggttgttacatctgcaatattcgtgttatcagcttgtggcggaggcacaaaaaagcaagtaaatgaggatgtaagtatggatagtgtaaatgtggtgtgcgatggcctgaagacattggaactggatgaagtgaaagttacctggatacaggataatgcgaaagagcgcctgatggaaagaacgcttttcgcggatgctgacgatagtctgatagagagtttgaaactacaaagcggaataccttcgtccatgagtgcttttctggtagaaacgggtggaatccgaatcctgttcgatacgggtatgggagcaccggatagccgtttgctatcgggcttggcttctttgggagttaccccttccgatattaaatatttgtatctcacccatttccatggcgatcacatcggtggaatgatgagaggggatagtgttgtgtttcctgatgctgaagtgtatgcatcgaaagtggaatatgatgcctggctcaagatgcctgccgacaggaatgcgcaagtgttgaaaacgatgaatgcttataaagaccgtttgcatctgtttgagttcggagaaacattgccgggcaatgtcgttgcgatgaatgctgagggacatactcccgggcataccgtgttccaggcgaacaaattgttggtgattgccgatcttatccatggagctgcccttcagttggagcatcccgaaatctgcgctacgtatgatatggatagggagaaggcggtgaaatcacgtaagtatttccttcaatatgccaaagacaatggtttgacgatggcaggtatgcatttgccggctccggcattcaaatagtattttccaaattggtattaacagggggtgtttcttcaccctcttttgatttttccaaagttttcggacgcttcataggcgagggcttctttccgtatttacgttctttttcccaagcggctttccgggcttggtatgcttcgtattgtttttctaaataattgtcggccataatgtaatcgtttaaaataaagatgcttatcgttgggtaggcaatgagaactcttgccagtcgtactcctgtccggtttcatcggctacggcaacgcgtatgatgacttctcccgtctttatccgttctccggcattgatgctggcggtatatttcacaccttcatgaggcttaatctgctctatcatgaccgagggtgaaatatagatacgcttcatgcccgtgatttcggccactaccggtactacgttgaaagctgttctgtttccttcgtttatgatttcgaagatcactttacaattttcgcctgagttgattgtatggtcgcgattggcgtcaatgaaacgtatattatgtattctcagattctcgatagctgatgaatattggggttggggtctggaaggttgagtcctttctacccggtagctatattcttctgtctgcttgggggcggtagcggcatttgcgatggctgctccggcgatggttccgacgatggtaccaatggcggaaccccggtagccacctctccatcctctgttgctttcgccaatgaggcctccgatggcgcctcccacatttcctccgatggatgctccggccaacaccgctcccgggtcacctgccgccatacgattggtaccacatccgctacatagcatggctaatgctaatattcctatgaaatatgtagtaattcgtttcttcatatctgaattcggttttgagtatatctgcattaagtaccgtaaaggtagggataatttctcgtttgctgaaatactatcttaattatttcactgataaggtattgtataatatactgcttctttattttatgaaaaactaactaaaaatttgtctaaatcaaatatccggtatacttttgcgccccgataaatacagaaggttttctgcatggataattaacacgaactaaatgtggatttctgggatatagagatgactataatggaagcagcgctaatcattgagttttactattcctacaaattctcctacaattctaaaatcctcagcattttcttcattgatgattattggattataattggggttttggggttcaagtgctatttcttcgtgcatccaatttccattttcattgtactttttcttactaatgtatgttttaatagaatagcctcccgcatagttggcatcgtaaaaattatgatgttgtgctaatactattttaccttgccggctacctgccgggtttgatctgaatacacaataatctccatcgtgtatggtaggttccattgaatgaccaactgcttgtactacatacatatttcggtttagttttcccattccttctactcttatccaaccgagttcatctacaatttctccttctccgaaataaccgcaagcagcttttgctgagtaaagtggaagaaaatctatatatttaacgtcattattgatttctggttctatgcgaatttcttttttctctttatgtaaaggttgtaattggttcatgaagtgttctgctatagctggatcgcaaaaatatacataacaaccttttgagcctcttgtcattaaagtcctataagtattctttatgatttcatcggcatcttgtagggcttgttctttgtgagtttttaataacgatttaaagccttttacagattggtcatgcttagaacgttgagtgacatcagtaacaatcctgttattcttatatatcatatctttgcctacaatgaccccaatataatcaagttctaatccctgacaagtatggatacatcctatttcattgacggagtcatctcctataatccagagatttttatcagaatttaggttccatctttttttgaaattatgttctgggattactatatcgaaatgggttggatcttttttgctattccaatcccagcaatatcccgctacgactcttgcccgattatttattttattttttgcttttatcgtttcgaataattcgtttggactcgaaaatattctaaagtcataatcctctgacgaaagacggatgttagccgtttctgttatttgtagtgtattatctagccagctaagataaccatctgatccgttacaacggaattgtgaacttaatttgaccgagtatgtaatggcatcacaggagtgtgcaaatttttcaatatttctttgagaaccaatatccttgatatgtaccttttgcctatcatcaacaaagaaaacggaaaacttagccgcatgaattatttcaagaatttggttttctccaagattactatataaaccacttttcatgtttagtcgatgggcttcatcgacaataagggcatcaaagatattttcctgagtatctatgaaactaccacttcccacaaatagattatttataaagcctttccgaaaactaccactgagtttaacggtatagacatctcttggtgcggcattcttggatacatattgggctaccaacccttccttggttagttgtgtcaagagatttatagcaacaacacttttaccggttccagggcctccctttactatcaagacctgtttcttaccggtaactgaatcccgcgccatttttagagcggtttcatacactaccttctgatcatctagcaaaacaaattcttgattaccatgtaacatcgaatctaaagtatctgccagttgcttagaaggtcttaactttcctttatcaatgagccaaataatatcatccttagcgccaaatttaatacgttgtttaataaaatcctgtaatttctgggcatcgttttttaagaatacaggtgctttgcgtatatactctgtgtagcatatgtcagtaatgacattgtctggctgataattatgcaagaaagcacaaggagagagcattatttcttgttctctgattgtttcattgtaatttgtcaacatataggcgtaagaccaagcttggtatgatggatgggcaacttcgctttctccatgttgaaaccgagtcttgataattcctgatttattggacaactgggcttgctcccattgtttaagctctatgatgacaatatttcctttttgtttctcatctaatccggaaataataaagtcaatgcgttttgaagtcaatggaatttggtattcgattgcaatgcttgaagtgtctgggatgtctggggtattgattaccttatacatatgcatcatcgagtttttccatgataacacttcattgggggaagtatgtcttccaagatgtgtcacaaaggcatgatctatttcatctgcaatatttccattgaagacatcttttataaatccttttttagaagcatggtaaacgatcataattcagtatattttttagcatttcctttagccttatttatcgggtacttttcggcgtttttcgtaagttttgttaatattatttctttgatatctaaatcgtatttatgtgcgataagaaatgcataattcattatatcagctaattcttcttttattttattgatatcggccttttcagcttctttccataaaaaggcttcattcaattctgaggcttctattgaaagtgccaatgccaaatcttttccattatggaactgatcccagtctctttcttgtgtgaatgagactatttgctccataacttcttgtatgtcagatttattagtcttcatcaattatatgatttatgggaaacgtgttacaatttgattctgctacaaaggtataaagaatttgcccaaacctttttcttttcacctaattaattctacctttgttttcataaacctaaaaaaccggtaagtcatgaaatacaaactattagttcttgatgtagacggaactctgctcgatagtgagaagaaaatcagcaagcgcacactggccgctttgttgaaagtgcaacagatgggtgtacgcatcgtattagcttccggcaggcccacctatggccttatgcccattgccaaggctttggaactgggcaattacggaggcttcatcctctcctacaatggcgggcaaattatcaatgctcaaagtggcgaactactctttgagcgtaggataaaccccgaaatgctgccctatcttgaaaaaaaatcccgtaagaacgggttcgccatttttacgtatcacgaagataccatcatcaccgactcgcccgaaaacgagcacatacgccgcgaagccgagctgaatggcctgaagataattgccgaaaccgaattctcgatagcggtggactttgccccttgcaagtgcatgctggtaagcgatgacgaagaagccctcgtgggactggaagaccactggcgccgaaggttgaacggagcgctggatgtatttcgttcggaaccctattttctggaagtggtgccctgctccattgataaatccaatacgctgggcgccttgcttgaaaagttaggcatcaactccgaagaagtcatcgccattggcgacggagtttgcgatgtctccatgatacaatccgccggactgggcatcgccatgggaaacgcccaagactcggtgaaggtctgtgccgaccgcatcaccgcctccaacgatgaagatggcgtggccgaagccgtagagaaggcgatacttgccgaaatccgccccgctgacgtgcccctggagcaactcaaccagcgtgcccgccatgcattgatgggaaatctgggcatacaatacacttacgcctccgaagacagggtagaggccaccatgcccgtggacgaacgtacccgccaacctttcggcatcctgcacggaggtgccagcctggcattggccgaaaccgtggccggactgggttccatgatactttgcaagccggacgaaatagtggtcggcatgcaagtcagcggaaaccatatctcctccgcccatgagggggatacggtaagggcggtggcgaccatcgtgcataaaggccgctcctcgcatgtgtggaatgtggatgtgtttacttccacggccaagctggtgtcttcggtgcgtgtagtcaatagcatactgaaaaagggatgatcgaaaatgaattggacaacgggccacaagaaccacccgttgaatccgctaagaagaacaatacccggaccctcgtaaaaagaacacttgcgattgccggtttagccttggttgtatattttttgtactccatcgttcacctgtttgtttcgcccgaccgcaacattcagcaaatctacctggtgcccgaagacgcggcatttatcatccagtcctcggcgcccatcgacgattgggcaaagttcagcggaagcgcaacctggcaatgtctgaagcgggcgaaagcctttgaggacgtcacccggaatgtggaaacgctcgacaccgtggtccgaagcaataaaatgttgttatcgcttgtgggcaaacgggatatgctcatctcaatccataaagtccgtgcccgcgattgggatttcctgattgtgctggacatgcaaaaggcctccaagatggacttgttgaaggatcagcttgaaatggtgctcaccatggcgggcagttccgtaaccaaccggatgcacaacgggattaacatcctcgaaatgcgcgatccggatacacgcgatattttttattgcgccttcgtggacaaccattttgtaggttcctatacctccaaacttgtagaatcggccatcgactcacgcaacaagcccaaaatcggtctcgatcattcttttatcgaagccgaaaaactggtgtccggcaaaggacttgtccgcgtttttatcaattatgcccgcctgccccaattcctgaatatttatctgggaaccgggaacgagtacatcgatatgttcagcaattccatggattttgccggactctatttcaataccgaccacaaacggatggaggtgaaaggatataccttgcggaaagataccgccgatccgtacatcatggccttgctgaactcgggtaagcaccggatgaaagcccacgaaatcctgtccggacggacggcactctataccaatatcggttttagcaatccggtgacatttgtaaaggaactggagaatgcactcgcagtccacgacccgcaatggtgcgaatcttataggagttcccggaagaagattgaaaacctgttcgacatctctctggaagaaaacttcctgagctggatgtcgggagaatttgccatcacccaatctgagccggggctgttggggcacgatccggaactgattctggccatcggcgccaaaagcatcaaggacgcccgtaagaatatggagtttatagaaaagaagatcaggcgacgcaccccgctccggataaagacggttgattataagggatttgaaatcaactatgtggaaatgaaaggcttcttccgtttgttcttcggagggctgttcgacaagttcgaaaaaccctattacacgtacgtggacgattatgtggtgtttagcaacaaagcctcgtccctgctctcatttgtagaagattacgatcagaagaacctgttgaaggataatccgggctttaaaaatgccttctcgtacctgaattcgagctctaccgttttcttatatacagatgtacataagttttattaccagttgaagcctatgatgaatgccgttacgtggggagagatacaatcggacaaggagattgtctactcatttccctattggaccatgcagattacgggagacggccagtccgcctcgttgcaatgcgtgatggactataaaccttatcaaccggaagaagcggccgaagcggtggtagtggacgatgaagccgacgaagtaatgaacgaagatgccgaaacggagaaagagcaaatgagtgaattgcaacgcttctatgttgagaaatttgagggcaacgtcttgcgggagttttatcccgaaggagcgctgaagagtgaagcggaagtgaaagagggaaagcgccacggacgctatcgcgaatattatgagaacggcaaactgaaactccgcggaaaatacggaaataacatacccaaaggcacatggaagtactatacggaggagggagagtttgaacggaaagagaagtattaaaaaagagaaaaacaatgcttgcatatacctatattgaacacggaaaatttgaacttatagaaaaaccgaaacccaggttgaaagacccccgcgacgccattgtccgcgtgacgctcggtagcatctgcaccagcgatttgcacatcaagcacggtagcgtgccgcgtgccttgcccggaaccacggtggggcacgaaatggtaggcatcgtggagcaagtgggcgcggatgtcacttccatcaggcccggcgacagggttacggtgaacgtagaaaccttttgtggcgaatgcttcttttgccgacacggatatgtgaacaattgcaccgatgccaatggtggttgggcactgggttgccgcatcgacggaggtcaggccgagtacgtccgcgtgccttatgccaaccagggattgaaccgcattccggatgcggtgagcgacgaacaagcgctctttgtgggcgacgtgcttgccacgggcttttgggcggctcgcatatcggagattaccgaagaagacacggtgcttatcatcggcgctggtcctaccggaatctgtaccctgctttgcgtgatgctcaagcaaccccgtcgcatcatcgtttgtgagaaatctcctgaaagaatacgccttgtgcgtgaacattatccggacgtacaggtggtgaagccggaggattgtcgggagattgtgttgcggagtagcgatcatggcggagccgacgtcgtgctcgaggtggcaggaaccgacgacaccttccgtctggcgtgggagtgtgcacgccccaatgccatcgtcaccgtggtggccctctacgatcatccccaggtgcttcccctgcccgatatgtacggaaaaaacctgaccttcaagaccggtggcgtggacgggtgcgattgcgccgagatacttcgcctgatcgaagaaggcaagatagacaccacgccgcttatcacacaccgcttcccgttgaatgagattgaggaggcttatcggatttttgaaaataaactggacggggtgatgaaagttgcggtgtccgaaagagaaaagaaaggaataagagtgattaggggttagtgataagtgattaacgccattcggtatacagtccccgcatcatttgttatgtctccggtacaaaaaatccactgaaatcatataccgaatggtgctaatcacttatcactaaaccctaatcactttatccatacccttattaaaaagaatacagccttatgcccattattgaaatatcctccttgtcgcaccccggaatcgaggtgttctccaccctcaccgaggcccagttgcgcaaccgcatcgagcccgataaaggcctgttcatagccgaaagcccgaaggtgatccgtgtagcattggatgccggatatgaacctctggccctcttgtgcgagcaaaaacacatcaccggtgatgccgccgacatcatcagtcgttgcggcgacgtgcccgtctatacgggcggacgggagttactcgccacgctgacgggctatgtcctgacgcgtggagtattgtgcgccatgcgtcgccccgcgccccgcacggtggaagacacatgtcgggatgcccggcgcatcgtcgtcatcgacggtgtggtggacactacgaatattggtgccatttttcgttcggcggccggcctcgggatggatgccgtgttgctgacgcgtaactcttgcgatccgttgaaccgtcgtgcggtcagggtgtccatgggttcggtctttttggttccctggacgtggctggacggcactctcggtgatctggcccgccacggcttccgcaccgccgccatggcacttacggacgattctatttccattgccgatcctgtcttgacgtccgaaccccggctggcaattgtgatgggaacggagggagaggggcttccacccgatacgattgccgcggcggactatgtagtccgtatcccgatggcgcatggggttgattcgctcaatgtggcggccgccgccgccgtggcgttctggcaacttagggctacggattaaaactattcttgtcttaatttcgatatggataatcttcggatgtataaagaattacttgcggataaatattcctaaggaaggaattccatgtggctgttggatgtgtagagaggaagagtatgaccttaaggaatataaaagagaaacttggtgcattatcaaagaatgagccaatagattaaaataccattcctcgctctttctataagcgtgaaatggtattttgttattcagtgcgtaatgttgggaattcttgtttttttattgataatttattataggttacttaccgatgcagcatacatagctgcctgaatgatagattattgcaaattaatcggtagaaaagttgtttttgagcctcctggacttgtctttaaggctgtattacactctttttccaatgaatcagaactatgaggaagtattgcatcctcaatgaagttcacctgtttcctatcggttacaaaggtacaaaatttagggatgttttcgtcgataatgtcaactaaatgcaagatattttcacggatattgtatgctgaccaaaagagaaatattcagttgaagcctttttttcttttcttcccctctgtttgacttgactttattgcccgtgtatataataacggccattaaagtcaagttgagagtggagttatatctttttcttttggcaagcaaaaattctgttattggaaattttcgaataactgaaagtgttaagccacaacatatcatataatatgcaaacaggcgtatttttgtttactatatgatatattgaggctttaaagcgtattgctgattagcttacgcatttcacaagacaaggtacttacctgaatcaaaaccattggcgatatgttcgttttcaaaaacatatcccatttgattgcacacgaccttcgtaccgtctatttcagcatcaatattggtgtgggaatgtccgtaaatccacgcatcaatgcgattgtcggttataagctggttcaaatcggtagcaaatgcactattcaacactgaacctttatggtaaggtgcaacgacctccaatgtgggaagatgatgcgttattaccacaatgtgtttggcggtggtttccaccagacttt

SEQ ID NO: 6345 - DNA, 294 bp, Unknown
  gut microbiota DNA sequence
agctataagctggttcaaatcggtagcaaatgcactattcaacactgaacctttatggtaaggtgcaatgacctccaatgtgggaagatgatgcgttattaccacaatgtgtttggcggtggtttccaccagactttgtttgatgaaatccaaacagaagctgtgcatctgattgaactcctctgtttggagcaatttgccattatacattatctgccgaaagtcattcatgcctttccacacaaaatactcgtcaggtggaggtatttgagaccacaaagtgctaatgataaa

SEQ ID NO: 6346 - DNA, 473 bp, Unknown
  gut microbiota DNA sequence
aaaatccaaacagaagctgtgcatctgattaaactcctctgtttggagcaatttgccattatacattatctgccgaaagtcgttcatgcctttccacacaaaatactcgtcaggtggaggtatttgagaccacaaagtgctaatgataaagtcggtgtcatctatccgcagtacttgattctgataatatcctacattgttcttgaacaaccatttccattgcaatcccttgtccatcacatcacaataattgtaatactcatggtttcctggcacaatgagcacttgccgataatttgcagatgcccatttccaaaaattgctcaaaggtgcaaccttgtttttcaaatagaatatatttccggcaagaactagaacatcacccgttacaggcaattcattatgcttcaaccacctgctgttgtcactgaactccaaatgcaggtcgctcatatattgtatcttcataatct

SEQ ID NO: 6347 - DNA, 14502 bp, Unknown
  gut microbiota DNA sequence
cctagcgtagtaaaagaaggtttggctaaagacgaagcagaatcattgaagaaaacattggaagaagctggagctgaagttgaacttaaataacattagcctgtaaatcaggtaattcggttaagaacccttctgaagagggttcttaacctttttgtgtatatatttaaaattaagttctacaaatccattaacagatgtcttcaaatactgtaaaccaaagaattaattttgcttcgactaaaaatccacttgaatatccggattttttggaagtacaattgaagtcattcaaagactttttacaactggataccccacccgaaaagcgtaagaacgagggactgtataaagtatttgctgaaaacttccccattgccgatacaagaaacaattttgttcttgagtttttggactactatattgatccgccgcgttatactattgatgattgtatagagcgagggcttacttatagtgtgcctttgaaagcaaaattgaaattatactgtacagatcccgatcatgaggattttgatacagttattcaggacgtattccttggtcctattccttatatgacggataaggcgactttcgtcatcaacggtgcggaacgtgttgttgtatcccagcttcaccgttctccaggcgtattcttcggtcagagcgtacatgctaatggtaccaaactttattctgcccgtatcatcccgttcaaaggttcttggattgagtttgctactgatattaacaacgtcatgtatgcgtacatcgaccgtaaaaagaagttgcccgttactactttgttgagagctatcggttttgagaatgataaggatattcttgaaattttcaatctggccgaagatattaaagtcaataagactaatcttaagagagtgttgggacgtaaattggcggctcgtgttttgaaaacatggattgaggattttgtagacgaagataccggtgaagtagtttctattgaacgtaacgaagttgtgatcgatcgtgaaactgtgatcgaaccggaacatgttgatattatcttagagtcgggtgttcagaacattcttgtacacaaggaagagccgaatcagtctgactattctattatatataacacgctccagaaagacccgagtaactcggagaaggaagctgtattgtatatctatcgccagttgcgtaatgcagaccctgccgatgatgccagtgcacgtgaggttatcaataacctgttcttctctgaaaagagatatgacttgggtaatgtaggtcgctacagaattaacaagaagttgaatctgacgactgatatggatgtgcgtgttcttacgaaggaagatattattgaaatcattaagtacttgatcgagttgattaactcgaaggccgatgtggatgatattgaccatttgagtaaccgtcgtgtacgtactgtaggagagcaattgtctaatcagtttgctgttggtttggctcgtatgtcgcgtacgattcgtgaacgtatgaacgtacgcgataatgaagtgtttactccgattgatttgatcaacgccaagactatttcttccgtaatcaattcattcttcggaacgaatgctttgtcgcagtttatggaccagacgaatccgttggctgaaattacgcacaaacgtcgtatgtctgctcttggtcctggtggtttgtctcgtgagcgtgccggatttgaggtacgtgacgttcactacactcactatggtcgtctttgtccaattgaaacgccggaaggtccgaacattggtttgatttcttctttgtgcgtgttcgctaagatcaatgtacttggtttcattgaaactccatatcgtaaggttgaaaacggtaaggttgacctttctgatgaagggttggcatatttgactgcggaagaagaggaagctaagattattgctcaaggtaatgcaccgttgaatgatgatggtactttcatccgcgataaagtaaaagctcgtcaggatgctgactatccggtggtaactccggatgaagtagagttgatggacgtttctccccagcagattgcttcaatcgctgcatctctgattcctttcttggaacatgatgatgctaaccgtgcgttgatggggtcaaacatgatgcgccaggcagttcctttgttgaagagtgaagctcctattgtaggtacaggcatcgaacgtcagttggttcgcgactctcgtacgcagattaccgctgaaggtgatggcgtaatcgaatttgtggacgctactgttattcgtattttgtatgatcgtacggaggacgaagaatttgtaagcttcgaaccggcattgaaggaataccgtattccgaagtggcgtcgtacgaatcaaaatatgacgattgaccttcgtcctatttgtgaaattggtcagcgtgtaacgaaaggccagattttgacagaaggatattctacggaaaaaggtgagttggctttgggtaaaaacttgttggttgcttacatgccgtggaaaggttacaactatgaggatgctatcgtattgaacgaacgtgtggttcgtgaagatatattgacttcaattcatgtagaagaatattcgctggaggttcgtgaaacgaaacgcggtatggaagaattaacttccgatattccgaatgtgagtgaagaagctactaaagatttggacgaaaatggtattgtacgtgtgggcgctcgcatccagccaggtgatatcttgattggtaagattacaccgaaaggtgagtctgatccgtcaccggaggaaaaattgcttcgtgcaattttcggcgataaggcaggtgatgtgaaagatgcttctttgaaagcttctccttctttgaaaggcgttgttatcgataagcgtttgttctcacgtgtaatcaagagtcgtagttccaaattggctgataaggctttgttgccgaagattgatgatgagtttgatgcgaaggttgctgatttaagaggtgtcttaattagaaaactgttgaagttgactgaaaaccatgtatcagagggtgtgaaagactatatgggtgctgatattatttcaaaaggtgccaaattctctccttctgatttcggtgatttggattttacttcaattcaattgagcaattggacgaatgatgatcgtatcaacggcatgattcgtgatttggtgatgaacttcatcaagaaatataaagaactggatgccgaactgaaacgtaagaagtttgctatcactattggtgatgaacttcctgccggtattattcagatggcgaaagtttatattgctaagaaacgtaagattggtgtaggtgataagatggcaggtcgtcacggtaacaagggtattgtttcccgcgttgttcgtcaggaagatatgccattcctcgctgatggtactccggtagatattgtattgaatccgttgggtgtgccttctcgtatgaacatcggtcagatattcgaagctgtattaggtcgtgctggtaagaatttgggtgttaagtttgcaactcctatttttgacggtgctacattggatgacttgaatgagtggactgataaggctggtttgccacgttatggtaaaacaaagttgtatgatggggggacgggtgaaccgtttgaccaacatgctacggttggtgttacctatatgttgaagctggggcacatggttgaagataagatgcatgcacgttctattggtccgtactctttgattactcaacaaccgttgggtggtaaggcacaattcggtggccagcgttttggagaaatggaggtttgggcgcttgaagcatttggtgctgcgcacatcctgcaggaaattttgactatcaaatccgatgacgttgtaggtcgttctaaagcttatgaagcaattgtgaagggtgaaccgatgccgcaacccggtattcctgaatcgctcaatgtattgttgcatgagttgagaggtttgggccttagcatcaacctggaataaatctaaaattaatagttgggagtgatgacctatttgctcccagctattaattctcaatattcaattgtcaattttcaattatatataataaagtatggcttttagaaaagataacaagataaagagtaatttctcgaagatctctattgggttggcttctccggaagaaatccttgagaattcgagtggtgaagttttaaagcctgaaactatcaactatcgtacgtataagcctgaacgtgacggtttgttctgtgaacgtatttttggtcctatcaaggattatgaatgccattgcggtaaatataaacgtatccgttataaaggtattgtctgcgaccgttgtggtgtggaagtgacagagaaaaaagtacgtcgtgagcgtatgggacacattcagctggttgtgccggtagctcatatttggtatttccgttcacttcctaataaaattggttatttgctgggactgcctacaaagaaacttgattctattatttattatgagcgttatgtggtaatccaggctggtgtgatggctggtgagattgctgaatatgacttgctctcggaagaagaatatttggatttgatggagaagttgccgaaagacaatcaattcctagaagattcagatcctaataagttcatagctaggatgggtgccgaagccatttatgacttgctggctcgtctagatttggatgcattgtcttatgatttgcgtcaccgtgctggcaacgatgcttctcaacagcgtaagaatgaggctttaaagcgtctccaagttgttgaatcattccgtgcatctcgcggacgtaataagccggaatggatgattgtacgtatcgtaccagtcatccctcccgaacttcgtccgttggttccattggatggtggtcgttttgccacttctgacttgaatgatctttatcgccgcgtaattattcgtaacaatcgtctgaaaagactgattgagataaaggctcctgaagtaattttgcgtaatgaaaagcgtatgttacaggaagcggttgactcgttgttcgacaattcacgtaagtctagtgcagtaaaaacggatgctaaccgtcctttgaaatctctttccgatagtttgaaaggtaagcagggacgtttccgtcagaacttgttgggtaaacgtgttgactactctgcgcgttcggttatcgttgtaggtccggaactgaaaatgggggaatgtggtattcctaaattgatggcagctgaactgtacaaaccgttcattatacgtaagttgattgaacgtggtattgtaaagaccgtgaagagtgccaagaagattgtagatcgcaaagaagctgttatctgggatattctggaacatgtaatgaaaggtcatccagtactgttgaatcgtgcgccgacattgcaccgtttgggtattcaggcattccagcctaagatgattgaaggaaaagctattcagttgcacccgttggcatgtacggctttcaatgctgactttgatggtgaccagatggctgttcacttgccgttgagtaatgaagctgttttggaggctcagatgttgatgcttcaatctcataatattttgaatccggcaaatggtgctcctattactgtgccttctcaggatatggttcttggtttgtactacattactaaattacgtaagggggcaaaaggcgaaggcttgatattctatggtccggaagaagctttgattgcttacaatgagggtaaagttgatattcatgctccgatcagcgttgttgtgaaggatgtagacgagaatgggaatgttgttgatgtaatgatgcatgacacttcagtaggtcgtgtaattgttaacgaaattgttccccctgaagctggttatatcaataccattatttctaaaaaatcacttcgtgatattattagtgatgtaattaaggtatgtggtgtggctaaagcagctgatttccttgatggcatcaagaatttaggttatcaaatggcctttaagggtggtttgtcatttaacttgggtgatattatcatcccggaacaaaaagaggcattggtacagaaaggttatgatgaagttgagcaagttatcaacaactataacatgggtttcattactaacaatgaacgttataatcaggtaattgatatttggacacatgttaactctgagttgtctaatatattgatgaagaccatttcgagtgatgaccaaggattcaatgctgtatatatgatgctggattctggtgcccgtggttctaaagagcagatccgtcagttgtctggtatgcgtggtttgatggcaaaaccgcagaaggcaggtgcagaaggtggacagattattgaaaacccgattctttcaaactttaaagaggggctttcggtgttggagtactttatctctacccatggtgcccgtaaaggtttggcggatacagcgttgaagacggctgatgccggatatttaactcgtcgtctggttgacgtatctcatgatgtgattattaatgaagaagactgcggcacactccgtgggttggtttgtacagacttgaaaaataatgatgaaatcattgctacgctgtatgaacgcatccttggtcgtgtatctgtacatgatattgttcatcctacaacaggtgaattgttggttgccggtggtgaagaaataacagaagaagtagctaagaagatacaggattctccgatagaaagtgttgaaatacgttcggtattaacttgtgaatcgaagaagggtgtttgtgcgaaatgctatggacgtaaccttgcaacaagtcagatggttcagagaggtgaggctgttggtgtaattgctgcacagtctatcggtgagccgggtacacagttgacgttgcgtactttccatgccggtggtacggctgctaatattgcagctaatgcaagtatcatggctaagaatccggcgcgtctggaattcgaagaacttcgtactgtagatgttgtggatgaagctggtgaacctgcaaaagttgtggtaggccgtttggctgaagtacgttttgtagatgtaaatactgggattgttctttctactcataatgtgccttatggttctacactttatgctgctgatggcgaagtcgtagaaaaaggtaaaatgattgcccgttgggatccgtttaacgctgttattataacggaagctacaggtaagattgagtttgaaggcgtaattgaaaatattacttataaagtagagtctgacgagtctaccggtttgcgtgaaatcatcattattgagtccaaggataagacgaaagttccgactgctcatatcatgacagaggatggcgaactgattcgtacgtataatctccctgtgggtggtcacgtagtagtggaaaacggacaaaaagtgaaagctggtgaggttattgtgaagatacctcgtgccgttggtaaagccggtgatatcacgggtggtcttccgcgtgtaactgagttgttcgaagctcgtaatccgtctaatcctgctgttgtttctgaaatcgatggcgaggttacaatgggtaaggtgaagcgtggtaaccgcgaaattgttgtgacttctaaaacaggtgaggttaagaagtatctggtaccgttatctaaacagattctggttcaagagaatgactatgtgcgagccggtactccgttgtctgatggtgctataactccagctgatattcttgctattaaggggcctacggctgtgcaggaatatatcgtgaacgaagtgcaggatgtataccgtttgcagggtgtgaagattaatgataaacactttgagatcattgttcgtcagatgatgcgtaaagttcaaattgatgagcctggcgatacacgcttcttggaacaacaggtagtggacaagttggagttcatggaagaaaacgatcgtatctggggcaagaaagttgtggttgatgctggtgattcccagaatctgcaaccaggtcagattgtaaccgcccgtaagttgcgtgatgaaaatagtatgttgaaacgtcgcgacttaaaacctgttgaagtacgtgatgctgtccctgcaacttctactcagattcttcagggtattacgcgtgcagctctgcaaacttcaagctttatgtctgctgcttcattccaggagactactaaggtcttgaacgaggctgctatcaacggtaaggttgataaattggaaggtatgaaggagaacgttatttgtggtcatttgatacccgcaggtactggtcaacgtgagtttgaaaagattattgttggctccaaagaagagtatgaccgtatccttgctaacaagaagacagtattggattacaattcaatggatgttgaagaataagatgtaataaatacagtcagttgattattaaataggaaagaggagatatcttgtataggatgtctcctcttttgtttttggaataaaatattattcttacctttgaatactcaaaagcttaatcgtaaaacgaaaatggaaaacagagaaatgaataatcagttacaaatagaactgaaagaagatgttgcgcaaggtacgtatgctaatttagctgtgatcacacattccagttctgaatttatagtagattttgtgcgtgtaatgccgggaatgcctaaagctagtgtgaagtctcgtattgtactggctccggaacatgcaaagagattattgcgtgctttggaagaaaatataggtaaatatgaacgtacatttggctccatcagattgttggatgaacaatcaattccacctatgacgaacctcaaaggggaggcctaaaatcaaaaaaaaacttgtagtgcattgattattcaaatattattcgtatttttgcagcccaaaagtgtatagctacgaaattaatataacaataatatataattaaaaacaattaaaatgcctacaattcagcaattagtaagaaaaggacgcgaggtgttggtggagaaaagtaagtcaccggctcttgattcatgtcctcaaagacgtggcgtttgcgtgagagtgtatacaaccactccgaaaaaaccgaattctgcaatgcgtaaagttgcgcgtgtacgtttgaccaatggtaaagaggtgaactcttacattccgggagaaggacataacttgcaggaacactctattgtattagtacgtggtggtcgtgtaaaagaccttccgggtgtacgttatcacattgttcgtggtacattggatactgcgggtgttgcaggtcgtactcaaagacgttctaaatacggatctaaacgtccgaaaccgggacaacaggctgcaccggctaagaagaaaaaataaatagtagccttacactgtaaacagttaaattaaaagtaataacttacgttttagtttattggaaatgctaaaggttgagtaaattctccggagggagagttgaagaagtcaagaagtaaacaaccaagaacgaaaaacattattctttcaaacaaatgagaaaagcaaaaccgaaaaaacgcgttatcctgccggatcccgtgtttaatgatcaaaaggtttcaaaattcgtaaaccatctgatgtatgacggaaagaagaatacctcttatgaaatcttctatgccgctctggaaacagtaaaaacaaaacttcctaacgaagaaaaatctgcccttgaaatttggaaaaaggcattggataatgtaactccgcaggttgaagttaagtctcgtcgtgtaggtggtgctacattccaggttcctactgaaatccgcccggaccgtaaagagtcagtttctatgaagaacttgatcctttttgctcgcaagcgtggtggaaaatcaatggctgataaattggccgctgagattatggatgcgtataatgaacaaggtggtgctttcaaacgtaaagaagatatgcacagaatggctgaagccaaccgtgcatttgctcatttcagattctaatactataagaataaccgatagattaaaaacttaaagtaaaaggaattaaaaaatggctaagcaagatttacatttgacgcgtaatattggtatcatggctcacattgatgccggaaaaacaacaacctctgaacgtatcctgttttatacgggtttgactcacaaaattggagaagtacatgatggtgctgctacaatggactggatggcgcaggaacaggaacgtggtattaccattacttctgctgctactacaactcgttggaaatatgcaggtgatacttataaaatcaacttgattgatactccgggacacgttgacttcactgctgaagtagagcgctctttgcgtattttggatggtgctgttgctgcatattgtgcagtgggtggtgttgaaccgcagtctgagactgtatggcgtcaggctgataagtacaatgtgccgcgtattgcttatgtgaacaaaatggaccgttctggtgctgacttttttgaggtcgttcgccagatgaaagccgttttgggcgctaatccttgcccaattgttattcctataggtgctgaagagtctttcaaaggtctggttgaccttatcaagatgaaagctatctattggcatgacgaaactatgggcgctgactacactgtagaggaaatccctgctaatctagttgacgaagctaacgaatggagagataagatgctcgaaaaggtggcagagtttgacgatgctttgatggagaaatatttcgatgatccttctactattacagaagaagaagtgctgagagctcttcgtaatgctactgtacagatggctgtagttccgatgttgtgtggttcttcattcaagaataaaggtgtacagacactgcttgactatgtttgcgcattcttgccttctccattggatactgaaaatgtagttggaacaaatcctgagacaggtgctgaggaagatcgtaagcccagcgatgatgaaaagacttctgcattggcatttaagattgctactgacccgtatgtaggtcgtttgacattcttccgtgtttactctggtaagattgaagcaggttcttatatctataattctcgttctggtaaaaaagaacgtgtatctcgtctgttccagatgcactcaaacaagcagaatccggttgaagtaatcggtgctggtgatattggtgcaggtgttggatttaaggatattcatacaggtgatacattgtgtgatgaaaatgccccgattgtattggagtctatggatttcccggaaccggttattggtattgctgtagaaccgaagactcagaaggatatggacaaactgtctaacggtttggctaaattggctgaagaagatccgacgtttactgtgaagactgacgaacaaacaggtcagactgttatctctggtatgggtgagcttcacttggatatcattattgaccgtctgaaacgtgagtttaaagtagaatgtaatcagggtaaacctcaggtaaattacaaggaggctatcacgaagacagttaatttgcgtgaagtttataagaaacaatctggtggacgtggtaaatttgcggatattatcgtaaatattggccctgtagatgaggactttactcaaggcggcttgcagtttatagatgaagtaaaaggtggtaatattcctaaagaatttattccgtctgttcagaaaggctttactactgcaatgaagaatggtgtgttggctggttatcctttggattcactgaaggttactttgcttgatggttctttccaccctgttgactctgatcagttatcattcgaaatctgtgctatccaggcgtataaaagtgcctgtgctaaggcaggtcctgtacttatggagcctattatgaaactggaagttgtaactccggaagaaaacatgggtgatgtaatcggtgacttgaataagcgccgtggtcaggttgaaggtatggaatccagtcgttcaggtgctcgtatcgtgaaggcaatggttccgttggcagaaatgtttggttatgtaacagcgttgcgtacaatcacttctggtcgagctacttcatcaatggtttattctcatcatgctcaagtttctaactctattgctaaggcagtgttggaagaggtcaaagggcgtgttgatttgatctaaaaatgttaaagtccgtaggctagcgaatgactcttagcctacggaattttatcttacttataatattaataattaatcaaactaatgagtcagaaaattagaattaaattgaaatcttacgaccacaacttggttgacaaatcagctgagaagattgtaagaacggtgaaggcaacgggtgctatcgttagcggtccgattcctctccctacgcataagcgtatttttaccgtgaatcgttcgactttcgttaataagaagtcacgtgaacaatttgaactctcttcttataagagattgatcgacatctatagctcaacagctaagactgtagatgctctgatgaagttggagttaccgagtggtgtggaagtagaaatcaaagtttagtatttaaattttaagtgaaatgccaggattattaggaaaaaaaatcggaatgacatccgttttcagtgccgagggtaagaatgtaccatgcactgttatcgaagcaggtccttgtgttgttactcaagttaagagtgtcgaaaaagatggctatgcagctgttcagttgggcttccaggataagaaggagaagcatacgactaaaccgttgatgggtcactttaagaaggctggagtaactcccaagaaacacttggctgagttcaaagaatttgaaacagagttaaatctgggtgatactgttaccgtagaattgttcaatgatgtaacgttcgttgatgttatcggaacttctaaaggtaagggttttcaaggtgtagttaaaagacatggttttggtggtgtaggtcaggctacgcacggtcaacacaaccgtgctcgtaagccgggttctattggtgcctgttcataccctgcaaaagtattcaaaggaatgcgtatgggtggtcaacttggcggcgacagagtgactgttcaaaacttacaggtattaaaggttcttccggatcacaacctccttttgattaagggttctgttcccggttgcaaaggttcaatcgtaataattgaaaaataatggaagttaacgtatataacattaaaggtgaagacactgggagaaagattacgttaaacgagtctatcttcggaattgagcccaacgaccatgctatctatttagacgtaaaacaatttatggctaatcagcgtcagggtacacataaatcaaaagaaagaagtgagataagtggttctactcgtaaaatcggtcgtcagaaaggcggtggtggtgcacgtcgtggtgatatgaattcaccggtacttgttggtggtgctcgtgctttcggtcctaaacctagagattactacttcaagttgaataaaaaagtaaagacattagctcgtaagtcagctttggcatataaagctcagaacaatgcagttgttattgtagaagactttaattttgaagctccgaaaacgaaagattttgttgctatgacaaaaaatcttaaagtttctgacaaaaagctgcttgtaattttaccagaagcaaataaaaacgtatatttgtcggctcgtaatgtggaaagtgcaaatgtacagacagtctcaggattaaatacttacagagtattgaatgctggggttgttgtgtttactgaaagcgctctttcggctattgacaatatcttaatgtaaaaaggaggcttaaataatgggaattattattaaaccgttagtaacagagaaaatgacagcaattactgataaggcgaacaaccgtttcggctttattgtgcgtcctgatgctaacaaactggaaattaagagtgaagttgaagccttatataacgttacggtagttgatgtgaatacggttaagtatgcaggcaaaaataaaagccgttatacaaaagctggtatcatcaatggtcgtacgagtgcttataaaaaagcaatcgttacgttgaaagaaggagatactattgatttttatagcaatatttaaaagaaatggcagtacgtaaatttaagcccacaacaccggggcaaagacataaaattattggtacctttgaggaaattactgcgcgggtaccagaaaaatctcttgtttatggcaagaagtcttcaggtggtcgtaacagcgaaggtaagatgactatgcgctacatcggtggtggtcataagaagattatcagaattgtagatttcaagagaaataaggacggtgtgcctgcagtggttaaaacaatagaatatgacccgaatcgttcggctcgtattgctttgttgttttatgcagatggagaaaaaagatatataattgctcccaatggattgcaagtaggtgcgactttgatgtcaggtgaaaatgca

SEQ ID NO: 6348 - DNA, 102353 bp, Unknown
  gut microbiota DNA sequence
actgatggctgcggaagctgcttgcgaactgggtgataatacaagtgcaagaagatatcttgagatggtacgtgcccgtgcccgtggtacgaatgctaatatcttgccggaggttaccactgataatcagagtgaattgcgggaagctattcgtcatgaacgccgtgttgagttgggtatggaattcgatcgcttctatgatcttgtacgttggggaatagcgaaggaagtgctgcatgcagccggaaagaccggttaccaggataagcatgcattgttgcctttgcctcaggacgaaattgacaaatcaaatggcgtgttagttcaaaaccctaattattaattcatatagtaatgaccatgaaaagatatattaatttattgttggcattttgtgtgtcagcactcactttgcaatcttgttttcaggatatggatcatccggcttttgattatccggatagttctgctcccaaagtgttctcaccaatgaaattgttcttgccttttgagaatgatatgcgtgataagggtaattacaccttcctcatgagtgccggaggggatattacttatactgatggaatcaacggacaagcttatcaaggtacaaaagatacgtatctgttagcccgtgttccttcttatctgaccgattctatacccgatttaggaagttgtacggtggctttctggatgaaaacaacgagaaatacttccgcatatggtgtcttcagtattcctaataccaagactttctggggtaactttgatatctatctggaaaatacaagtagtgagacccaggctttcttcaagatgcatctgtataactgtacatccgtgaaggacaatgatgagagatgggtagaagctaagatagacaatgtctttggtaccgaatgggttcatatggcatttgtttatgatggtagtaattcgacagtaacagtttaccggaatggtgaaagtgcatttacaaaagagctgcccggttatggaaagcttaaatttaaagatttgggtacatttgctatcggagcatttcagtttagcacaaaacccagtttgacagaaggtgcaggagcacagagttgggcatccaattttccgggacagttagaccagttccgcttctatgacagagctatatctgcttctgatatcaaacaactttattcaggtaaagaatgatgaccgttagaaatagagtgaatatgagagctgtttattttatactgtccttattactgatttcttgcagtaaagatgatgcttcggaagcacccggaaaatttgaactgcaaagtatatccattggtgaaaaacaggatcagagttcctttgaaaatgtagctcccaatgccagtattgtgcttacattcacagatgcagtggatgaagctacgattcagagtaatatcatattgaaactgaatgatcaggcggtggcatatgattcaaaactacagggaaaggataaactctcattgactccaacaggtggttttaaaagtttttcctcatataaactggtgatcaatccgggggtgaaatccacctccggagtatctcttaccaatggcaaagtctatgaaatccgtacagggatggatgattcggataagtttgatcgcattcctgacgaggatttattaactttggtgcagaaacaaacttttaagtatttctggaacttcggtcatgcacattccggtatggcatgcgaaagaacaacttccggtgatgttgttactaccggaggaacaggatttggagtgatggcgatgctggtagcggctgaaagaggatttgtaacccgacaggaagctcttgaaagagtgcagaagattgtaactttcctggataaagagtgtacgagttatcatggagcctatgcacactggattaacggtgcaactggtgagacaaagccatttggtgataaagatgatggtgcggatctggtagaaacctctttacttttccagggactacttgcagcacgtgcatacttcaaggacggttcggaagctgagagtaaattgtgttctgatataacccgcctgtgggaagctattgaatggacttggtttcagaaaagtggagagtctgttctgtattggcattggagcccgaactatggatttgagaagaatctcccgatcagaggttggaatgagtgcctgataacttatgtgcttgcagcttcttctcctacttatcctatcgataaggcggtttatgaagctggatgggcaaggaatggcggtttgaagaatggtaatacctactatggatacaagcttccgctgggagctgataagggtggaccgttattcttatctcaatattccttcttgggcattaatccgaaaggactgaaagatcaatatgctgattattgggaacagaatcaaaaccatactctgatcaattataattattgtaaggagaatcctaagggatatgctggttatggagcctcttgttgggggctgacagctagtgatggtgataatggttattcggcacattcacctacaaatgataaaggagtgattgctcctacggctgcattgtctgcatttccttatactccggaagagtcgatgtctgcattgcacttttactattataagatgggtgataaactctggagagattatggttttgtagatgctttcaacctgacagctaattggtatgataaccagtgtatagctatagaccagggaccgatcatttgtatgatagaaaattataggacaggaatgctttggaatttattcatggctattccggaaattcagcagggaatgaaaaagttaggctttgaaagccctgcactaaactgataaatagaatatatgatgagacttataatatatgtgatgcttctgctttacccgtttagcctgctgccggcagcttctggtggtaagaaggagaagaacttgtctgatgaagaactgatgaccctcgtgcagaaacagactttccgttatttctgggattatggacatccggtttcgggcttggcacgcgaacgtagtaacggtaatgacgatattgttaccattggtggttccggttttggggtaatggctattattgtcggtgcagaacgtggatttgtaacgcgtgaacaagcggcagagcgtatgctgaaaatagtcagctttctgaatgataagaatacggacagttaccatggcatttgggcgcactggataaatgggcagaatggagaaaccatttctttcagccggaaagatgatggtgctgatctggtagagtctgctttcatgttcgaagggttgctggctgcacatcagtatttcaacaaagataatcaggtggaaagacgtatccgtggtcttattaatgacctgtggcgtcaggctgaatggaattggtttactaaaggtggtgaggatgtactctattggcattggtcacccaataacggttggtcgatgaaccatcagataaaagggcataatgagtgccatattacgtatatacttgctgcttcttcacccacttatcccattgcagagtcggtatatcataaagggtgggctaattctatcgttttcaagaatggtaagaagtattacgacataaccttgccattgggaagtgattatggcggacctttgttctttacccattattcttatatgggacttgatccgcgtggtttgaaagattattatgctgattatgaagaacagatgaaagcacataccctgattaatcgtgcttattgcatagataatccgaaggggtataaagggtatggagaacagtgctggggactgacagccagtgatggtgataaaggttactctgcgcattgtcctggtaatgaccgcggtgttattaccccaacagctgccttgtcgtctattccttatgcaccggaatattcgttgcaagccatgcgctatttctatgaagagcttggcgataagctttggggagaatatggtttcaaggatgcatttaacctgactgctgactggtttgcgccatcttatctggctatagatcagggacctattgttgttatgatagaaaattatcgtacaggtttaatttggaaattgtttatgagtcatccggatgtacaaaaaggattgaagaagttaggatttaaaacaccatacttaaattaaaaaggttacataattatgaaaaacatgttttttaatagtgtattagttgctttcgttctgcttgttgcttcgtgcagcaagcagccggaagctaaggttgatgtgatgtcattcaatattcgtctggatcatgtagcggatagtttgaacaactggaaatatcgtaaagatgctgcagcacaaatgattacttattatgctccggatgtagtaggtatgcaggaagtattaaagaaccagttggacgacctgaagaaccgccttccgcaatatacggttttaggtgtggggcgtgccgatggaaaagaaaaaggggaatactgttccctgttctataagaccgatcgtttcgatcttgtgaagagtgggaatttcggtttgagtgaaacacccgattctattggaataaaaggctgggatgctgcttgcgaacgcattgtgacgtgggctgtttttaaagataaagtcagtggtaaagaattggctgcttttaatacacatttcgaccatattggtaaggttgcccgtcgtgaaagtgcagttttgttgctttcaaagatacgtgagatagcctcggacttaccggtggttattacgggagattttaatggtactgttgattcagacccgatttctgttcttacggaagggggtatgcagaatacttattccacatctaacgtagtctatggtcctgcgtggagtttccatgattttgggcgaattccggttgaagaacgccagttgatcgactttatttttgtcaatggacaggtggtagccaataaattcagagtgatagcagacaagccggacaatggctatttatccgaccatgcacctattctggctaatctgacaattcgatagtgccatgacttctaaattatccttggggcttgtcatcttaccttttgtgccttcctccattctgcaaggtcaagagcaggaagtctgtaacgaacgccccaatatcatctttattatgagtgatgaccatgcccgtcaggctatgagtatttatggtcatcctatagggaaagtggcaccgactccaaatattgaccgtatcgggcatgaaggagcagttttccagaataactattgttgcaattctatttccgggccgagccgtgctgccatacttacgggtaaacatagccataagaatggtttcatgaagaactgggcgaaaggttttgacggtacgcaacaaacccttccgaagatattacaggcaaatggttacgagacagctgttattggtaagtggcatcttatttctaagcctacaggtttcgatcattggatgattctggatgatcagggagaatattgtaatcctcattttattactgaaaatgataccacacgtcatttgggatatgtgacggatttgattactaagtacacggaagaatggctcgacggacggaaagacaagaacaaacctttctttctgatgatgcatcacaaagctgttcatagaaactgggtacccgcagaaagacattaccatctgtatgagcatactacttttccacttcctgataattattttgatgtttatgagggtcgttatgcggcacagatgcaaaagatgaatatctattgtgacatgtacgaaggacacgatctgaagatggttaccggtatggatagtgacagtttactgttcgacccttggccgcatgcttttctggggacaatggagccggatgaacgccgccgctttcttgatgcataccgtgatagaaataatgaattccactccagaaaacgttcattcaaagaagttgcggaatggaaataccagcgttacctgcaagattatatgggagttgtagcgagtgtagacgaaagtgtgggagagattcttgattatctgaaacgtaccggactggataaaaatacgattgtagtctatactaccgatcagggcttctacttgggagaacatggttggtttgataagcgtttcatgtacgaagaatctttcggtatgccgatggttatgcgctggcccggacatatcaagccggaaactcaggtaacaggactgacgcagaacatagactttgctcctacttttctggatatgtgcggtatcgaagtaccacgggatatgcagggggtatcgttccgggagttggtagagacgggaaagaaaccgcgtgattggcgtaaatcgctctattatcattattatgaatttcccggatttcatagtgtccgtgcccattatggtgtaaagatggaacgctacaaattaatgcacttctatgtggaagacaaatgggaactgtatgatctgaaaactgatccgacagaaatgcacaatctgtacggaaagcaaggaatggagaaagtaactgctgaactaatggaagaacttgcacgtttacaaaaacaatatgaagttcctcagaatttgtacaaataatataaagaacgaaagaatgaaacatctgctattgactatagtctgcctgattgcgtggactactcttccggcgcaggatatgcgtcaggatacatattgtaatcccttgaatatagattatacctatatgatttataattccgaccgggatatttcttaccgttcgggggccgatccggcagtagtggaatttcgcggggaatattatatgttcgtaacgcgctcgcatggctattggcgctccagggatttattgaactgggagtttgtacgtcccggtaagaattggtatcctcagggatgtaatgctccggctgcacacaattataaggactctgtgctttatgttgcaggcgatccttcaggttctatgagcatcctttataccgatgatcctgcttccggtgattggaaagctacgcctgccattctgcataatctgcaagatcctgatttgtttattgatgacgatgggaaagcttatatgttctggggatcttccaatgtttaccctatccggggtatggaattggataaaaatcaccgttttacaaagaaaggggagacgaaagaacttttcaatctggatatgcctaaacatggttgggagcgtttcggtgagaatcatacagatacagtattgggcggttacattgaaggaccctggttgacaaaacataatggtaaatactatatgcaatacggtgcgccgggtacggaattcaatgtttatgcggacggagtatacgtagcagatcatccgatgggaccttatacctatcagaaacataatccggtatcttataaaccgggtggttatatgaatggtgccgggcatggaagcactgtgcttggtcccggtggacagtattggcattttgcttcgatgtctctttccatcaacgtgaactgggaacgtcgtctctgcatgtttcctgctggattcgataaagatggtgttatgtatgtggatacccgttttggagattatccccgttatgctcctgccgtgccgggtaaggcaggacagttcagagggtggatgttgctctcttacggcaagccggttaccgcttctactgtgaaaggagagtttcaaccttctgcattgactgatgaactgactaaaacattctggttggctgaggctaacgatgaacgccaatgggtaatgatcgatctggaaaaaccggctgctgtatctgctattcagatcaactatcatgattaccaaagtaatatgtatggtcgttatgaagggcttcgtcaccgctatgtgattgagggttcactggatggacagaattggaaaatattggttgaccgcaaagaaagttataaagataccccgaatgattatgttgaactcggacaatcccaatctgcgcgttatatccgctataagaacatagatgtaccgaccccgaacttggcaatttctgaacttcgggtatttggattgggtatggggaaaacaccgcaacagccgaagaaattaacccttgatcgccacgcggaccgtcgtgatattactatcagttgggaaccggtcaaaggtgcacagggatataatgtgttatggggtattgctcccgataaactttatagctcttggatggtatatggaaataatgaattacttatgaaatctcttaccatcgatcaggattattacttctgtgtggaagcatttaatgagaatggtgtatctttacgttcagaagtgaaacatgtaaaataacaatgctatgaaacgattaatcagtgcaatttgtgttcttttcttcctgttacctttgtctgctcaggaaacctaccagaaagaaacctttatctcctcccggggagataccttgcagtatcgcttgctgcaaccggagaacatgaaaaaaagtgagaagtatcctttggtgctctttctgcatggtgcaggggagcgtggtaatgataatgagaggcaattgacccatggtggacagatgtttttgaatccggtgaaccgggagaaatacccggcattcgtgctcgcaccacagtgtcccgaaacgggctattgggcatactcggcacgtcctgaatcatttttgccgaatgagatgccgttgaacgaaccgataactccgatttttcagacagtgaaggatttgctggatacttatctggcaatgcctcaggttgataaatcgcgtatttatatcattggactttctatgggaggaatgggaacctttgacatggctgtccgtttcccggagatatttgctgctgctgtgcctatttgcggtacagtaaatgtggcgcgcctgaaagctgtcaagtctgtaaagtttcgtattttccacggtgatgctgacaatgtggttacacctgaaggttcgcgtgcggcatacaggactttgaagaaggaaggtgctgatgtggaatacattgagtttccgggatgtaatcatggtagctggaatccggctttcaattatcccgactttatgagttggctgttcagtcagaagaaatagtttaaagaaaaatggcaagtagatttatcctgcttgccatttttctttaaactatttttcttcataatccccgttagctttaatcagctcaatcagcttttctacagcttcttcttcgggaatattcttttcaatgcattctttcttcttatacagactgattttcccacgtccggcacctacgtagccatagtcagcatcagccatttctccgggaccattgacgatgcagcccataatacctattttcaatcctttcaggtgtgaagtagcggcttttacacgtgctatggtgctttgaaggtcgaacagggtacgtccgcatccggggcaggagatatattccgttttgctggtgcgtatacgtcctgcttgcagaataccaaaggctgtggcatctactacggcatgagtgagatttccctggttgaacaggaaaataccatcgcaaagaccgtcgaagataagtgctcccatgtcggcagcagattttatctgcaagtcctctgcttcattttcagcatagtgctggaagaatacaaccggatttttcagtccttcctgcatcaactggtgaactaaagcacgatgttccccaagtcggttaggatggttgctctgtgatataatgactacttcaggatgatatttcagacaagcaatcacttcttccgtttgtgccatgtaaggcataaacatgaatttcaaatcggcttggcaattgcccataagtggcatctgctggtaattgaaagccggataggttccaggctcttcttcccatacatccgcatccaggatgtattccactccttcttcacgagtttccggtaaggcacgtccggcgtagatataatccggaatgaattgcgggttcgtatcaaattttccgtccatgcgttcggcaatgactacaggcaggtgattcccacctatgttgcgtacggcagttgtctcacgtcgtaccggagaaagatagttgaaaccttctgcttccactccgggtatgtaagggtgatcttggtgctgcatgatgtaatccaccaactttcgtgctacaggtatttctgcttccggagcttcgctcaaagaaacgcggatggtatcacccaggccgtcggctagcaatgcaccgatgcccaatgcagacttgatacgtccgtcctcaccatccccggcttctgtaacgccaaggtgcaacgggaattgcattccttccttttccattacagcagctaacaagcgaaccgtttttaccattactactgtattggaggctttgatggagataacaacatctgtaaagtcttcttttacacagatgcgcaggaactccatgcatgattccaccataccttccggtgtatcgccgtagcgagacataatgcggtcggacagtgagccatgatttacaccgatgcggatagctgtatgattctccttgcagatattcaggaaaggaacgaatcggtcatgtattttctgcaactcttgtgcatactcttcgtctgtatattccagatgcttgaaggtgcgtgcggcatctacatagtttcccggattgatacgcactttctcgacatactgtgctgctacatctgctacctttgggttgaagtggatgtcggcaaccagtggaaccatatatccgtcccggcgcaaaccggcattgatgttcatcaggttttccgcttctttaatgccttgtgctgtcagacgtacatattcacctccggcatctacaatacgtttagcctgtgccacgctggcttctgtatcctgtgtggcggtgtttgtcatactctgtatgcgtataggattggagccgcccataggggtggctccaatatttacttctgatgtttcccgacgggaatagttgaataaatccactaattactcctttttaattcgttttatactcgtactttacttctttcagctcctcgttcgcctttacgattttctttttcagcccttctttgtaggctgcaaaagtttcagcgagatcggcatcgcttaaagctagcatttgtatagcaagaatggcagcgttcatagcaccattgatggcaactgtggctacagggattccgggaggcatctgaatgatagagtagagagcatctacgccatccagcacagaacctttaacgggaactccgatgacaggtagtgtagtgttagcagcgatgactccgggcagagcggcggccatgccggcggctgcgattatcactttaacgccgcgtccgcgggcgttctttgcaaaatcctctacagcttccggagtgcggtgtgcagaaagagcgttcatttcgaacggtacatgtaaatcattcagcagttgagcggccttttccataacaggaaggtcggaggtgctgcccatgatgatgcttactaatggagacataattatttagttattagtgtttagtgattagtgattagcaaacttctcaatatcaatgctaatcactaaccactaatagttaatcgttaatcaacgctttgtaggcagcagcatccagtaatgaatcgaaatctgcatcagcatccggtttcattttgatgagccagccttcaccgtacggatctttgttaaccagttccggttggtcagcaagagcctcgttttgctccaggatttctccgcctacgggcaagaaaagatcagaaatggttttcactacttcaatggtcccgaatacttcgtcggctgccaatgtttcaccctctgcttggatatctacgaatacgatatcgcctaattgtgcctgggcgtaatcggtgatacctacataagctacatcgccttcaaggcgtatccactcgtgttctttggtgtactttacattttctgggaaattcatgatcattatttttaaaggttaatacttatataattacaaattactaattataaattgcaatgtgagccctttttacttctcttaaaaaaggaaaatacggaacaggatattactcagtggatgaagcactaataaagagcaaattaatcctacggcaaaacctaccagtacctctcccaatgtatgatgctgtaaaataatacgtgctgtgcccaggacacctgcaatcaggatgaacaggcatagccaccataccggattgtatccgaacaaggcactgaaagataccagccctcctacaatagcccctacacctgccatgtgctcgcttaacttccatttcagattgacaacaatgcagataaccatcatgatcaatgcagcaagaataatccccgtcatgtaccaagggatattcaggcggtgcatcatcaccaggcagaatacgtatgaagtaatagtaagcaagaatggcataaagcgccgcttacgttcacccaagtcttcgggactgaaaccattgattttacggaacaggaagatggtgagcgtaggcataagaatagtgaagcagtacactactccaagcacaatcagcttatactgtataggcatgatgcgcaggtacgagaaaaggaacagaatcagaaacgccaggaatggaatggaaaacggcgtgaatatagccgatatcacccgggctgtccggattaaggtcctgtctgctacaatatgttgttcttccatgaatagagttctcaaattaataattacttcctcagtcttgccaccggtatgttcaactgttgcctgtacttggctaccgtgcggcgtgctataggatatcctttttctttcagtatatccgtcagttcatcatctgtataaggtttctttttatcttcattgtcaatgcattctttcaatatcttacgaatctcacgtacagacatttcctcaccgtcttcggtgacgtatccatcactgaagaagaatttcagtgaatagatgccatagttggtttgcacatatttgctgttgctgacgcgggagatggttgaaatgtctaatccggtacgttcggcaacatccttcaatatcatagggcgcaacaatgattcgtctccttcgaggaagaacgggcgttgcaggtcgataatggcttgcatggtagtcattaatgtattctggcgttgcttcacggcatcaataaagccttgtgctgcatccatcttctgcttcaggaacatcatggcttctttcgattctttcgactggttagccctgtttttggtatgctcttccaccatctcggtgaaatcacggctcatacgcagttccggaacgttccggttgttcagagccagattgatggtaccgtcatcgtatgtatctacaatgaagtcggggatgatctgttgcatgttccggccgatggcttcacccagagaggcacccggacgcggattgagtttgcagatctctttgatagcctgttcaaaagcatcttcttccagtccgagcttctgctgtatcttgtcccaatgcttacgggtaaattcttcgtaacattcggagatgatcgcttcttctatataaagtagagggttcggggtgaagtgctgttgctctatcttgcgatgaatctgaatgagcaggcattcttgcaggttgcgtgcaccgagtccggcgggatcaaagtcctggatgatcttcagtgcctcttccaattcttcctgggtgcattcgatgccggcgtagatggcgagttcatcacagatgctatccagagacttacgtaacaggccgtcgtcatctaatgatccgatcagatattccgccagttcacgctgatgctcggtcaggtcacgttcgcttagttgctcctttagggtttcgtaaaaagaagtggcgtcggagaaaggtatttcttcggcctgttcacctttgctacggttgttttcctgcaatttgtagtcggggatatcgtcttcgctcaaatagtcgcttaatgaatcatattcattggctccgctgtcttctgcggaaccttccgtatcggaattttcagaaaagtcgtcacttgccgtatcttcctttccttcttccagagccggattttccagaagttccgcatgtatacggtcttccagttctacagcgggcaattccaatagcttcactaccagaatctgctggggcgacagtgtctgtacctgttgctgcgcttgagtttgtacttgtctggaaccttgtgccatacttattcttttcttttactcgccgcaaagataatgcaaacgagacagaataaaatgaactcgttcattttttatgccgaggcgcaacttatcttcacactttttgcaaaaatagtgaatagttcgggaacgcgaaatgttctcggcataagtttttcatgcaagcatgaaagattggcgcctaatttacattatctttgctaaaagtgaagataagctgtacatcagcaataaaaataggcaagcttattttgtgctgctttcggtttgcattatctttgtgcgtatcaacttaaaaaattgcaacgttatgtttgataaagaaacttatgtgcagcgcagagccctgctgaaaaaaaatattggctccggagtgttactattcttgggaaatgacgaacaaggactgaattatgaagataatgctttccgttatcgtcaggattctactttcctctactatttcggcttgtcgtttgccggactttccgctatcattgacatcgatgaggacaaagaaatcattttcggagacgaactgactatcgatcatattgtatggatgggtacgcagccgactctgaaagagaagagtgaacgggtaggcattcgggagacgcttccttccgtcgcgattatcagctatctgcacaaagccgtacaaaaaggtcagacagtgcattatcttccgccttaccgtcccgaacataagctgaaactcatggattggctgggtattccgcctgcacgccaggaaggttccgtaccgtttatccgtgcggtggtggcacagcgtaattataaatctgccgaagaaattgcagaaatagaaaaagcatgtgatgtgactgccgacatgcatatcaaggcgatggaagtgattcgtccgggtatgtacgaatatgaagttgtggcagagatgaaccgtgtagccgaaatgaataattgtgaactttctttccctacaattgccacaatcaacggacagactttgcataatcattatcatggtaataaaattaaatcgggtgacttgtttctgatcgatgccggtgcggaacttccatcgggctattgtggtgatatgtcgtctactgtacctgccgataaaacgtttacttcgaagcaacgtgccgtttacgaaattcagaatgctatgcatctggaatctgtaaaggctctccgtccgggtattccttatatggaagtgtacgacttatctgcccgcgtaatggtagaaggtttgaaaggactgggtctgatgaaaggaaatgcggatgatgcagtgcgcgaaggtgctcatgcattgttctatccccacggtctgggacacatgatgggactggatgtgcatgatatggaaaatctgggcgaagtgtgggtaggctataacggtcaacccaagagcacacagttcggacgtaagtctcaacgtcttgccattcctttggaaccgggctttgtacataccgttgaaccgggtatctacttcattcccgaattgattgacatgtggaaagaaggtaagaaattcactgactttatcaattatgacaaattggaagaatatcgtgacttcggtggtattcgcaatgaagaagattatcttattacagaaaccggtgcccgccgcttaggcaagaagataccattgactccggaagaagtggaagctttgcgatagtatcaatttaagaatgagtctaatgaaaaaactactattcttattgtgtcttttgtcttggagtgcattgaatgcacagaagacgattaatcgccctccgtttatagcaaaagcaacggaaaccattgagatagctgccgttcatttatcggatacagctacagtgattgatgtggatgcaaaatttactccaaagtactggatacgtattgcccctgctacttgtctggtggcagataatggtgaacgttatcaggtgcggcagggagtaggtattgagttgggacaggaattttggatgccagaatccggagaggccactttctctttgatatttccacctttgccaccatctgtaaaatcattcgattttgtggaaggggaaggtgagagagattttaatcttttcggtatcagcctgactggaaagttgcctaagctccaattgcctaaaggtctagagaaggcaggaaaaatgactgctgtagctttgccgactcctgaaatcaaagagggaacagctatcattagtggtcgtattttggattataagccttcattccggatgaaagctgaattacattctgctgatttcttatctccctatggacaaaagaatacagagttagagttggatgaagtgggaaatttccatacggaaatatcagtctcacacccttctgtcgcctatttaagtgtgggtggatctgttgtttcttttttgttgtctccgggtggagaaaccaaggttaccgtaaatcttcgtgaaatgacgcgtgcttccagtcgtttacagaaagacacgaaggctgaagggaagaaggtttattttgaaggactgaatgcaggattgaatacggaaatgaattccggactggaaattcctctttgttctgttgagttgaaagacttatatgacatgactccggatcagtataaagcatattgcatgcggaaatatgaagaagcggacaatgtgatccgtgccaataagaaaataagtgcagcttatgcggaattgttgacggtgctgaataaagatgcattgtatggactgttatgtggatatgattatcagctattgcaggcttatgctcagcaaaaaggactgtcgttgcgtgatgccggtaaggagtatctctcaaaaaaaacgtcagatggctattttgactttttaagtaaactggattacatcaattcacccaagtctgtgtattgcttcaattattccggtatggtaagaaatactgcatacatccatttgccgtctgttaagaccgtcggtatttttgattacctgcttgactcatccaaggtaagtccggaggataaggaagcaatgaagaaataccgtgataatccttcgtcgcaggatgcttctataatgagggtgctgagagataagtatgacaacctctttcaggagtgtggcaaagtggctttggaagctaatcagaaggcggttggagagctaataggaggtaaaggtatctatcatgatgtgcagacagcaatgcaatgtgcttcaaaactggaagattttatgcctttgtctgaagacgattttgctacattacgcacgattgagaatccctatttcctgaaccaattgactgcaatgaatacggagctgcttcagaagatagaagaaaataagaagaagcgcagttttatggttcgtactctgcccgaagatgtgaaggacgatgtcctttttgaagccattgtcgatccgttcaagggtaaagtagtgcttgttgatttctgggccacctggtgcggaccttgtaagatggctatgaagatgatgaaacccatgaaggaggagctgatagataaagatatcgtgtatgtctttattgccggtgaaaattctccggagacaacatggaacaatatgatacccgatattcatggtgagcattaccggttgaccaatgctcagtgggcagctatttgtgataaattcgaagtccgtggcgtacctacttatctggtgctcgaccgtgcagggaaacaaacgtaccggtcagtaggttttccgggaacggatacggtgaaaggtgagttattgaaagcattaaattcttccgctgattgatcatatactaacgtcagttctaaaagatttcaagttgcccgtcactgataaggttgacatcaatggcgggtatacttatcagggagtttctcatattgtttttgatcttggtgatgaatggtataccgaatttctgaaattcactttgcctgtgttcctcacgttcaaccaagtaaaggaggaagaagtgaacattacgagggcttacttacagattaaggtcaatcactacccctcctatgttagaatagtgtctttatcataattgtgttttttatgcgatgattccctgatattcaatttggcatccagtacaatttttttattgagcaatctatttgtacgaatcttgtccagcatgcagcttgctgcaatctctccgatttcgacacgcggctgttctatagacgtcaaataaggttcgacgacagtggccatatccgattctgaaaagccgacaaaagcgacatcatacggtatcctcaatccgtgccgtttcaaggctttcatcgctccgatagcaacaggatcgttaaatgcaaatatagcatccggtttttcaccgtttccggacagtatatcttccatagtctgttctccatcacgaataaaaataccggaatgaatgatggtagagtctgaaatagggagattggcatcctgcatggcctctatatatccgttcatacgatctttcgttatatccaatttttctggacccgcaaaatgaaatattttccggtatccctcacctataagatgagccactgccgaataggccattttcttatcgtcaataataatttttgtagtatcaatgttggaaggcaccctgttgaaaaacacaagtggaatcccattatcctgtaggctttgatacatatcagagttgacgaaactgtcagatgtcgtggatattattataccgtctaccatgtgttgttctaaaagactcagattggtacgctctgtttcagcggattcgttggattgagtaatgaggatctgatagccctcgtgcattagtattttttgtattccggatataatcataggaaaaaaagatgtgaccaattcaggcacaacgattccgatagtataacttttctttgtgaccaacccttttgcctgcgtgttcggatgatagttcagttctgcagcagtcttgataaccagctccttggtttctttctttatttcccaactgtccgataaagctctggaaactgtggaggtggataacccgagtttttttgctatgtcttttattgtaattggcttttccataacatgaatgattgtaggtttgtctgcaaacttacaactttttagacattctgcaaaatccaaacgttcccgggaacgtttccgttgatttttgaggcattatgctattaaaattgattgtacttatataaatttgcttgcgttaaaagctattataatagcccagatcgaaacatttctcaatatattaattctaatcatttttataatgccaaagtatgttaacattaaatcgtattcaatcaagatcaggaaaacaaattgttttttttctgatgtgcctgctggtttcatttgcaggcatcatgccagtccgatcacaggaaaaaactaagatggttaccgttgaaggaactgtcgttgatgaaaccgaaactcctgtcataggagctaacgtctatatcaaaggcagtaccaaaggtgtatccacaaatgtagatggaaatttcatttttacaggagtacctgtcggacagactgtcactgtctctttcattggttacaaagattatcaggtgcgggttacaaaagggggagagaaattgagaatctctcttgaacctgatgcgaaaatgctcgaggaagtggtggtggttccatacggaggtccggtagcaagaaaggatcttaccggttccgttgtttctgtcaacgttgaggatatgaaggcgcttcaggcagtgacgtttgaaaatgctattgccggcaaggtcgccggtgtacaggtcaatgtcggggatggacagcctggaggtcttccggacattctgattaggggtagcaattctgtaacccagagcaatgctcctctttatgtggtagacggtattccactagagtctcccgataactcgtcaattcctactcagaatattaaaagtatcgagatacttaaagatgcatcggcgacagccatatatggtgcacgcggtgctaatggtgtgattgttattactaccgattccggttcaaagggcgctccgaaaattaatttcgagtaccgttatagcttgtcgaaagactataataggtatgaaatgatgtcaccttatgaatttgtcagacttcagaatgaacttgatgcggcttatggctctatgtatctcgatggtagggatcctcatccggatggaactccatggacactcgatgactataaggatgtgagacctattgactggcaagatgagatcagtcagctcggacagatgcacgaatacagcgtaagcgcatctggcggtactgagaagaccacatatatggcttcattcaattatgccaatcagaagggtatcattctcaataccggtatgaagaactatgttggcagcatgaacatcacccagaagataggcaatcgtatgcagcttgtcatgagagcgaattatgcggagaaggaaagaactggtatgcaagttaactatggacagggatcttctgcttatatgtataaagtgtggtcatacagacctatttccacaaacggtgtggacttgacccatgaacttgaagatcctgaaaggccggaaagtggagtgccgatgttcaacccattgctccagacgcaaaatactgatcagaaatatatcacaagacagttgagaaccagtgccatgttcaattggaatattctcaaatgtctgaaatttactacttcgatttcttatacgagtactgaatcccagactgatatattcaataattccaagacagaagccggaagtacacttccaggaagaaatgacggaattaacggttcgagaagagtaacaagaactaacaatgtcttgaatgagaacactttgaacttcaacaaaaagttcgataatattcatgaccttgccgtaactgtcggttgtactcagcagaaaaatgtttcggatatcttcgaagcaaaagctacacagattcctattacatcagaatggagaggaatagaggcacttgatgaagggctgtctcagaaaatcatgtccaagaagttgacagaatgggcaatacaatctttcatttttaggtcgaattacaactatgacagaaaatactatctgacgtttacgatgcgtgcggacggttcttcaaaatttgcacgtgacaataggtggggcaagttctattcaggagccgttcggtggagattctcagatgagaattttgtcaagaacaatatcggatcatggtttagcgaaggatcgcttaacttgagctatgggtctaccggcaataatggtatcggagaatacgcttatcttccgcagatgggattttcttccggagggacatattatgactattcattcaatgatgaatatcctacaacgggagcgattgtctcatcgataggtaattctaaattgaaatgggagactacatatacctttaatgctagaatggatttgggcttcttcgacaatagaatatacttgaccgccgagtattataagaaagatactaaagatcttctgatcaatgccactttgcctgcccatatcggttatggttcagcatatagaaatataggccgggtggagaacaaaggtttcgaactgtctctaaacactgttaatatgaagagaaggcattttaactggactaccgatttcaatatttcattcaacaggaacaaagtgcttgcacttgccaacaaccagagtgtgcttcctgctgataatctgaagattccgaatggggctgcattgtatattgcgaaggtgggccagcctatcggtatgatgtacggagcccttacagacggtctttatcaatatgaagatttccgtaagggaagcgatggcagctggatattgagagatgatgtagtttcacagtcaactcatgcaaacagaaagggagtctttcccggatatcagaaattcaaggatttgaatggcgatcttcagattactcaagaagacttgacgattataggtaatccgaatcctgattttacgggcggtataacaaatactttcagattctataattttgatatgtcattgttctttacattcagctacggcaatgatatccttaatatgaaccgttattatttagaagaaggcagatcattgagttccaatcagtttgcttcgtatgccgacagatggaccgtggacaatcctaacggaaaacttccgcgtgcaagatctgcaaacaatacggcttggggcagtgaccgttatgtagaggacggctcatatttgagactgaaaaatttgaatataggatatactctgcctgttcaggtgagccagaggttttttgttagcaacatgaggatttatttctctgcccagaatttgtttacggtgacgggatattcgggacaggaccctaccgtcagcacgatgtcgaatgcaagaactccaggttatgactattcggcataccctgtaccacgtacattcatatttggtgcacaaatttcgttttaatgtgatataataatttatatggatatgaataaggttattaaaagtatattgttcggaattgcattttttcctcttacaggctgtttgtctaatttggatttgcatccgatagattcggacactccgaatacatttttcaaagatagtgcggcatgcgcaaaggttttagtgggttgttatgacgctcttagcgtaccgggaggaggactttttgatggaagcatgaactctcagttcgtcatctggaatgtgacggatgaaatgtataatgcagcagccggaacaggtcctaaggtgtatagctatacttccggatatgctcctaatgctactatgtacaagaatctttatgcggcgattcagcgttgctgtcagttccttcattatcttcctgatgccaagatgacaacagaaacaaagctcgccatggaaggtgaagtgcaatttataagggcattctgttatttcaatcttgtacaaaattatggaagggttcctcttgtaacggaggcatcttcggatgttaatagtacttctgcaaagcaggcagaggaggctgatatatacgattttgtaattcgcgagatggaagaggcagagagtaaggtctttccgattaccaaatttaactttggaggaagaatcaataagtctgctgtcaggggagtgctggcaagggtctgccttttcaatgccggattcccttgctacaacactgaaaggtacaaagatgcatacaaatgggcaaagatggtcatcgacgatcctgctcacagcttgattcctaattttgcagaagcattcattccgcttattcaggacaagtatgatatacgtgaaaatctatgggagatagaagcgtattgtaaaagtacgtctgacggactgaaagaatattttccttcattgtcgacctcgcttggtaccaattgcagcaaagctgtagcaaatgtgtcctttatggttaataatacaatgaagatcaccaaaagaatgttttcatattatgagcaggatactgaggcattgttaggctcttatgatgaaagacgtaactgggctatcgctccgtttaccaatgcccctacgaagcttgatggtgccgatcgtcttgttcttacttatttcggctcgcataaggatcctgataatgacagattggtttatgatcgtcaggtcaacaagttcaaccgtcagtatgcaaagatttggcctgcatatcagagtaatacaggaaccaacctctgtatagtacgctattccgatgtattgcttatggcagccgaagcattgtgtcagataaataatggttcgacacctgaggctataggctatgtcaacgcggtgagaaaaagggcatacggacagatggacggtcgcaagtttattgatcatattgaacttaccaatccgggagaaaattataccattgatgaagtttgtgtggaaattgtagatgttaccgacaatactgcatctgtcacatgcacaacggaagagaacaaatctcccaaggcatatcgtgtcggagacgttaaaggtcctcttacaattgctactgccaagttgcctgagattcttggttctgacgggaaaccggacactaaagccaccagacctattgagtcaatagtattgctcgacaggggacatgcctacagtgaaactccgaaggtggtgatcaggtcactcgagggcgggaaaggtcctaagggtagcggtgctacggcaatcgcagtgatgaaggatgagagtccgtcttatgaattgcctgctgaagctacagactcaaaggaggcattccttcagactattatggatgaaagagcaagggagctatgctttgaaggctggagacgtttagacctcaaacgttggcacaatcttgtggaggtgcttcaggctacgagggatgatggcaggaatgcaaaaggagtcaatggagcgcaacttgattatatcatgactcctggcaacaatgtgtccgatgttcattattaccttccgatcccttccggagaaataatgcttaatcctgaattgaaacagaatgaaggctggtaattgtatatttaacattattaaaagtatgagacaatgaaaagaaatataattagaaacctgtttcccgctttagtcgccgctttagtcgttgtgtcctgccaagttgacaccgtgaccgaatcaactgttgtgactaggcttgaaaagaatgtatacgaagttggagagaatgttcgcttccacttctcaggagaagctgatttcgtgacgatttttaccggagttgataattataatggcggaacgatgggaggaactataaaagggtcgcgttatatctatagaaatcgcggaagggagaatggttctccagtcctgtctttcaattgtaaaaaagatggagataacttggaggagtatgccgaaatcaagcttcttctttctactgactttgacggtgacatcaccatggagggaataaaacgtgccacttggctggatatttctgaaaaagcgaaatggcctgttgaggggactaaaaaaggtgttaatgttaattccggagcaatagatttgtcagaatggaacggacgggatatctatcttgctttccgttatactgcgaaaaagggacagaaacaggaaggatatacaatctcttcattcaatcttaataatacagttgaaacggatgctcttccttatacgatatggacaaatgcttcttttgcaaaatgtggtacaactacgaataaactgcaggaagatcagaccggtgctattttccccgcttatcagtggacacttggaacatcgcttacttgtgcaggcatgcctgacggtaaggaggattttgaaagctgggtaattacttctcctgtcgatccgagccaagtgattcctgattatggtacgcttattaagtcgtacagcgaggttgttccggggttctatgattacacatattacaaaccgggtaagtttacggtgaccgtagtgtcgcgtaatgctaccgcttttggaactgaagaatctgtgcaaaatatagaaatagaaatagttgaaaaataattttctgaaaaatacatttatgaaatatttgttttctacgttactcattgcttgtgtgagtgttttgatgcccgctcagcccaaactgaatcttaatacgggcagtattgattttgaatggcaacaggaggaggatggctggcatatctcgtgtattaaaatcgacgggaagcagattcctgcccccaagggatattacacggttttgtatatagatcgtaatccggcaaaggatttggtcgatcaggatcttgagggaaaggattttacgttctatccgtcaaaagcagaaatgcttcccgatggtactctgaaattttctcacagtctccgtttcggagacgttgaagcaatatggaaggtagatccattatttccgtctgatataaaggtcgatatgaaggtcagactgtcgacgaacggttccgtatccatcgccacccctacgattaccgtcttcgaagagaacaatatatcatgggcgatgattccgggtaattggtatggcaatgaaatccagtataatctgaatatggcaaaaacttacagcatgggcattccttgtgttccgatgcttgcccaagaacgtaatacgatgactctgtgtccgctgtattcgtcgaaggatggctataccttagctgttattccagatccggggacggaaaccgacccgatagccggcaaagctccggataagagtcctaattccttgggattgagtttagcgaacaggcataatgaacttactcccgtggtttatcatccggtactcggacaggtgggagctaagcacaaagccggagatgaagtggtatttggattccgttataccttgaagaactcgggctggttcgatgtattccagcatgcagtgaacgatgttttcgctttaccatcatccttggatttgcttaccaacaaggtgtctttgtccgagcgcgtgagccggcttcagaaattcctgcgtaaagataaagagtcgagctggaaaacatggcagagcagaggtgagacaataggtgctaatggctccaagattgctgacgctggtaccatgtttatgattgcacgaaacgggcaggattccgtaatgagcagccgtcttcactatgtgaggaattataaaatgattcagcagcagacagaaccgggatatttctgcggtgccgctctcggagaatatgcggatatagacggtgtggagtcggaaaggggcaattggatagaacctttacatacgacctattatactatggtcgatttcggaaatatgcttctattcaatcctgatgacaaggaattgcttgaaaggttgaggatggcaggtgacagattgcttgcatggcagaaagatgatggaagttttgaggtcggctatgacagattttctatgaaaccgtctttcccggatcttaaggattacagaccaacctggtatggattgtacatcgcatataagcacttgaaagacaggaaataccttgatgcagcctgcaaaggtgcagactggcagcaggaaaacggagtggataaaggatattatctcggagtatgcggtgatggacgcaatatctgggatttctgtacggcacagacatctcgtgcctatatggacttgtatgaaataacgggtaacaaggcatataaacaggcgtctatagatgccgccatgatttacgcgacgtctatattcaccaatccggtaatgactgatgaaacgaaatacatcggcgagcaagcatataaagattgggagctgaatcagactggtcttggtgtggagcatatacgaggtacggcagtaaacggaccgattttgatatcaagttatgcaggtttgttcgtgaaaatgtatgaatggacggaggaaccggttttccttactatggcaagagctgcgtcaatcggaagaaatgcttttgtcgatcagaaaagcggatgcgcagtctattactggcacggaatgaatgagttgaaaaaatattccacaatgttcccgtggcatgcgtactggcagattggctggattgtggattatctgattgcggaggctggtttgcgttcggacagtaatatttcgtttccatatggctacatgactcctaaggttggcccacatgtcacatatggatttgcacccggtaatatttacggtaagaaagcggatcttctgttcagaccggatatggtcggttgcgataacccggagattgaattccttaccgctttgtcagagaacggcacgaagttatacttgattgcaatgtgtcagtctaatgacagtcagtcatgcactgtaactctggatttgtcgcagttagttgcgaataagacaggtttccgttctgctaaggctcttcagggtaaaattattagatcggcgggaaagaaagggcagatcaatcttgattttgctccatggggtatgaatgtcattgaaatttcactataaacgattttatggaacgattttttatattgttgattttagcggggctgtccgtttcgggagttgcccaaaagagtatgtggctcatagctggacagagtaatgcttccggaatgggtgatagaagaacttcgatgaaatactatagcaaagagtgtttcgactatgtacaatccggagattcgttgaaaatactgcaggacccagtaggtgagaacggcaagtatttcggcaaggcgaacagcggcagcatcagtccttcgttcgcgtggaaccttaataaaatgacaggtgattcggttgtagtggtatctgcggcgaggggaggaagtgcatgctccactacaggagagacaatctacggtacttgggcggaaaagggtgtcttgcctttgttcgatgcagcgatggctaaatgtaattctgcgattgccgttacaggattgaaattcagtggggtgatctggcttcaaggagaacgtgacgcaaatgctatcaatgatgggaaaatggacggtgaggattatgaggcggcgcttcgcaatcttatactccggttcagaaagcatcttcatgatgccgaccttcctttctatatagtcctcacaggacaatatgtcgaccgtccgcaagagggctatcatcaggttcgtgcggcacaacgcagactgtctgaaaaaatgcatggagttcatcttgtagctgcggatccttggctttttccacagatgaatatgatgacggatgacatccattacagccaatacgcatataatcttatcggggaaactatagcccgccagatttacgaagcaagaagtattgattctaaataaaatgaggaaaatgaagaaaaaagtaatagcatcgcttttggccatgtttatcggaggaattgcagtatttgcacaggatccgatggtggacaaaaagaatactgacagtaaacctccttatatctatccggaggaaagcattgtaagggaaaatatagaaaagtggcaggatatgaaattcggtatgtttatccattggggaacatacagccaatggggtatagtagagtcctggtccatttgtccggaagcatataaattctgtatggtgaggccggaaggaatgaactattttgactatgtccggaagtatgaagatttgaaaaagacattcaatcctgtaaaattcaatcctgaaaaatgggctggagcggcggagtatgctggaatgaaatatgtggtcttcacaactaagcatcatgacggattcaatatgtacgatactcagtacagcgactataaaataaccgatgtcgaatgtccgttccacacagatgcgaatgctgacattgcaaagagaattttcgatgcatttcgtggcaaaggtatgatggcaggtgcttattattccatagcagattggaacaataatgactattggtgggattatttccctcccaaagacaggaatataaattatcctcctgaaatgttcccggaaaaatggcagcgcttaaatgactttatcaacaatcagttgaatgaactgaccggaggaaagtacggtaacctcggcatgctgtggttcgacttgtgcgatgcttctcctgacaggcatccgcagtgggaaagattcgcaaagacggtaagaaccaatcagcctggaatcatgatggtggcaagacatacgaataccatctatgaaaattacaggactccggaacagaaaataccggatcgtgccttggactatccttgggaggcttgtatgactatggctactcaatggtcatacaaaccagatgatagttacaaatccacgcatgacattctgactacccttgtacagatagtttcacgtggaggaaactttctactgaatgtcggaccgggtcctgacggagaacttgctccggaggcatatcagcgacttaaggaaatcggtgactggatgcaggttaactcagagggtatccatggaacgaaagcaattgctccttacaaagaggacagaatagcgtttacttcaaaagataacaacgtatatgccttttacttgaatgccaaggatgaatatatgccgtctgtggtgaaaatcagatcattcgttccggtttctgccaaatcggtatttctgatggggcataatcgtcccctcaaatggaaaaaaactggagacggaatagaaataatcataccggagtctgtcagaaagaatcctccttgcgatttggtctggggttttaaattgaagattaaatagagtgttccgaattattgattccattttgagatgaagctttttttctttgttattttgtttgcgatgactttctgtccggtgtggcctagtgccggaaaactcccggatgttccgtccgtgctgtttcttggagtggatttccctgaagaaagtgccacctatattgaaaaccaaattgcttctgggctgaaaatactggatttgacagacagcccggaagtaacataccgctgtgtaaggggaataaaggaagccgcggagatcatatttacggaaaagacaggaagatatagagtatttgtcatacaatgcagagatttgaatactaatgagaatactttctgtaaaatccgcttgatggctgctaggcaaaataccgacatattatggatgacatccgatacggctcaaattgtttcctgtaattgtgattttgctgattatgagggcttttgttccaatcagaaaagttatgactggaagcggtgtatatcatatatcgcagatgccgtgtctcaatggtggaccggtatggcagaaggaaatagaggtattgaaaggctgcctgtatggcagggcgaaattcccgattatgaatattccgggccggaatatatcaattcaatagcgcgtatcgacaggatttccgaaccggaattggaagttttccttccccgtcagtcagagaagtctccggtggtaatctttttcccgggaggaggattgagctataccggctttatcagaaatgcgcgtgaggcggcagagctgttgaggccatatggagtagcggtaatcggtgtaaaatacagggtgaaacgtggacttgacgtggctttggaagatgcaaaacaagccgtaaggacagtcagagagaaagcctccgagtggaatatagatgaaaatgcaatcggagtagcaggacagtcggcaggtgcgctgattgtattgaggctggcttcagccgattgcccagacgccttttcgcgccctgactatgtgattccattaacgagttggtattacgggaaacagaaatggccgttcagatttgatgctgagactcctcctttttttatgcgtcatgcgactaatgacagcggttacggttttgcacttagtgtcaaggaaaaactcttggaggccggagttccattggattggaagactgtcgatgatgggggacacggagcttttgaaattactgtcgatggttatggacatgactggactgtcgaactggtagaatggatgagaaaaaataaaatattgaaaaccgataatcatgaaaaagaagttgattagattgtttattgcggtcggtcttgtcttgggggttggctcatgtgctgatgtgactgacactcctgaatattatggagtatataaggaagcgaatatagaaaatataagaccgtcttcgtggttaagagaaatattacagagacagagagacggcctcgggcttaatcgcaaggagtctggttatccttataacacatgtctgtggaatggaataatcccggagggagggaatccgatagcgaaaggttggtggccttatgaacagtcgggatatatgattgacggtctgtataggtgtggaatattcctgagagacagcgtacttatgcagctcggttccgacaatgtcggatatgtcttatcccatccccgggcgaacggaatgctaggtccggaaacccttggtgagaaccagtgggcattttctgtattcgcacggacgttgcttgcatattacgactataccgaagacgacaggattccggttctgctgaaaaaacatttttctgccttgaatgatactttgaccaacaggcagacttgtatcatagaaagtatgtgcaaaatgtattcatatacgggcgacaaggaaatcttgcagaaagccgggcatatttgggatctgttcagtatgaacgggggaacaaaagacaatgaagtgttcatccatggagatatggtctcttcaaagccgattgacgtacatggtgtgacggctgctgaagtttccaaacagccgttgattctgtatctttataccggtaggcaggaatatctcgatgccgcgcttggtttctattcttccgtggaacgggaaaacgaacttccagatgggataccggcttcatatgaaagcttgtttcctaagcatgcggaagcgctgcatgagacctgtgatatcagtgactttatatggagttacggttacatgctgatggcaaccggagatgttaagtgggcggataagatggaatcagctgtgtataatgcagccttgggagctattaataaagatttcaaggctttgcagtacttctcatctccgaatcagttattggcaactgaaaaaagttccatggctccgtatggtgaagagggcttgtcacgtcaggcttacagaccgggttttgatgttgaatgttgttccggcaatgtccacaggatgtttccgaattatatttcaaggatgtggatgaatggtgacgagcatgagatagttgccgctttgtacggtccgtcggaatataggacagaaattaatggcacaaaagtatgtataacggaagatacttcttatcctttctccgggaaaataacattcaggtttgctctcgatggtgctcctgtcagaataccgtttaccatgaggattccatcatgggtagagaatgcaaagttgacagtcaatgcagaacagccgaaagaatatcatgcaggagggttcagtacgatagaaagacgatttaaggatggggatgtcgtagagttggacatcgatatgaagccgagggcagagaaaagaactgatgccggaattaatgtatatatggggccattgctgtattctgtagatattgatgagaatgttgagatcataaaggaccagttcaaaacatctgtagcttttcctgcatataacgtgacccctgcttctaagtggaatttcggtctgcctgaaaaccctgaaataacagtggtgaacacagggaagaaaggattcccgtggacaccagattcaacacctgtcaagcttaaagtaactgcatttgaaattcctgaatggcgacttttgggtgatacgacccctgggctacctgaagagaaaattcaggtttcgtcagaatgtgaagagatagaaatggtaccgtccggatgtacaaggataagaatgacgacgcttccggtggttgaatattgtaaatgaaatttaaaattaaattagttatgagtagaattacgatgactgtattgtctgtccttattttgatatccgcgtgtacatcagaatccaaaacaggaactaacagacaattgcccgtttatcttgatgaatccaaaacgatagacgagagagtagaagatattattccacgtcttacgctggaagaaaaggtggcattatgtcatgctcagtccaaattcagttctcccggagtgcaacgactcggcattcctgagttgtggatgaatgacggaccgttcggtgtaagaagcgaagtcctttacaacagttggacaaaagcggaaactaccaatgattcctgtacggcatttccggctcttacggttcttgcatccagctggaatatggaacttgcgtctcaatacggtcaagctctcagtgaagaggcgaactatcgggagaaagacgttcagcttgctccgggagtaaatatcgcaaggacacctcttaacggaagaaacttcgagtatatgggtgaagatccttttttagtttcgaaaattgctgttccgtatatcaaagccattcaagataacggtattgctgtatgtgtaaagcactttgcacttaataatcaggagtatcagagagataccgttaatgtagaggtgtctgaaagggcactgcgagagatttatcttcctgcctttaaagctgctgtaacagaggctggtgcatggtctgtaatgggggcatataataaattcagaggacaatactgctgccacaataactatctcatcaatgatattcttaaaggggagtggaaatttgacggagcagtcatctcggactggagcggaacaaagaatgcgtatgaggctgcaatgaacggacttgatatagaaatgggaacattaaaaccatataatgagtattatatggctgattctctcctgtattttgttcgtaatggcaaagtacctatggaaaaacttgacgataaggtcagacgtgttcttaaacttaatctaagaacggcaatgaaccgcaatcgcccttggggaagttttaatacgaaagagcatactgacttggcacgccatatcgcagagcaagggatagtattgttgaaaaatcgcgataatattcttccggtagatactaaaaaatgcaggaaaatagctgtaataggggaaaatgctgtcagaactcatgccagtaatggaggtgctgctgctcttaaaccaagatatgaaattactccgcttgcgggtatcgaatcgcgttttggaaaagaagtggaagtgtcttttgcaaggggatatagtgcttatactccaatgatagacggaaggatcgcttctccggcttatgacaatatgcagttggcggtagaagcggtaaaacttgctagggaaagtgatcttgtgatatttgtgggaggtcttaatcataactggaggcaggacagcgaaggatatgacagagaatcgtacaaccttccttatggacagccggaactcatacgtagaattctcgaagtgaacagcaatgtcgtactggttcttgtttccggaaatgccgtggatttgcgttttgctgaagatgtcccatccattgtgcaggcatggtactgcggttccgagtctggacatgctatagcttccgtgttgtccggagatgtcaatccgtcaggcaaactacctatttcatttcctgcaacccttgaagattgcggagctcatgcgtttggacccgaaacatatccgggagttaatgaaaccgtgacatattcagaagatatctatgtcggatacagatggttcgattctaagaatattacccctatgtatgctttcggacatggtttgagctatacttcctatgaatattcggatgcagggaccgatagcttcgtctacagtcctggtgacaaggtaaaggtgtcgttcagtgtgaagaacacgggaacacgtgacggtgacgaaatatctcaggtttatgtttctcaaatcaacccgtcttccgaacggcctgtaaaagaacttaaagggtttgcacgcacttctttgaaatcaggtgagtccaaagtggttgaagtggaacttcctgttgatgactgggcattttgggatgaacagttgggtggatggaatttggaaaagggtagatatgacataagtatagcagctgcttctgatgatatcaaatatgtagttagtgttgaaatcaaataatatgcgaaatttatttttaatcattttaataacgctgggttctgtgcttgtcaatgcacagaacttagttctaccactatatggtaaggctgaatttgagaagattgcttcccttgatgatgaaatgcctgaattgcatgtgtaccttacggataaaccgagtagtcaagcagtcgtggtttgtcccggtggtggatacaagggactctctttcggctcggagggagtctctgtggcaaaatggctaaatcagaacggcattgcagcctttgtcgtcaaatacaggatgccggcgggaaggcaagaggtgcctgtcgaagatttgacaagggcttttgaaatcgtgatggccaatgtggataaatggaatcttgattcttgtagaatcggtctgatgggattttctgcaggagggcatcttgcggcaacggggcttgtgacgttgaagggtgaattgaagccagatttcggtattttggtttatccggtaatatctatgaaaaagaatattacccaccagttctcaagatttaatcttatggggaaaagtccatctgaagatactgtaattaaattctctacggaagagcaagttgctgaggatacccctgcgaccattctttttcactgttcagatgatccggcggtaaaaccggaaaattccatcgtgttctatcaggcattactgaggaatgctgttcctgctgaaatgcatgtctatccgaaaggaagacatggttggggttttatcgagggggctcctttcccttatttcaatgaattcaaaactactgttctgaggtggattgcagaacagaacaactaaattttataatatgattagaactctgttattggcagtttggcttatgtttatgcttgctcctgccagccttgctgtggaaaaagaaaaaatcaaggttgcctgtattggcaacagcatcactttcggtgcaggtttatccaatcaggcaagggacagctatcctgcggtgcttgggcagatgctcggttccggttatggcgtgagaaacttcggagttagtggcaccactgtgctttcttccggagacagtccctatataaatactcgtgtgtataaacaggtgtttgactttcaaccagatataatatttattaaattcggtaccaatgactcaaagggtggtaattggaagcataaggatgaatttaaaggagacatgcaggctatgattgacgtgttctcgggtatggattctaaacctaaaatttatttgtgtctcccggctacatgctatattgaaaaaggttcgattaaagatagcgttatagttcatggtgtaatccctcgcattagggaggttgcagagaaaaaccgtcttgaaatagtcgacatgcatgccgcgacttccggaatgcgagaacattttcctgataaactgcatccggacagggtggcatctttggagatggcaaaatgtgcgtatagggcgatgaccggaaattccaaagaattccagcttcaggatttccccggggtcaagactaaatggaggggttatgataaatatgatttcgagttcaacgggagaaaggctaatatagtagcccctgccaagcctcttcccggtaagccttggatttggaggcctgcttttttcggggcttttcctgctgtagatatcgcaatgctagcattgggttatcatgtagtgcattatgacttggcattcctttatggaagcccgagatctcaggaactcggaaccctgttttacaatgccatgattaagtattacggcttttcggaaaaagttgtccttgaaggatttagtagaggcggactctttgcagtcgattgggcagcagcaaatccggagaaagtatcgtgtatctatcttgatgctccggtgtgcgatattacgagctggcccagtcgtgaaaggactgacttatggcaggaatttctgcaggagtggaatatcaaggaagaggatatgaaaaatttcaagggtaatcctatcgacaatctgaaacctttggcaaaagcgaagattccgattatagctgtagcaggggacagcgataaaactgtgccttatgatgagaatcttgaaattttggcggcacgttataaaaaacttcggggagagattgaggtaatcatcaaagaaggttgcgatcatcatcctcacagtcttgacgcaccagctcctattattaaattcatattgaaccactaaaaaatgttccacgttgaatgcaagcggaatctagtcggacacgactggattccgcttatttgtaaatcaacatatttctgttcttcacgtgttaaaacgttcccgggaacgtttgcgatgatttatactataaaatgcttgtgtgttgatacttatgaacatatatttgtacgtgctcagtgagtgcgaaagacataatatataaccaaccattaataattaaaccccaaaatgacgttgattagaattacatggaaactgcttgttttgctcacagtcttaatctttgtcggaactctgcatgcagcggataagaccggacaggatgaatggcgattcgcaagctatggaaaagctgctaagggatctgttactatggattccaacactctgacaattaagacagagaacacaaaaaatgccttctttgaatctgatgaatacagttttgcatataaggaacagccgtttttgcatgacgattgttcaaagtctgtgataacggtgaaaattgacgatattaagaaaggttctgccggtattatgatgagatccactgatagtcaaagttcggcgaatgtacatcttgaagcgactgctaccggagatttattcgttttttttaggcagcaggaaggaggtagtacctcttacagacgagtggggtatatcggttttcctgttgagataaggcttacgagacaagggaattcttttttgagtcattataaaaatgccgctgatgagtggattaaaggccctgctgtttttgtcgatcttggagaaacgcatttgtccggtttttatgcctgctccggaaatgacaatcaaataggctacgatgtggattcttctcgtaaaatgcaggtgacattcagggattggactattgaaaacagcgataattttatccctgcggaagataattttgtcgacaaggagccgattgcgccgaatactcttttgagagagaattttgcagatggtagtttatctaatgtacctgcaagtgttgtgaatccggtctggaacggtatcaaatttgcagaattgccttatgcagaagacggcagcagatattggagaaaacgtggcgatggtatatactatttaggcgacaagaaatgggctgattatgaagttgccgttcggctctcttttccggagccggctatgagtacttctgaattttcagtgcagatgcgttaccagaatatagcaatgtattcaaaaatgctgaaatattacggggtaagcctgaagaacggtaatgaaatcattctgaataaatataagtcgggtgggaatactatagagccgctccaaaaggtgaaagtaaattcgtataacgacggaagcatgcacgaacttaggattcgtgtaatggataaggattacgaagtcttgtgggatggcgaaagcgtcataaaaggctcagataccaaagaacctataacctatgggaatataggtttgaaattcacggactgtgatataaacttataccgtatagaagtgactgagataaaagatgaaatcaatggaaatcttgataactatttgttggattattacgacacgaaaatccctgattatattattaaacaatatttgaaataatggaactgaataaaatatttttatctggattgacctttttatgggtttgttccggcaacggctattctgccgataggcaagatggtaaattcgaacctaagttgtttcaggtaacaactgcagagacaaggcctaatgatgcagtacttatcaggggtgaatatcttgacaagataaagtcggtaaaagtttttaccctcgacaatggaaatgtcggcaatgccgagcctgcgtatgttccgctccctgtagaggacaggctgcccgatgtaaatggtaccaaccttcgtaccgggccgttggcgtcctataaggctaaagcggtggacttgctgcagcaaaaggagcagtctcttaagtttattgtacccgaggatttgaagaacggggttttcagtgtggaaatgacagatgtcaataatgaaaaggcttatttttatctgaacgttccgattgtccgttgggctttgagcgaggatggtgaatgtgcggttgccggagattatctcagggttcagggaaagaatcttttacgggataaggacaaggcgcatgctgtacttgttccgctaaaaggcggaaaaaatgtaagatgcaaggttacggatttttttgacgacttttccgtaagtgttgatattccggacaacacgccattaggcacatattatttgtattaccataacggaatggggggaaagacagcatggagtgaacctttgcggatagatgtggtgtccaaatctcctgactggtggggggtgaaagtatttaatgtgatggactacggtgccgtgggcgatggcgtccataatgaaaccgcagctttccgtgcagctcttcatgctgccggacaaaatggtggcggtaaggtatatgtgccgagaggcagatatatgcttacaggtgagctcattctttctccaaacacattgattgagggagaatcaaaggaactgactcatattttctggaatcctcttaattgggatttgtatgagttgcctaacagccttattagcggaactcatcatttcggtttgagaaacttagtaatgtggtcttcacgtgcatggggagtcatcatgtctacggggcccgtggaagaacaaggaacgatattgctcgagaatctgattgtgcgtcagacagggcagctcagcggtatgatatatcaggtgaagtcgaatagggatcaagtcgaagcggagtttcacagcagatggagcaaaacagggataattcttcgtggcaagaatcttaaagtaaggaattgcgtcttcaattcagccggcatgtacactttctatgcagcgggaggatttgtccaaaattgccgtttcgagagacataccacaggtactaaccaaccatatatgctggtacatcccaaagggttgatattcgaagattgttataagcagggggacggttttgggtatgcttcaagtattgacgaaagcaggaacctttatgaagcgcgcaattatattccgttcgattataccaatgaccgcgagtgtatgactcttgatggtggtagtggcggatattacggacctataaaatccgtcgagggtaatataattactatcccagaagatgcggaaactaatcaatggactgaaaaccactggaatggcggaggagtctatattattaacgggacgggagccgggcagttcagacgtatccgcagccatactctgacaaaaattgagttggatcagccgtttcttgtacaaccggatgccacatctgaaataagtgttaccaccgtaaggcatcatttgtatttcattaataatgaggcagtcgatgtaggagcttatcagttgtatggctctgtacagaattgtgtgatttccggtatgacgatgacacggtgtaacggaattgtaggcagaggatcgctgttgtatcgggggaaacagcctgagtggtatatcgatatcgtcaattgccgtcttaaggagggtaattacagtcattggttcggtattgatgacagagggcattccggtcaccaaagtataaatctaatcggcagcggaggaactggtatgagcataggcactgttatcaggaggaatgtgcttagtgaatatagttatatccgtacttccccgggagccaatccggatgcagtaacggacgttataatcgaagacaactcgtttgatatcgcaaagaatgccgtattgttgggtggaaatgccactaatacgtctggtgttctgattcataacaacagatacaatgaggtagacaaaagattggaaaccaatgttaataaagatagttaccttgtcattgatgacaacctttgaggatatttttccgatgcggacgacctttgaggataacaaagtttctaatcggggtccgataatacgaaaacgattatgataataaagaatatagcgaaaaacagaacttttacaaatgtagtattgaatgcggactatgtggtagctggaggtggacttacgggggtgtgcagtgcaattgccgccgcccgtgaaggacttcgggttgtccttatacaggatcgtcccgtacttggaggcaatgcttccagtgaagttcgcctttgggcactaggtgccacttcacacatgggtaacaacaaccggtggtcacgtgaaggaggtatcatcgacgaaatccttgtagaaaatgtataccgcaataaggaggggaatcctgtgctttttgacatggtgctgatggataaggtattgacagaaaagaatatcaccttgcttcttaacacaaccttatataaggttgataagagcaatgatcggaacatatcttctgtcacagctataaattcgcagaacgggacagaatactctatttcaggacagatgtttgcagactgtaccggagatggtacgttaggttatcttgccggagcatcattcagaatgggggcggaagacagaactgtgtatggtgaagaatttgcaccagacaagcaagagtatggagaattgctcgggcacagcatattgttctatatcaaggacattggcaagccggtggaatataccgctccaaactttgcgttaaaggatgtcgaaacattgataccgaagttacagaatccaaattatttcaatgtaaatcaattgggctgtaaatattggtggcttgagtatggcggacgcctcgatactattctggacacggaggaaatcaaatatgaattatggaaagttgtctatggtgtctgggattatataaagaattccgggaaatttcctcaggcaaagaccctgacgcttgaatgggtggggcttttcccgggtaaacgtgaaagtcgcaggttcaacggtctttatactctgacgcagcaggatgttatcaaccagtcaacccactatgatgcggtggcatatggtggatgggcaattgatcttcatcctgcggatggtgtgtatgctggaggaaatggctgtcatcagtggcacagtaaaggtgtctatcagattccttaccgttgctatgtaactccggatcttgataaccttttcgtgggtggacgcatcatttcctcaagccacgtggcaaacggtactactcgtgtcatgtgtacgtcggctctcggtggagaagtcattgggcgtgccgcgtcaatttgtctttcaaaaggatataagccaatagaccttgttgatagggacaggataggtttgttgcagtcactccttgttaaaaacgggaactttataccgggtattgctgtggcggttgaggacaatcttgccgactctgcggaaatatcggtgtcatctgtgcttgaacttgacgatttgccagccgatggtacctggtttggattagattatcctatagctcaactcataccggtgaatggtaaagtgccggtggtcaggatgaatgtaaaggcagataatgcaacaaggcttgttatggagttgagaagttcatccaagagtgagaactacactccggatactattgatgcagttctagaattcgatttgaaaaaagatgagaatgagattgttgcagacttttcctattcatacgtgactccgcgttatgcttttatctgcctgatgaaaaatcctgagatttcagtaccgatgagcgggcggttagtcacaggattgactgccgtatataactacataaaccctgccgtgtcgaattttggaaagcaggttccacctgaaggaataggggtggaggaatttgaattctggtgtccgaaacgtcgtccggagagcaagaatatagcgatgtcgtttgccccgtctcttgcgtctttcaactcggaaaatttgaggaattcttattaccgtccgtatataggtactaatgcctgggtaccagctttcgatgatgcaagacctgaagtatgtttcaagtggaatgggaggaaacaaattaaaaccattatcttgtacttcgataccgatacggatcaggcaatggagaccgtccagatggggcatttcgatgcttgtgtcccgacttgttacagggagtacataatccgggattcagagggtaaggaactttatcatattactggcaatcatcagacactcaatgtgcttgaacttgatcagccggtgacgaccgacgccatttatgtcaactttgtccgtccttgcggtgatgtctgcccggggcttatgggagtgtatgtgtgttaagataacactgataataaataaactgaaatgaatatacttgattacataaccattatcctattttcgataggagtgttgattacaggagtgtctttttccaagacgggaaaggatatgaaaagttttttctcaggtggcggcaacgtaccgtggggaatgagtggactttcattgttcatgggatttttctcagcaggaactttcgtcgtgtgggggtcgatagcctattcgtatggaatggtatcaatcattatccagcttacaatggctgttgccgggtatgccgtaggcacatggattgctccccgatggcatcgtactcacagtctcacggctgccgaatacataacgggccgtcttggtgtcaagacgcagaagacatatacctatatttttttggccgtgtcggtttttactacggggtcgtttctttatcccgtagctaaaatagtcgaagttactacgggtattcctctgaccacagctatcttcgctttaggggcattcagcatggtttatgttgctctcggaggtttgcgaggagtggttgtgactgatgtccttcagtttgtaattctttttgcggcagtagtgatagctgttccgcttgctttcgacaagattggtggagtcggtacatttttcgaaaaggttccggaaggatttttcgaactctttgaaggtgagtacactcccgggttcgtgatagcctttgctatctataatatgtttttcctcggaggcaactgggcttatgttcagaggtatacttcagtaaaaacggaaagggattcacggaaaacaggttggcttttcggggtgctctacacaatcagtccgattctgtggatgttgatacccatgatttaccgagtttataatccgtcattgtcgggtcttgaaaacgaaggggcatatcttctgatgtgcaaggaagccatgcccgacggattgcttggtttaatgctcggaggaatgattttcgcaacggcgagctctctcaatgccactctgaatatatcggcgggtgtggttaccaacgacatattcaagagaatgcgtcctgatgcttctgaaaagacattaatgaacgtggcgaggatttccacatggggattcggaataatggctattattgtagcgcttctgatacgctctatgggaggtattgtaaacgttgtaatcagcgtggcggcattgacgggagttccggtttaccttcctgtaatatggtctttgttctcaaaacggcaaactgcgcgtacgatactttcagcgacatttataagccttgccattaacttgatattcaaatttgtgactccgcatttcggcttggctctcgataggacatgggaaatgatagtcggtaccgcggttcctgtgatactgcttgccgggattgaggtggtgctgaaggcaaaagaattcatcgctccggaatatatggcctatatttcaggacggaatgtaaggatgcgtcaggaaaacgcaggcgatactgaagagtctaaacggactgacaggtttacacagaaagtgttgggcattggtctcggactgtccggtgtgcttattacagttctcggtttcattgcggaggaaaacattgtcgtacctgtcgctgttggcttagttgtgacattgataggaatatatttgcttattttatcattgcgccgtccgctttagaagccttttatttttcttcctattgatagcgtgggctcgatatgagcattatatttattcgattgaataatagaacatagcgataaaaattttaagtttataatagcaaattataacttttgaacgattatcgctatgttcacagagcctaaagttatgattcaagctgtatctgattatcatcgattaaataaactccccgttttcgttgatctttactttcacttccttttcgccttgctccaattctatccagtagtagtttccggtaggagtttcaacatattcggcatcatccactacataaccgctatattgtgaggcattaatggcctctgtcactttaatcgggagtacatatacatcccatgaggttgaaatccattcatagcttgtgttgaacaatacttctttgctttggttttcatgtatgatgtccacttcgatcatacctttttcctgttcaatctcaataatgcgggcattgggataattcttctgtatgaattccgttacggcagtaaccgtactcgacggggcatccggtagcaatgattcgttattgccatcaccgtcatcattcacggctttaatgaggatgccgtctgctgaataatgcagatccatatctacatcctgtgccgattccacttctatgatgtagatgatctctttctcagttccggcacgttcaatacgctccactttgttatctctcttccaggaggcgtattcgctgctttcaaaagaggtctttattgtttgcggaatatcgctatatggcatttcagtttcagtcatgtaccatgaaccatctgccgtataccaggcttccgttttatacccgttgtcgctcttgttgttgaattccgctttgtagtattgtccttgtgagacagtttttgtttcccaactcagattagcggtgttggagaaactgctgtcgaatgcattgcgtacggcttcaggaactttagagtttggaagatcgtcatcatcatcgttgcaaccttgcaggcttaacatgcccatcgccaatagagctagatacattttcagtttcatagttacttgtttttttagagtttactaatattattgttttctttgactattgctgattgtattgcaaagatggcgggcaattctggaagaaattgggaatttgactccaaaagtggataataaattctatatttgcgattttaacattaaaaagagcagattactaatgaacttatactaatatggtacaggaattggaaagacgcacccgtattgacgtagccgatgtgctgcgcggactcgccgttatgggcatcattgtattacattccattgaacactttaatttctattcatttcccgatacgagcactcagagcgcgtggcttaacttttcagataaagccatttgggacggactctttttcatgttcggaggaaaggcttatgctgtgtttgccctgctttttgggtttagtttctttattcaggataataaccagcgtatgcgtggcaatgattttcgtttgcgtttctgctggcgattgatattattattcattcttggtaatataaatgcggcctttttcacggctgaagtattggtgctctattctttagtcggattcattttaccacttacctgccgactgaaagataaatggctgtttattctggcatgtgtgcttctgatacagccattgccactttattatgtgatacatgcctgtgtagacccttcttttgtgactccttctattccgacaggtagttactggggagcggctttccaagtgcagagtcacggtacatttcttgaaaccctgcgtgtgaatttgtgggaagggcagattgccagtcttgcatgggcttgggaccatggacgtgtgtttcagactgctgctcttttcctgttcggcttgttgataggacgtcggggacttttcctgaaggagaatctgaagttctggaataaggtactttgtggtgctcttatcgcttttttccctctgtatggattgggcaatatgttaccggatttcattgctaataagtctattctcacccccttgttacttatcataacttccctgtccaagtttgcatttatgctgatattggtgtcgggtgttatctttgctttctatcggacaaacctgcacgactggttgatgaagattactccttacggtaagatgagccttacaaattatattacccagagtatcattggttcgttgttgttctataattggggacttgcgcttcactctcagttgggtataacagccagctttctggtaggagtggtgctcttcatcgtgcagctcgctttctgccggtggtggatgagccgtcatgcgcacgggccgctggaatatttgtggaagcgggcgacttggttgaaataaagtatcattttacacccgctatttctgagaaaatgttctttccgttctttcagatctctctgaattccctgttcatcggcattacggctgaaacttccaaccttatagttgcttcaggtatctttcagctgaaacaccgatgaacagggggaccggggggaaactgaaggctgaaagaggaaaaagaacacttaaatgtattgaatagtatctgaaaacaagtaatgatgtgatccggaacaagtaatgttgagaatgattacattgcttgttcttatccacaacaagcaatgtaatttcaggcaagtccgattccgtgacttttaacgtctatatatcggtggtgttggatatatagatactgcacgttcgatatatagatgcgacacgtccgatatacagatgcaacacatccgatatatagatgtgtcatgtccgaatttgtgccagagttttgacctcttttaggcaaaaatgctgtttgtaaacagcaaataggctatgcttattggagaacaactggattattctctcagggaaacttctatttgcttcttatcggttatccgaggatactaataaatacttcagttcttccaattgataaacacttggcatataatgcccgttgatgacaactgccggagtatggctgatgttattccgttcgcaatactcctgctgttgcctccagagcaactgtgccgtatcgttgagttcgtatttctccacgtccggtatctcctgaacttcaaaccatacttctagcaagtaaatagccctatcccagccttccgagaggtatgcggagaggatggtttgtgctatgtgtacgctgagccggtcattggtatatatgactaaagagatggatatgtctgctgatatttcccggatatggcgatgtactttggcgcatgctttacaattggggtttaccactaccattaacctgtcttttgtgctatcggcagagttatgcagagctatatccgggtgaatcatcgttctgactttaggtttcaaagccaggagtttctgaaaagtgatcggattgagcagaccggatagcttgttttttagaaagtgtttctctttgtccgaagaaacaagtgctttagcctgtatccagaaaatcacgcagatagtgctgactgcaatcattgagaaaagaattcggattgaaaacctccattcgaaattattccttatgatataaagtgctacggcagtcagccagaccgagaaggtggtgagcatacaaaacaggcacgctttacgaataaagaatatctgatatatgacggagtacaaggtgaatgcaattgcaatgaaaacagacagggctgccagaagatggaattcctttgggcagacagcagtgaaaaagaacatggttgtgaaatacatccacgataattctccaatacctattcctgcaatatttgcgcctttggatttgagtacctcattacaatctataaccttccctatgtggcagaagcggtgtagaaagtgattatctaccatttctctgtatagaatgatagtagaaatgagaataccacagaccagcgcggaaagataaagtggtaatcctgtggggtagtttctactccagattgaagaaaaaactaagaggacggatataattcccgcaatcagtatcctatgttgccggcacatataatgaatattgctgagcaagcagtgagattcacagactgttttcgaagttgtttcaccaaacaggacagttcctgtccactggtgcgcaaatagctttctgcttatgggcatgtggctaacttcggcagtcgtgatgatgagccggtccggttctatcttttcgacaaggcagaatgtggaatggcttgtttccaattgggtgataaacggaccgtgtaacttctccagatacttcggttgaagttggtaaactacgttatttacatgaagtgcgtttaaggcatcgctgataccttgcatcgtgttgcccaacggactgtcgagcaaacggcatacggtagtcctgctcacttttacggtcagtgaccgtaaaaagtgatggactacttcactggtggcattgtcaactcccagcatagtcttgatttatagttaaagtttaggttaggttctttgttaaagtgtaaagtatccgctcaaccgggcttctcccagttcaatttccagatagtattctcccggctctgttgcgtttaattcaatagtgattagcgtaggattgatacttgttccggaataaacatttgctccggaagcatctgtgattgtaatacttgcagtaggtgcatcacagttgaaaactacagtgactatatcattattaatataggcactggcgggttgaataatgatgctcctggctacaggacccccttctttgggacctgccggattcagaggaatttctctttcatcatcatcggtcagaaaaaaattctgggcgtgcaaagatgtgctacccataactactactaatacgaaaaatacagataataactttttcataagatatacttttaatttgttatgacggtggcaaatttagagagaatttatccaataaaagtgtataaaaagtgtagaaatgtagggaaacgtcttgctattggagcattttcccttatttttatagaaattgttctaagaaatcccggagtgaaattgatttatcagtgcatttcatcttttgttccagtattcttttaccttttttatatatggcatctctactacattccattagatatctgaaatgactggtgggtatatctgttaaatgcaggcaacaaagacatatctcatcttgagataagggatactttgcagctaagcggatggtaatgttattccaacgtacatcagtttctgctattagttgtttccagtcttcttcattgaaatgttcgcttgatttatctgtctttttatatgcttgaataattcgtttcatctttacgtgaacctcagaatgttcataagattcgttgagcaaggcttggcgttctgttttcagtctatgcagttcttcttttaaactgtctctttctgcttgattgttgttgtgccgcgctatttcttcttgcaaaagattgatttgttcgttcttctgttggagtaaatcttctaatttcttatttagttctatttccttttgctcgaaattgcttttttcctttctatgttttttccataaaatgaagaataacgataggaaaatcgctattccgataatcatataataatagaattggtttaaattagctttgtattctaattgtttacgttgtattatgatatttttctcggttgtgacaattgctacattctgttgcttttgttgaacacgattcagatagaaagaatattttctttccatttcgagtgctgtttctaatttcccttgcttttttgctatatcagctaaacgcatgtaagcaccagcctttgtatattcatcttcactgcaaaggcttttatttagaaaaatggatgcagaatcatataaggctattttgtagtaggcatcacctaaaactaaataagccctatctaaggtgtttgaagtttcttgattgttgaggtttaacttggcaaattctacagctttttctcccatattcatgcgtccatacagtagacttaatgaataagctgttttagctaccatctttttttgagcaatatggcgtgatattttgaatgcgtgaagtatttcctgttctgcttcatggtagtattcctttcctctgtcaatagcaatcataccccgttgtgataaagcatctgcccaaagaccggaatctttttcttgaatagctattttctctgtaatttgatagattgaatcagcctgttcatataatttctgtagaaagtataggttggctatattattgtatatatatccggttaacttatggtcagaagttttttgagcataggatatggcagtgaaaaatctgcttaaggcttgcgggtaaatttctctgttcctccaaatgcatccccagtaataatgggcttttgcctgcatagatgtacttttaatggaatcataatactgcactgctacacgtataagggagtcattctcttggaaaatgtagttcttatcttgtgcttgtgtcactaacaaagcatagtacgcctggtcttctaatgattttaatttctccggatagattttttctaaaaaatgtaaggcactgtcgggagatttttgcatgagggaatctgcttgtacaagttgggcgttcggactggtacgagtacaagccactaatatgcaatatgcgagtaatagtgcagctaaggtagtgactttcattgatttatcattttttgttgcagcctgcaaaagtacccgtttctaatgataaaacaatgtaatgtcagtctgtaaaataagtacccccctatttatgaatttgagttcataaataggggggtattgaattaaagtatgtttttttgtcaggtatgtaactccagaacgaagcgacagcccttggtatagctactgtccaatgtcaggctaccattcatttttgtggcaatcagagagcaaatgggcaatcctaaaccatccccttctgtaaggtctttcactttagtgaaaggtttgaacaagtctgcttgttcctcctcggcaataccacttcccgtatcactgacaatgaattggtgggtgtgtgctccgcgctttttaaagtctaaccagattttaccaccttcaggggtaaactcggctgcattattcagcaaatggagaagaatacgttcaagttgctccggattggtcttgacactgagtttcggagcattcacggcagtggctatgtctggcttcagaccgctttttatcttatccataacactttcacagaaagtgttgatattgatttcacgcatttcgtatgcttcagagagcgtgctttctaaatcggacaactcttgaatgtgctcagcaaagcctttcagtgcacggacgcccggtaaggtcgtatctagagtattcagtgttggctccatttgtgaggagatattctggataaacttagttttcagttcattgtgctcattggctatctgtatggctttcttttgtttccgggtaagaaggacaaaacggagcaatacgataccggctaataccagtgcggtggccagtagtccggcaaggatgcaaagtccgatgataatgtactgcttggcggatagtgaactgtctttttcctcaatagtttgcaggctatcatcatatttacgtttcagcacgtttagttcatcttgggcggtaagggcttttaccgagtcgctccaaaggatgtatttgtcgtacgtacgggctaccagtccggcattgtttgccttgcgggcaatatcgatcaaggttttgtatgactcgtctacctttgcataattcttctgttccttatattggctgatcagacggttgatataagcatctccttgtgagttcatcccaaaggtatagtagtaattggcttgggtgtaaagcaaatcattgttgagtgaatcatttttggctgctttggctgtctcttccaatttgaccagttgttctttggcacgggcaggattcttgaggttgatatacatttgcaggcgttccttattgatacggaaacgcaggtcgggcatcgtcttgccacttttctgctcaccgtctgtaaccaatagttcggcaccgcgcaacagttcaaaagcttctttataatagttttcccgatggtagagagcactggcgttgacaccacattctactgctttatcatactttgcctgagaggaaaaagcattgtaagcctggaggaaaagatagcgggctttgatatattctttttttgcgagactttcctgtgcttgtttcattagttcatcggcacggttctgtgaataggcttggctgcaaatgcagaaagcggctaagaagagtagggtaattatctttctcatatatgattcattttatttgcttacaaagttaagacattcttctgtaggttgtacaagaaaagcgcttaaaaacttgacttatctcatttttctgatgattagggtatatgtaattatatactgttccgtatgatctccgtatcttttccgtgttatctccatatcttctccgtactcgctccgtacctccttcgtatctatagagtacggagcaactacggagcgggtacggtgcaggtacggctcgggtaggatagatggcaaggattagtatttgaaactgctccctcccaggaactcacgcagaagtgatgttggcgggatttccttatcttgtaccggagtaaagtatttgatgaatttcagcaaccggtatgcttcggcatactccggacaattgcgtgggacgctggtcagtatcggttcagcgtggcaacgcaatacggcaaattcaaacagtagtgcggagttgaacatcacatcggcgttctcctggtaagggaagatccatttgtcttctccggcacgcacgctgggccagcgggagatggtttcgcgtgccgaatatccccgatagttgaagtcgcggatgatacggcgcaacaggcggttatccgttgtgggtatccagttgtggtcgtccagagaaatggtagtcagggcagatacatagatcttatatttgttttctgccggtatctgcggagtgagttccgggttcaatgcatgaataccttccaggatgaggatggtatgttcgtcaatccgtaacttgtcccctttgtattcccgttgtccggtagagaagttgaaactcggtagatcaatttcttcgcctcgtaacaaagctttcagatcttcctcgaactttttgagatcgagtgcatacaacgattcgtagtcataatctccgttaacgtctctcggagtgtcttcgcggttcacaaaataattgtccagggcgatggggtatgggcgaagaccatttgtcataagttgtacggaaagacgtttgctgaaggtggtcttacctgaagaggacgggccggagataagtaccagttttacgcggttgccattttcaccccgattatagatatcatcggcaatctgagctatctttttctcttgcagtgcttctgctacgttgattaaatcagtggcatgtccttcttcacaggcgaggttaaagtcaccgacattgcttaatcccatgatataattccaacgcagatgttccttaaatacatccagcattttttcctgcttgacgacttcttccaatacattaggattttgcctgttgggaatgcgaagcaacagtccatcgtaatatttcacaatgtcgaacagccagataaagccggtgctgggcagtagattaccataataataatcaatcgtatcttctaatgaataataataggtatagatagagccggaagtttccagcaactttactttgtctgtcatcccccgttcattaaagatgcgcacagcttcggttgtgtgacattccgtgcggcggtaggtgatatttttgtctatgatttcctgcatgcgctttttaatggcggatacatcttccagcgtaattgtgcgcccaatgcgcaagttgcagaagtagcctttggatacagggtgttctacaaatagtttgccgtccggaaacaattcgttgacagctttgtacagcacaaagcaaagactgcgcacatacgtccgcaaaccggaagagtcacgtatatcgaggaattctacatctttattattgtatacccggaagttcagcccttcggatcggttattaacttttgcactgacaacctgataggggaaattaagattaaaaccgtaataaatatccaaaagtgaactcccgatggggaattctttagaaatattattatttttgcaacaaatttgtaacatgtgtttcatgacgtctcctttttaggtgattaatacgttaaatatagatataataacagatgtggcataaaaccttctaattaattaaagatggaatattctttttatgattttttaaagctgcttggctcgctggcattattcctgtacggaatgaagataatgagtgaaggacttcaaaagtttgccggtgacaggctccggaaaattctaacggcaatgactaccaaccgggtaaccggtgtactgacgggtgtgctggtcacagcactgattcaatcctcttccgcaactaccgttatggtagtgagttttgtaaacgctggactgttaactttatcccaatccatcggcgtaataatgggagccaatatcggtactaccgttacagcatggattatttcggcattaggtttcaaagttgatatagccgctttcgcacttcctctactggccttcggcattcctcttctcttttctcaaaaaagtcatcgtaagtctatcggtgaatttattttcggtttctctttcctatttatgggactttccatgctgcaatccaatgcgccggatttgaaagcaaatccggaaatgttggcctttgtgcaaagctataccgatatgggatatatttctattctgttgtttgtgtttatcggtactatcctgactatgattgtgcaggcatcggcggcaacgatggcaattacgcttatcatgtgtgctaatggatggattagctttgaattgggggctgcattggtattgggagagaatatcggtaccaccattactgccaatcttgccgcattgaccggtaatacgcaggcgaggagggctgcattggctcatttggtgttcaatgttttcggcgttatctgggtactttgccttttcactccgtttacgagtgccgtatcttggtttgtggaaaacgtgatgggaacgaaagatcctgccgtagctgtttcatttaagttatcggctttccatacttgctttaatatctgcaatgtattgctgctgatctggtttgtaaaactgatagagcgtacggtttgtgccatcattccgcagaaagaagctgatgaggaatatcgtctccgcttcatttccggtggcatgctttctacagcggagctttccattttgcaggcacgcaaggaaattcatctgtttgcggaacgtactcaccgtatgttcaatatggtacaggacttgttgcatacggataaggacgatgattataataagctgttcagccgtatcgaaaaatatgagaatatcagtgataatatggagttggagatagccaattatctgaaccaggtgtctgacgggcgtttgagttcggagagtaagcttcagattcgtgcaatgcttcgtgaagtaactgaaattgagagtatcggtgatagctgttataatcttgcgcgtactatcaatcgcaagcgtcagactaatcaggatttcacggaaaagcaatatgaccatattcactttatgatgaaactgacggatgatgcgttggcacaaatgattgtcgttgtagagcgttccgagcatcaaagcatcgacgtgaataagtcattcaatattgagaatgaaattaataactatcgcaatcagctgaagaatcagaatattctggatgtgaataacaaggaatatgattatcagatgggcgtttactatatggacattatcgccgaatgtgagaaattgggtgattatgtggtgaatgtagtagaggctagtagtgatgtaaaagaaaagaaagcgtcttaggacgctttctcaaattcttcttttccaactccgcatagcgggcaaacccaatcttcaggaagatcttcaaacgatgttcccggctcaatgccattttctggatcgcccagctctgggtcgtaaacgtagtcacaaacggtgcaaatgtacttgtccataaaactattttttaggttttctgtataaataacaataaatcccgcctttttgtttccggttttgctttgaaagagatatatttgtttcgtatttattgtaaatgaactctttatgacgatactaattctggtcggtatggcggtgcttgtaggagtactgttattatatgtatttgaacttggtagaagtagacgcctgctgcttaaagcaggaaatgccaggaaagcattacgcggttccgaagaactgtttcgttctattatgcaaaatgtccatgcttttattcttttgatagatagggattttgtagtaacccggacgaattactatgatatcaccaaagcccgtcaaccggaaggcagattggctcgtgtgggagatttattgcgttgtaacaatgcattgtctgccgaaggcggttgcggaacacatgaactttgcggcagttgtcctatccgaaagaagattgaggaaacatttcgtgctaaaagtagcttcacggatttagaagctatactcgatatacgggataggaggggcgaagtagccgaatgtgatacgtatgtttccggtgaatacatggaaatagacgataaggagggtatggtaattactgtacatgatattacccgactgaagaaagcggaagcggaattgaacagagcccgtgaaaaagcggaaaatgcagatcgctccaaatcagcttttcttgccaatatgagccatgagatacgtacaccgttgaatgccattgtcggtttctccgaattgctggcttctgccagtacggaagaggagaaggcgcaatttctggaaatagtgcattctaacaacgagttgttgcagcagttgattgctgatattcttgacctttcaaaaatagaggcaggtacattggaatttacattctcggaggtagatgtcaatcagttgatgtttgatatagaacaattgttccgtatgagactggaagataaatctgccgttattcagattatcaggcaaacacctcccgatgaatgtgttatgtataccgatagaaatcgtttgcaacaagtggtttccaattttatgaccaatgctgtgaagtttacagatgagggtagcattacttttggctataatcgttgtgctgaaggtctttatttttatgtgaaagataccggaagtggtatcccggaagataaggtaaatcatatttttgaacgttttgtccgggtagaacagaataagaaaggtaccggtctggggctggctatctgtgaaatgattatccgtaagttgggtggaaagattggtgtggagtctgaatacggtaagggatctacattctggtttaccctcccgattaatggacgccagattaaggaacaaggcacggagattgatggcaagactaacttataaaaagatttaataacattcgctatcccaaattaatattgtatttttgcggctcttaattaaagctaacaatttgcatgactgcaatgaaggatgatttttatcatggcggacttactgacgacgaagtaagaaaaagccgcgaaaagtacggagtcaatctgttaacgccccccaagcgtccctccctgtggaagttatatcttgaaaagtttgaggatcctgttgtcagggtgcttttagtggctgcactattttctttgatcatctcgatcgtagagaatgaatatgccgagacaatcggtattattgccgctatattgctggctacgggaatcggtttcttctttgaatatgacgccaataaaaaatttgatctactgaatgcagtaaatgaggaaactttggtgaaagttatccgtaatggtcgtgtgcaggaaattcctcggaaagatgtggtggtaggagatattattgtcctggaaacaggagaagaaataccggctgacggtgaactgctggaagccatatctttgcaggtgaatgaatcaaatctgaccggtgaacccgttataaataaaacgactgtcgaagcggattttgatgaagaagctacgtatgcttccaatcgtgtgctgcgtggtactaccgttgtggacggtcatgggacaatgcgagtgctcagtgtgggcgatgatacggaaatcggaaaagtggcccgacaaagtacggaacagagtacggaacctactcccctgaacatacagcttaccaaacttgccaatctgattggtaagatcggcttctcggtggccggactggcatttgccattttctttattaaagatgtaatactggtatatcctttttcaaccttccacacttttgcagactggcttccggcattgaaagctaccttgcaatactttatgatggcagtaaccctgattgtggttgcagtgcccgaagggttgccgatgagtgtgacgctcagtttggcattgaatatgcgccgtatgctttctaccaataatctggttcgcaaaatgcatgcttgcgagacgatgggggcaattacagtgatttgtacggataagacgggtacattgactcagaatctgatgcaagtttatgaaccgagcttctatggtttgaaaaatggtggagaagtcggtgaagatgatatcagcaaactggtgatagaaggtatcagtaccaattctactgcttttctggaggagatagccgaaggtgaaaaaccgaaaggagtcggaaacccgacagaggtagccttgcttttatggttgaatagcaggaatcgggattatctggaattacgtgagaatgctccggttgtggatcagttgactttctctaccgaacgtaaattcatggcgactttggtgaagtctcctttgatgggtaagaaggtattgtacgtgaaaggtgctcctgaaattgttttaggcaaatgtaaggatgttattctggacggcaaacgggtagatgcggtagagtatcgctctacggtagaaaaacaattgctgggttatcagaatatggcgatgcgtactcttggttttgctttcaagatcgtggaagatacggatacaagggattgtgtggaattggttgccgatcatgatttgtcattcctgggtgtggttgctatcagtgatcctatccgtcaggatgtgcctgcggcagtcttgaaatgtcagtcggccggtatcgatatcaagattgttacgggagatacaccgggtacggctacggaaatagcacgtcagattggtttgtggaaaccggaagatacggaacgcaaccggataacaggggctgcttttgctgaactgacggatgaagaagcactcgaccgtgtgatggatctgaaaataatgtcgcgtgcgcgtcctacagacaagcaacgtctggtgcagttgttacaacaaaaaggtgcagtggtagccgtaacgggagacggtacgaatgatgctcctgcactgaatcatgcacaggtaggtctttctatgggtacgggaacgtctgtggccaaggaagccagtgacataaccttgcttgacgattctttcaatagtatcggtactgccgtgatgtggggacgctcgctatacaagaatatccagcgcttcattgtcttccagttgactatcaattttgtggctttgcttatcgttttgcttggttcgttgataggtacggaattaccgctgactgtaactcaaatgttgtgggtaaatcttattatggatacttttgctgctttggctctggcttctattccgcccagcgagagtgttatgcaagagaaaccgcgcagtagcagtgactttattatttcgaaagccatgcgctcctatattttaggtgtaggtggtgctttcctgattatactaatgggaatgttatactggtttaatcatgccgagggcggtatgacaccggaacgtttgaccatattcttcacattcttcgtgatgctgcaattctggaaccttttcaatgcacgtgtgtttggtactacagactccgctttcaaagggatttccaaatcgtacggtatggaactgatagtacttgctattttagtaggacagttccttatagtacagttcggtggtgccgtattccgtactgtaccgcttgatttagtcacttgggtgattattattgcttccacttcactggtattatgggtgggtgaggcgatacgtttcatccgacgtttaactcagaaataaaatgaaagaaaaaggaattaaaaaccttattatcgattttggtggcgtattgattgacttggaccgccagcgttgtattgagaattttgcaaagttaggcatgtccaatgtagaggctatgcttgatgtttgtcatcagcaaggtttcttcttacagcatgagaaaggactgattaccagtgcggagtttcggaatgcgattcgtgagcaaatagggaaggtagtgaccgatgcccgtatagatgctgcctggaatagttttttgggaagtattcctacctataagttggatttgttgttgaaactgcgtgagaaatatgtagtctatctattgagcaacaccaatgaaattcactggaaatggtcctgcaagcatgcttttcactataaggctttccgggtagaagattattttgagagaattttcctttcttatgaaatgaagatggtgaaaccggacgttgccatttttgagaagctgttggaggaaacaggcatagatccgaaagaaactttctttatagatgattctactgagaattgtcgtgtggcggaaacattgggtatttctacctatacgccgaaagcatgtgaagactggagtcatctgtttaagtaaccattaaaaattaaagtagtgcagttgcttcgtaacataccgggggtgcttcctcagccttgtgttgctaccataggctttttcgacggagtacatcgaggacatcggtacctgattgaacaggtgcgcgaagtagctgttgcacatggttttgcttcgggggtggtgacttttcctgtgcacccgcgcaaggtggtacagccggagtatcaccctgaattactgaccacttatgaagaaaaggttgctttgctcgctgaaaccggtctggactattgcatgatgcttgactttactcctgaagttgccattctttcagcaaaggagtttatgttgttcctctacaatcattataatatacgtgcccttgttataggatatgatcatcgttttggtcataaccgtagtgaaggttttgatgactatgtacgctatgggcaggagttggggatagaagttattcttgcacatgcatatatagataaggatgttgcagtaagctcttctgttatccggcaattgctgtcggaaggtaatgtctcggaagctgcttcttgcctgggatatgattatttcttgaatggcatagtagtaagtggttatcgtgtcggtcgtaaaataggttttcctactgcaaatcttcgggtggatgatccggataagttggttccttctgatggggtatatgcagtgcgcgttaccgtagcaggtcagagttatggtggtatgctcagtattggctatcgtcctacaatggctaacggtacggatcgtagtattgaagtgaatatatttaatttccattcagatatttacgagcaatatatctgcctttcttttgtccgctatctccgtcctgagttgaaatttgattccatagatgaactgattgcccagcttcataaagataaagaaatagcttcccgttatctttaatatctccttttctgtttatatttcttgtatgattatcgaaaaacgtactttttttattgtttttcgataaatattttctgttttacttgttagtctcaaaaaatacctttttatttgcatatcgaaaaacgataaattattattgaataacaaaacatataaaggttgacgattatgaaaaaggcatttatgagtatctctttattagtgatttccctctccatgttgatggctgttctttgcggtataggagctaccgtttgatgatttgatagagaaaatatatctttgtaaactctaaaggacgacaacgatgaaaactgcaataaaactggctcttatttacttggcgatgcaaattctcggggcattggcagtggggccattcactatgatctatgcgtatgtaaaatacggtactgtagacagagcaagcgaatttgccttggctcccactctgctggcaggatttgtttttatgctgatttatttgtggcaaaaaggctatttgacaggagataagaggttatactctccagtgtctgtatcttatttatcttggagtgctatgatgggaatttccatgatttatctgattgattttttaatgtcccatctcacatttttgcctgactggctgagcgatacttttgatttattgcaatccggttggttagggattatttgtgtagctatattgggacccattttggaggagctactgtttcgtggagcaatcactaaagttcttctgaagaagtataatccgctagtagctatcttaatatccggtctgatattcggtatctttcatatgaatccggcgcaagtggtaggagctacgctgatcggttttattcttgcatggatctattataagacacatagtctgataccttgtattctgattcacatcatgaacaacagcctttctgtctatcttgctcttaaattcccgaatgtggaatatagcagtgaattaattggagaaaaagcttatctgacaggtctcgtaattgctttccttttgtttatattgtcctggagaatgatgaatacctataaattatctaatacaactactgaaatatgaaaaggaggttgaatattctttgcgtgatcgtattgctcgtgctgggttattcggttttagaaactacttattatgtcggtttgggaattaaggccgggatcgagaaaggttttgactctaagattgatgcaaaggctaaagaagagatcagcaatgtgcaagtagtgcaactggtaccaaaagatttaggcggagatatcttgattgattctgtttataatgaaaaaaccggtgaatatgtacctgctgcttacgggcaaatgatagtcagtgtgaatacacaacccagtgttttatcacggattgtttctctcctgattcttattttaaactatgttgccattgtctgggctgtagtactttttatccgtcttattgtgtcgatcaataaatccgatatattcaattggaagaatgtccggcgtctcagacgtttaggaatactgcttattattggttttgtatgtaccttccttcttgcgtttctgagttttcataacgtggaaaaagtcttttcagtgacaggttattcattgagtatggcggatatggtgcatattacttctttggtattggggatttcagccctgattgtagcagaagttttcgctatcggactgaaaatgaaagaagaacaggaattgacaatttaaagaaatgatacgattatgaagaaatttagaatattggggatattagcgatactggtgattgtaggagattttgccatttcttttactgccggttggcaagaagaacgtgacagttttctggcgggaagtaaaagtgcccgtgcggaaacgccagccttgtacacgcctgaaggtatccctgtggaggtacgacctttggaaacaacaatattggattcattgcgtaatagtaaaatgaatgaaaaccttccttacaaaatagataaagtaagtgtggctattgttccgtcgacctggagtagtattgtgttttgctttggtgcatttgctgttttggctattcttgccggaatttactgcctgatacgggttttaatttccatatcgaagcgtaatgtgtttactcatgacaatgtggtaagaatgcgcgtattcacttattctttattagcttttagtatcttgaatgcgttgatggaatggctgaattatattgaagtggtgaaacaagtgagtctgcccgggtatgaaataaagggtttcagcatgtccgaagattgggtatcattggtggtcattgttctctttaccgagatatttgccgtaggtgtgaaaatgaaggaagaacaggatctgactatttaatcctaaccttgataaaagtgatttatatgattatagtaaaccttgatataatgatggctcgacgaaagatatctttaggagagctggctgaaaaggtggatattacacctgccaatttatctattttgaaaacgggaaaggcaaaagctatccgtttctctacactggaggctatttgcaaagtgctggactgtcagccgggagatattttggaatttcaggaaggagaagaataaaatagcatttggggactgataggtgtttgtaaaagagagggaggatttggaatttctgaatcctccctctctttaattataactagtatctgtttatactatttagtggcctatttgtccaccatatttatgatgatatacttgtatttgattgatatgcaatggtatgtcttataaatattaaaatgaatttgtctatcttgataatgattatttattgagggaagatgcctacatttgttattaataaatagtaaatggatgagaataaaacagaatagtattctaataacattattgtttgttctttcaatagggttaataataatgactagaaataactgtcaaattaatagtaagttaaaggaatgtaatctgaaactgctagagaaaagtattgcattgggctctgctgtttgggcaataactcaatgtcataaatacactaatgagagaattaaagatttagatctgatagttgataggcaaaagcgaccttttagtcttgaatttaatgatggatataagcttttttataaattttctctttcggattgcagtagctgtattgaatctgaattgaagaatattacgggaaaaatgaagtctgttaatattcttattgagactcaaagtttgagagattttaaggcttttgtagccattaatcatattgatacagctaaggtctttcaaatagaaaaaccaatattggaagaggtagaaccgcctttctattttgttacgaatagagaactatatattaaggatctttttttcccgatgtcagaattaccagatttggcagttgaattttatcaaatagtacaagataaatacctgaattaatgtttaattttaaattttagttattatgaaaaagaaggttgttgttttatttacaatttgttttatgttcacatttgtgcaacagtattttaagcagagctcagagttggcagattttattaattctacattggcgaatgtagagtctcttgcgcaggatgaaaacggacctaatagttggttacagcctgacgatgtaagatgtcactataaaacggaagatggctgggttcatgttactacagaaacaatatgtgtgttttgtgctgtaccctattcctgtactcctgtaggttgtggaagtggatcttaaaatttaatcattatgaaatgtatatatgccgttatattgtttcccttctttcttcattcctgccaaagcaggaataagaaagaagacgtattgttttcgatggagaatattactagagcaaatttacaaactataacagtagaagtggaagatttcaattttgaagatttgggaaattttctagaagttacttcttatatccagttgactgcagagcctttgcttgcctccatacaggaaatacaaattaaaaatgagaagatctacatacatgataaatttgccagaattatttgttatgatatgcaaggtaaaatgatttttaagatagatgccaaaggagcaggaccaggtgagtatacggatgttaatacatttgttattaatgaacaaagcagggagttaattatttatgataatcataagcaatctcttttgttttataatgcggataatggaatatttttcaaaacacaaaagctcgttaagcctgatcctacagcaatggcttcgttgggaggagtttattattatgataataggtatcatagtaactatccgaatgacactgatctatattattccttattagtctcaaaaaatgctatgactatggaccggcactattttccacacaatgatgctgaatcttcttatcgctttagacctacgaggcaaccattcagttataatgattcagtattgtattattgcagaaattttgataacgtaatttacgaattgaatccagatagcttaaaagctctatataaaataatgttgccggatcctttgccattttctaaaatagaaaataagataaatggatgggaattggtaaagtcaaaatattctctgggattagaaagtatatacaaatgtaataatcttctttatttccaattttcaaaagatggctttcttcaatctgctctatatgatttaatccaagagaaacagatatattgtggtaaaagattgactgataaagttggtaaatcagttcctatctttcaattaattgatggagtttataaaggacaattttggggtgttttaaccccggaaactataggatatgctttgtctaaagagcccaaagattatcctgatatatttcgtaaatatgatcctgatacagataatccaattattgcgttttataaggttgttcaatgattgtatggaaaataactatgtattgtggaaagtctattccccttatcaaagcactattgataaggggaatatctatttatttactattatctttcgctttgaaagccagcgcatacatccgcatctgcttcaccatagacagcaaaccattgctacgggtaggagaaagatgttctttcaatcctatcttatcaataaaataaagatcggcatttagaatttcgtccggtgtatgcccggaaaggactttcatcaacaacgaaatgataccttttacaatcaaagcgtcgctttctgctttgaagataatttttccatcctcttcgtcagcttgcagccatacacggctttggcaaccttcaatcagattctgttccgtcttatatttttcgtcgagcggttcctgctcgtttcctaagtctatgaggagttgatagcgatccatccagtcgtcaaagtcgctgaattcggtgatcacttcgtcttgtaattcattgatactcatgttgcagatttatgatttataatttatgatttatttttcgctgtagattacttgcattacagtttgtcctactgcttgcaatgtagctttatcaatggcatccatatcatctttcacggtgtgccaatgctcaaagaaatctccttccggatagtaagggacgatatcgattgtcgggattttcgcatacttgttgatgaacgtatggtcatcggtaacgaaaccgccttttttctgtacaaaataacgcccgaagcctaaagcgttggctgttttccagactttctcattgacattgggagctacttcatgagacaggctttcataacggaattctgcatttttgccacctaccatgtccagcaatataccgaagcgtgcattatatccctgtacgtgcgggttgcgtgcccaatactgtgagccaagtccccagtattcttctttatgcgggccgttgtaagcctggtgtgttccataatcttcagcatctacaaaaacaatatctatacccatttccggcaactgtttctgcaaatgacgtgctatttccaataatacgcctacaccgctggcaccgtcattggcacctaaaatgggggtgtaatgctttttagcgtccgggtcagcgtctgcccatggacggctgtcccaatgagaaaaaagtgcaatacgcttttttgtatccggtttgtaggaaccgatgatattccgggcctttagtaatgtgccggtataggcaggtaagtctacatattggctagtaacctttgcaccgaattctgtcagtttattagccagataattgccacaatccacatgtgctttcgtattaggaacgcgtggaccgaagtcaacctgtgctttcacatactggtaagcactgtctgcgttgaactgtggaacattgacgacgcttttggttgttgtttcagtgtcgtcgcttgtcttcttggtattgttgctgcatgctatgaatgcaagcaacaccaagcataaagggatgagagtataattccgtttcattctttatctaaattaaaacttagtttcacttcttttcttccggtctccagcgttacttccgctccgtttatcatgggcaggttcatgctgacatgtcctaccggaaaattaaaacagacggggtaatcgtattctttcacgaggtcggcaattgcaccgtataactctttccccaaagacttgttttcctcgtattccgtaaactgtccgataataaggccggatagtttttctaatataccgcccagtttcagattgtagatcatgcgctctactgcatgcggacgttcgcctacatcttctataaagagaatggttccttcagcgggaatatcgtaaggagtgccgcgcagcccataaaatacggacaggttgccacctcgtaaaatgccgctggcggttcctttatggtttaatttgtgtccggggcaaatatagctgaaaccattttctgagatttctacagattctgctgtctccggattaaaatgtccaaagaggatatctttgagtgccaatgtgcagaaatcatcttcggattctaccgtcagatggcgtgccatcagggcgtggagtgatgcaaaaccttctttctggagcacattatgtaatgcggtaatgtcactgaaaccaatcagccatttaggatgttcacgaaaacgggtaaaatcgagcttccctaacaggtgcactgctccgtatccgccacggctacatagaataactttagccttttcatcatccagcgcattctgtaaatcttctacgcgctgtttgatgctgcctccatacgttccgtgtgagcttccgacatgtttagccattaccacttccagtccccaggatttcaaacgctttttggctcctttcaaaaaagacttgtctatcttgctggaaggagaaaggatgatgacacgatcacctttttgtacgtatgacggaaaaataaggctgttcataattcaatattttgcgtatggggacaaaagtacataaaataactcaaaacgaaatttagtttacaccacagattacacagattaacgcagattattacttttcaccatgattagaataaatctgtgttaatctgtgtaatctgtggtgtaaactatcaaaatgaaataaggcttgcgaaatttcctggagtgttatgctgcatttctcgacattttttcagatatttgctaaaaatctaacgttatggaacctattcgaagctttgatcaactaacctcacacttgaaatccttgaacaaaaggaaacgtattgcagtagtttgtgctaatgaccccaatacggaatacgccattgcccgttctctggaagaagggattgcggagttcctgatgattggcgactctgcgattcttgaaaaatatcctacattgaagaaatatccccagtacgtccgtacggtgcatatagaggatcccgatgaggcggcgcgtgaggctgtacgtattgttcgtgagggtggagcggatattttgatgaaaggcattatcaatacagataatttgttgcatgctatccttgacaaagaaaaaggtctgttgcctaagggtaaaatcctgacccatctggctgtaatgcagattcctacgtatgataagttgctgttcttctcggatgccgccgtaattccgcgacccactttgcagcaacgcatagagatgatctggtatgccatccatacttgtcgccactttggcatcgaacaacctcgcatttcacttattcattgtacggagaaggtaagtgccaagttcccccattcgttagattatgtcaatatcgtggagttggcggaggccggagaattcggaaatgtaataatcgatggtccgttggatgtaaagacttcctgtgagaagacaagcggtgatatcaaagggattgcatctcctatcaatggagaagcggatgtgctgatcttccctaatatcgaatcgggaaatgctttttataaggctgtatccttgtttgcccatgctgatatggcaggtctgttgcaaggtcctgtatgtccggtggtgttgccctcacgtagtgattccggtctctctaaatattatagtattgctatggcatgtctcacttgtgcctgtgactaagtggcagggtgataaagtaggtgatcctaatcgtaaattgtaaatcgtcaaatcttaaattatgagaattcttgctatcaatcccggttctacttcaacgaaaattgcagtatacgaagacacaactccgcttttggtgcgtaacattcgccattcggtaggagaactttcccatttccctcgcgtcatcgaccagtttgaattccgcaagaatctggtaatagaagccttaaaagagaatggtattccttttgaatttgatgccatcgtagggcgtggaggattactgaaacccattccgggtggagtgtacgaggtgaacgacgccatgctggatgatataacccatgccatgagaagccatgcgtgtaatctggggtgccttatagcttccgaattggcagcattgcttcccgattgccgtgcttttattgctgaccccggtgtcgtggacgaactggatgagatagcccgtatcacgggttctccactgatgccacgtattaccatctggcatgctttgaaccagcgtgccattgcccgccgttatgctgccgagttaacagccgcttctcccgatcatccggtgcactatgaagacttgaatctgattatctgtcatttgggtggtggcatttctgttggggctcaccattacggacgtgccattgatgtgaataatgcgcttgacggtgaaggtcctttctctcccgaacgtgcgggaacattgcctgccggacagttgattgatctttgttattcccatcgtttcagaaaggatgaactgaagaaacgcatttccggccatgccggtctggcagcgcaccttggcactacggatatacctgccatcataaagtctattgaagacggagatgaaaaagccgaattggtgctgaatgccatgatctatcaggttgccaaaagcattggagctgccgccgttgcgcttttgggtaaaatagatgcaatcttgctgacaggcggtattgcccattcagagtatgttatttcccgtctgaaagagcgtgtctcttttcttgctccagtgtatgtgtaccctggagaagatgagttggaagcgcttgctgttaacgttttgggagcattgcgcggggagttgccgatacaagtctataagtgatgattggtgggatataagcccgacggttgtttggtcatgcattgacttccgaggaaaagaagcaacaacagaatcctggttattaataatggatgataaactgacatataccagtctttatgtgtatctgaaaatatagacaaaaaaaggagtaaagtcccccaaatgactttactcctcccaatctttttttcctcgtaactaatacggagaaaaacaccactaatcaaaattctataccttggtcttattggaatttagaaattattctttccggcatcccaccagagacgagtaccacctgtgtcggcaccacccagtgctcttgttaatgaactgtactgagtaggattagatgttttcagaccttccggatatgggagacgacggatcatctcatctgtgttaatggcaccaccgctattattcactttgactttaaataacttcggataaccggtacgacgttgctctgtccatgcttcattaccttcgggatatatggcaagccatttctgtgtcatgattttctcaaattgttcttctgtaccgttggcatccgcccaattaggagtagtagtgatgcgtgcattcatatcgaattgggtatcgaacggatctttgtaatcagctggtgtcttgtcactttgcaggtaagcatcaactccacctactccccattgctcaaaggatgtttttacacctgtctcatagcatattttgggatcttctgtagagatgcctcgtaaagcagcttctgcacgaaggaaccatacctcggcagcagtcattaaaatagggttcgttttttgactgactgtgctctttgaacattctttatagcgattgtcggcagaaagcaagccggttccctgtggtacgcctttgtagcttccagcgtactcaaagagctgcggaagttctttcactacatcgttctctttccatgtgataactgcaccatttgccggatcataatatttggacatgcgtggatcatcatatccggtcagtacagattccatggtggcccccatgaagacttccccccatgacttgttgatttcacccagcggattattgtagccgccggcagtcgatacggaaataatctcatttggtgcttccaggaattgctcgagggtgaatgatttctgagcttgctcggtggcaagagctttgtctacgttagcaacacgcatggctagacgcaaacgcaatgaattgccaaatttaacccattctgccaaagtcttgttaggagtcagcatgtcggcgtctttatacggctctacgccgggattgtccttgataaaactttgtaaagaagtgattcctttttccagatcggtgaagaattgtttgtaggctgtcttcagatcatctacattgtcaccttcctgtccgaatttactatataccaatggtccgtagcaatctgctacacggtgcatcaattcaaccttcaatatttgggttacagctaacagcgcaggctgctctacgttgatttgttcgcacttctgtacttcgggcataatgtacgagtaattgtatgtccagtgagtagaagtccatccatcgttcagtgcatatacgctgttcttatcattgaaaccttgattgaaatcatggaaatagcctgagaacatgtcttgccctaaattttgtgcgatttggaaagtccagtttttaccttcgccccagtcgtagttaaagtagataccactctggattatttcaaacttcaacagatatttttggaaatcatattcctgcaattcggagtcaaaccctgtattgtttctgttatctgcttcaaaattgtcggtacatgcgactgcgatacccagcaatccgcttgcaaaaagtatggttaggaatttattatatttcataatcgtaaatgctttaagttagaatgtgaatttgatattgaaaccaatgtttctggtagaaggcatgccgaatacatctacaccttgaagtgagttgccaacagataaggttgcatccgggtcgaacggtgcatctttgtagaaaaagaacaggttgcgtgctaccagcgatacatcgatacccttgaatgccttcgtcttttccagcagtgattgcgggaaagaatagccgattgacaattcacgcatacggatattggtagcatcatacatataatattcggatataccattacgaccacctactgatttaaagaatggtttaatatgattctcgtcgaagcgagttccttcgtattctatgtaacctctatcacgggcctgtgctgttgctttggtcacgccattttggtcaaggactgcttgtgtcaaggacatgacatcaccacctacgcgggcatcgatcaggaaatagagactgaatcctttataggtaaatgtattactccaacccagtaagcagtcggggtttgcattacccagatagtcgttgttaccagtctttacaagaggacttccatcttcattgagctttatttttccattctcacgcacgaatgcatttccgtagatatcgcccagggaaccaccttctttgatgcgcatcaggtaagccatagaaagtccggaactaccataaatgaatgaagtataatccgggtgaagagaaatgacttcattgctgttcgttgagaagttgacggcagttttccaacggaaattatcattcataaccggagttgcatctattgttaattctacacctttattacggatcttcccggcattgatatagcgatatgcatatttgtctcctgcggcggtgggcattcttaacaattgattctttgtatcagtctgataccaggtaaagtcaattcctaagcggctttggaagaatctccattccgtaccaaattcgatagaactactgatttccggtttcagatcgcccttattgtatgtgtcggctgcttgcaatacaccaccggcctgaataatatctacaaggttagtgataccgataggcaggtcgttacctacttgtgcccatgaaccacgtactttaccaaaggaaatccattccggtagttttaatgagttattaatgatccaggataaaccaacggaagggtagaagaagcctgaattcatactttccgtatgagccaatgtggaagaccagtcattacgtgctgtaatgtcaagatacagggcttcgtcaaagccgatttgtgcagttccgaatacagactgaatggtacgtctctgatcaatctcctgattgatggaggcattggagcccataacgatattggcaaccgtaaataagttaggtttgtaaagtgaggcgattttagagtcgagcatcagtgagttgactttattcttgttgatactggtaccgacagcggcattcaatgaccatttgttccatgttttattgaacatggccatcacgtcggcataaatctggaattgttcgctttccgaccaaacataacgtccgttactcttttcgttataggtacctgtaatattgggagctgtagatgcatacattttctgatcgaacttgtcgcttacatagtctgcattaccacgggcttgcagggttaaccaatcgtttattttcaggctggcacttagggatgccatagcgcggtaacgcttattggtgttggtaacacgattcttaatccagtaaggattttgtgaccattcggaaacgtctgtataccagttttgtacaggcataccatttcttgtcgggtcggctacttcaaaattagtagcatattcagacatgtccattccacgtgggaaactgtacaggtcgaccaatggattcaggtatatacctccggatgcagtgctattcttaatcttttgtgtcatcagggtagcatttccatcgagtttcagacgatcattgaagaaactcgctgtttcgcggaacgtaaggttgtgcttttgtaatttgttggaatcaatgatacctttggctgtagtgttggcataagagaagtaagtctgcatcttctcgtttccgctttgtacggatatggagttaatagcggttacaccgttaccgaggaatttgccaacattatcgtagtcggttaatgactttttttctccccaactgtcagttccgctggggccatacgaattctggaattccggcagactgatggcatgatcgatggtcagatttgaagagaaagtaactctttgcatacctgctttacctttcttggtagttattaagataacaccgttggctgcttgtgatccgtaaagagcggcggcagaagcacctttcagaatgctcatactttcaatgtcttcgggattcaggttggagataccatcaccggcgtcacgattcacaccgtcattttctccacccataacggtggaagtagattcggtagtcgtatttagcatagggacaccatcgatgacatataacggttggttattgcctccttcgtaagcggaacgtgtaccacggatagaaactttggctgagccaccaaggccggatgcgctcttattgatttgtacaccggctgatttacctgctaatgcggttatcatattcggatctttggcgcgtgttagttcatcgccacccacttgttgggttgaataagtcaatgaagctgcttttttcttgatacccatagccgttaccacaaccgtttccagtgacagggcttcttcctgcatctgtacattgagagttttctgcccgttgagagcaatcgttacaggctggtatccgataaagctgataaccagcgttgcattagtcggtgtatttagtgaaaactcaccgtctatattggtaatgcaaccgtttgtagttcctttttccacgacattggcaccgataatgggttcaccttttgtatcggtaacaacaccttttacagagatattttcttgttgtacggtagcaatgatttcactggccttttcattttgtttggtcaacacaatattcttgccttccattacatatctgatgtcggtaccattaaagatttcgtccaaaacttcggacaccggttgattgtctgcatctacatttacggtgcggcgcacgtccacacttttcttattgtagacaaacaaatactcggtctgagcctcgattttatcgaggatttcgcctactcgtaactcagaacgggggatgctgattcttgtactctgagagtaggtagcgtggctgtacgcctggaacgttacaaacaaaagaaggaatagtgtgatcttcatagttcgtaatatttgcttaaatactaaactttttgggcaaaaaagcccattcaaagaaatttttctcatatctttgtaatgtgttaagttaataaattgattaaggtcgatttttgactgtttcggatcggaaagtatgggggtactttccgatcttttttgtaggggtaattagcagactgtttcttttatttcataatgcttttcagtttaaggggttagtactaaattttaaggttttatctttgatatcaaattatttctcgtaaatgaaaatcgaatctttttcttcgttgatgctgaattcaaaaggatggtcttttgaaatggttcggagaatatgctctataccatcctgttcgcggaattttccggtacaactgtcatagttcagcaatttaggatcggaaacggttatttttacattatagtacatttcaagtttagtgaggatgcagctgaacggcacatcatcaaagcagtacaatccttctttccatcgcagatattcataagaagggagtattacctttttgcatttcccgtcatagttgccaaagaattcctctttctgtaagcgggtgataaccttattactgttggcaggataaatatccacaataccttctacaagggtggtttcaaactctttgcttcctgcataggcacaaacattaaagctggtacctacaactttcaccttattcatctctgtgtgcacgtagaaggggatatctttgttttttgccacttcaaagtaggcttcaccatccagttctacgtttctttcgccacgcccaaagttggaagcataggtcaatgtggactgtgcattcagccatacccgtgtgccgtcggcaagagtgatttgtgcacgttgtccggcggggacggttactgtttgtggcagggatgcctggttatatagataatcattagtcatgaaataaccgcatacgcctacgatgataacggctgctacgcgtattccccattttagtatcggagtcagacggaaggtcttttttccggcactttgtctgtcggagaataaggcgacatcaaacatcatacgttctttcaagaaagcttcccgattttcttccgaggcttccacccagtcaaggatgcgcttttcttcttcaatggtggtggttcctttaaaatacttatataatagttcttggttcataaggtacttaatttgtttgttgaataagggtgtttttttctgtccctctataattaatacaggtgaacttggaactaccctaacggaaaatgaaactttttttgttttttcttcgaaatgagttggaaacagagaaattgtcgggaagtgatgctctggaagcaggcggaatgagatgtgtaattttggtcaggaactcttctgaaccgcatccagttcgttcctgcttcgcttctataggaggatgaaaatagcgaagcaggtacgaggagagtacgaagaagataggaaccgggtatagagcggatcgctttgttctgtttttcgggtactccaaacgtaaacgcatagaatatccgtgtgatgcaccggaggcacatcaggactttatggaatgtgacaggaaattaattaattgccggtattaacttgccggattgggaattatggatacaatgtaacattcatccggagcttcggctttaaatagattgtaagcaatgcctatggcttcctccggagagtttgcttcaatattcttgttgacattcagagtctcgaaaacttgttctccctcgataagcacgtagtatattattacaatatatctcataactaccatgtttaatagccagcaatattactgattttgcaaacatatatcttttatttatattatcaaagaaaagcaggagagttttactaaagtaggatagaggcgagataatctttcagttccacacgcagaatacgtagggctttggtgatatggaattctactgttttgagagagagattcagttgttcggctattttcttgtttggcaggttgctgtaacggctgagcataaagatttcgcgactttgtggtggcatcttgtccaaggctttgtttacgatatgctgtatctctgtactgaaaatcttgtcgggctcacaatctttcaacgtggcaatacgcaagtctaactcgcgctgacggtgcgaatttaaatcttcctcaatacgcaggcgagtttgttcgtgttccaggtaattgagtgccttattcttgataatggtaaggagcaatgcgtgcagacctttatcttcttcccagcggtcgcgacattcccacaaagaaatcatagattccataagaatatcttcagcttctgcccagcttctgatgtaggaataggcaaaggcaagaaacttttcctgattctctcgaaagaaacgagaaaataaatccatagtatgtaggtttccggctaaaggcatttttaaatattctctctcttatttaaggtttatatggtaaagtaacataatctttttggaatacgcaaaagtcttaaaagttttttcttcctttttttacaaaaagaaagcccggcgggtttccgtcgggctttatatactgaataataaggtgtttcttatttcttttcaggtctttcttgtctttccggtctcggaagcaatactttgcgggaaagtttgaacttaccggttttcggatcaatatcaagcagtttcacttcgatttcatcaccttccttgataccggcctcttctactgtttccagacgtttccagtcgatttcagagatgtgcaacaaaccgtctttacccggcaggaactcaacaaaagcaccataaggcattacagaacgtactttacctttgtatacttcaccaacttccggtacggcaacgatgcccttgataagacgcatagcgtcatcaatgctcttcttgttagttccggagatttctattcttccgatgttgtctacttcttcgatagtgattgtagcaccggtttcttcctgcataccttggatgatcttaccaccagggccgattactgcaccgataaactctttaggtatggtcatcgtttcgatgcgcggagcatgaggtttcagttcttcacgtggttcttggatagtttccagaatcttgccaaggatgtgcatacgtccttctttagcctggttcaaagcgcgttccaggatttcgaatgacagaccgtctaccttgatatccatctgagtagctgtgataccattcttggttcctgttactttgaagtccatgtcgcccaggtggtcttcatcaccaaggatgtcggacaatacagcatatttgtcttcgcccggattcttgatcaatcccatagcgatacctgataccggttgtttgatcttcacacctgcatccatcaatgccagtgttccggcacatacggtagccatagaagaagaaccgttagattcaagaatatcggatactacgcgcactacatacgggtagtcagcaggaatttgccctttcagtgcacgccaagctaagtgtccgtgaccgacttcacgacggcctacgccacgttgtgccttggcttctccggtagagaacggagggaagttatagtgcaacaggaaacgttctttgccatgttccagtacgttgtcgataatcttctcatccagttttgtaccgagggtaacggtagacaaggattgagtttcaccgcgagtgaagatagcagagccatgagggccaggcaggcagttgatttcactccagataggacggatctcgtcagtcttacgtccgtcaaggcgtttaccttcgtccaggatgctgcggcgcatagcctctttttctacatcgtggtagtaacggtcgatcagtgctgctttttctgccagctcttcttcgctgaactgtgctttgaactcttcgcggatagcatcgaaagcatccatgcgttcatgtttatttttgttgccggaagcggcgatggcataagcctttgcgtagcaagcttcgtgaacggctttacgcagttcttcatcgtttacttcgtggcaatattcgcgttttacggtagaaccaacagcctctgccagttctttctgagccaagcattgcactttgattgcttcgtgggctgctttcatggcgttcagcaagtcaagttcggaaacttcactcatttcaccttctaccatcatgatgttttcgtaagtagcacccaccatgaggtccatgtcagctttttccagttgatcgaaagtagggttgataacgaactgtccgtcgatgcgtgctacgcgtacttcggaaataggtccgttgaaaggaatatctgaaactgcgagggcggcagaagcggcaagccctgccagtgcgtccggtatatcaataccgtcggcggaatagaggatgatgtttacatatacctctgcgtgataattatcggggaataaggggcggagagcacggtcaacaaggcggcaggtcaggatttcataatctgaagcgcgtccttcacgcttggtgaaaccgccgggaaaacgtccagatgcggagaatttttctttgtactctacctgtaacggcatgaaatctgttccgggaactgcgtccttagcggcacaaacagtagcaagaagcatggtgttacccatacgaagcattacagaaccgtctgcctgttttgccagctttcccgtttcgagtgtgatggttctgccatcagggagctcgatcgtcttaacaattgggttaatcataaaaaatgttttatctatattttctttcaaaattcgtgcaaagatacatattaattcatgtaatcaggtgggaatgagataaaaaagtttataattgactatttttttaggtttccatgtggaagaagcaatgaaaatgctttgactaaacttgaaaagaactatatttgcacgttctttctaatagaaattaagaagctaaatatgaaaaagatctgttttgttgcacttgccgctttggttttaagtgcatgtaattctgaaccgaaattcaaagttgaaggtgaagtttcaggtgccgacggcaaaatgctgtacctggaagcggctgctttggagggcatcgtgcccttggattctgtaaagttgaagggtgacggttctttcagtttcaaacaaacacgtccggtatctccggagttctaccgccttcgtgtggacgacaaggttatcaatttctctgtggattctacggaaactatcggactgaaagcgccgtatactgattttgctacggcttatacggtagaaggttcggcaaacagcactaagataaaggaattgacgttgaagcaagtgcagttgcagaatgaggtgaatgagttggtgaagaagatgcaggctcatcagataggtgccgatgtttttgaagaaaaactggctgccttgatgaaagattataaggatgaggtgaaaactaaatatatttttgcagctcccaatacggctgccgcttattttgctctgttccagaaactgaataattaccttatcttcgatcctttgaatagcaaggatgatattaagtgctttgcagccgttgccaccagtctgaataattattatccgcatgcggatcgctccaagaatctctataatattgtgattaagggaatgaagaatacccgtacaccgcaacagaaagttctggagttgccggaagaagttatttccgaaaccggtatcatcgatatcagccttcgtgatatgaaggggaatacccataagttgagcgatctgaaaggtaaagtagtcttgttggactttactatttaccaaagtgcagcttctgctccccataacttcttgctgaatgacctttatactaaatataaagatcagggactggtgatctatcaggtttcactggatgctgacgagcacttctggaaaacaacggctgataatctgccttggatttctgtaagagatgcaaatggaatttactcaaatgtggccgctatgtacaacgtaaaggaggttccttctctgttcctgattaatcggaatagtgagttgagcgctcgtggagagactataaaagacttggacgctgcggtgaaagcactgttgtaacttgttataaattagaagtttttatttaaatatgttacatagcagcaatttttgcttgacacgcattaattaaaaggctatctttgcaaaagaaaaatcggaagagggttccagcatgctgaccatgttggaattcttttttgttatataataccatttagaaactaaaaaggaggaaaaaagtatggcttatatgtcagaagaaggctacaagaaattgatggccgaactgaaagaattggagacggtagaacgtcctaagatttcggctgctatcgccgaagcacgtgacaaaggtgacctgtcggagaatgcagagtatgatgccgctaaagaggcacagggcatgcttgagatgaaaatcaataaattgaagacgattatagcagatgccaagattattgatgagtccaagctgaaaacggattccgtgcagattttgaacaaggtggaactgaagaacataaagaatggcatgaagatgatttataccattgtttcggaaagcgaagctaatctgaaagaaggaaagatttctgttaacactcccattgcacaaggtttgcttggtaagaaagtgggtgatgtagctgaaatcaaagtgccgcagggcatggttaatcttgaagtagtgaacatatcattttaaagtaaaggcaggtccgcatgcgggcttgccttaatttatatatcataaaagttatggcaacaatattcagtagaattatcgcaggtgaaataccaagctataaggtggcggaggatgataagttctttgcatttctggacatcaatccgctggtgaaagggcacacgctggtcgttcccaagcaggaagtggattatatctttgatctggatgatgaagatctggcagcaatgcatgttttcgccaagaaggtggctcgtgccattgagaaggctttcccttgcaagaaagtaggtgaagcagtgattggtctggaagtacctcatgcgcacattcatcttattcctatgcagaaagagtcggacatgctgttctctaatccaaagctgaaactttctgatgaagaatttaaagcagttgccgaagcgattcgcgctgcattctaaaaataaaactccttccttttataataagaacgggggctgaaatggattcagtccccgtttcctttattctggtttgaaagtctatgctttcaaattccgatatccggttagatgtaatcttcccctaattttatttgtgcgtcgtttacgtatttgcggatagaatgttcttcatccttcttgcaaatcagcaatacattgtccgattcagcgatgagatagccttccagtccatcaataacggcgagtttattttgtgggagcaccacgatgttgtctttactgttgtacattagagactcacacttcaaggttacatttccttctttgtcctttggggacaagtcatacaatgaaccccatgtacctaaatcggaccagccgaaatctcctaatgaaacatatacattgtctgctttctccatgatgccgaaatcgacggacacattggggcatgcagggaaattttcgtcgatgaatgctttttcggcaggagtaccgtatacatctttaccaggaatcagtttgcttgccagttcgggaagcagtgcttccacggccttgatgacagagtttacattccacatgaagaggccggagttccaataaaattctccgctttctacgaaaactttggctaactccagttcaggtttttcggtaaaggtcttcaccttgtagaaattatctcctgcttgttcggctatctgaatgtaaccataacctgtttcgggacggttcggtttgataccgagagtcagtaacttttctgattgagatacgaacatcaagcctttttcgatggcatcaaggaattctccttccttcagaatcaaatgatcggatggagctactacgatattggcattcgggtttaatgcgcgaatgtgataagctgcccatgcgatacacggagcagtatttctgcgtgtaggctccagcaagatttgttcgggattcaattcaggcagttgctcctttacaagatctgcgtataaatcgtttgtaacgataagtatgttctctgtgggaataactttattgaagcggtcgaaggtttgttgcagtaatgacctgcctgtgccaaagaagtccagaaactgtttagggagcgtttttcgactaaacggccagaagcgactgccgatacctccacccatgataacacagaaattatccttatttgttgtcatatcgtttgttttaaaagtttctgctaaagtacactatattttggaaacacggaatgtttgtagaatgttttatgacttttttctcctttttttaggaaaagtattgcaggtttagaaaaaagccgtatctttgcaccgcaattgagaaatcaagcatgcccagatggcggaatcggtagacgcgctggtctcaaacaccagtggattcacttccatcccggttcgaccccgggtctgggtactgaagcggagaaagttgaaaaactctctccgtttttcttttctactcctcgtaatttattgatttgggatcaggttgaaatgttatgctcttgttattagagttttaactctgttaaactattagctcttcttctttcagtttatctacgtgtatgaggacatttagtccttgtgccgcttcattaatcgttcaaagaacgggcaatcgtttgcttttgtccggtctgtgttgtatcagtatcttaagctttattgtataccaaccttgcttaatcggcttgtcaactaaggttgacaggtcgattgaccttggctaataggcctgttgaccaaggttgacacccagttattcctaagggtgaatgagatttctcctagttctggataagaatactcttgatgtaatacaaatgaataccatatactggggtaagtaactgctgtaatcttaattataaaattagtcaaccaaaaccaggacgagacatagtgagagtaacatctttactctcactcttaaaagttactctcactcacacttaatgtttttattattaatgatttgtctgtaaagtgagggtagtgagagtagatactatcaactttttattgaagactgagttcaagttataaatgcgacattttttctatttcatcaacatcataccctattttatatcacaacttatgtttaatgcggatataaatagcaaaaagatgaacgtaatatgcaaatttgtcattggatatttcttaggcatttattttttcctaactttgcaaaggatagttgagaagcttttgccattttatattttaatatttacccaatatgccaaatcagaatacacttctgtatctccctttgacatttcgaatacttgcggttgctattttcgcttgtttatttctggcgcccaaggcgatggctgatacgaaagatcaagagtatattgttcttatcagttcttccacttttcgtgagaaatgggcttatgatctgcttgaaactgtagaaaaggcattcaatgaagaaaattcggtgaaggtatattcggagactctcacaacatggcatttcaataatcaacaggaaataaatcagaaggttgattatctaaaggataaatattctgttcctccccaagccgtcatatttgtaggcgatccgggatggtacgtttgcaaaccgctttttgatactatctggaaaggggtacctacaattatttgccactcgatgccgcatacgtcggctgatataaataagtattataatggtgaatatatacctgaagaccagattatcgctacaccggaaatgctggaacggtataatgtgactgccataaatattcctgtctgcattaaagaaaccatagaattgatgaaggagattactcctgaaatgaaaaaggttgtcttgttatcggatgacagatttatctgttctctaattcggaaaaaagcagaagacatacatcagcagtacttttctgatttggatatggaatttattacttatcctcagacaaatacagaaacaatgctccgcattattagtgagtgtggtaaagagacaggtattatctactgttcatgggtgaatgtagccagtcagaatctgtctgagaaatattatcctgatgagagaatgcattcttatatttccggtatagttaaaaagccggtattctcgttgtctgaccagttcacaagggttcatgctttatttgccggtgggcattatataggcagttccgatgtggaaagtaccgttatcggtgaaattagaggtgcactgaaaaaggatggtacatacggggcgaaaacggttgttgccggtacgcccaatacctatcttaattaccagacattgcttgacaagggagttccattagataactttcctaaaaatgcggtttattgtgatgttccgcccagttttatccagaagaatattatttatgttgtaattgtattgggtactgctattgtacttctgctattttactttatgcacaagcgtatcaaaaaagtgagagaaacggagtggcaagagcatctgcatttgcttgaaaatattctcgataaccttcctattgcagccaaggtgaaagatatcgataatgatatgcgttatacttttataaataaaaaggctgaagagctctttgaatatccggctaaggaggcgattggaagaactgatttcgatataatgcctgaggctgcaacgatgatcaggaaagaagatgaagaattggtaagaacgggaattgcccaatttggtaccaggcgtttctttacgaataagaacgaggaacggtttactttccagaataataatattgtttcattttccgacggacgtaagtggattctctatacagcctgggatattacagaccagaaaattttggaacgcaaactgcgcctggctaaggaagaggctgaagagtccaatcgtataaaatcagctttcctggctaatatgagccatgaaatacgtactccgctcaatgcaatagttggtttctcgagtatactggctgaagatgtatcggaagaagaacggatagaatacctcagtatcattagtaagaacaatgatatattattgcaactgatcaatgacatcctggatttatcaaagatagaagccggtacactggaatatgtctatgcaaatatagacgtaaataagatgttatctgaaatagagcaggctgccagaatgagacaaccgaatgcgaatgtcgctatatgtgcagtgatgcctatgccggatcttcttttatatactgaccagcgtagaattactcaggtactgaataatttcatcagcaatgccatgaagtttacaaatacagggagtatcacgtttgggtatgaagaacccaaagatggttatatacgtttctttgtgacagataccggtaccggtatccctcctgaaaaagtggcggatatattcaaccgttttgtaaagctcgattccttcaaacaaggaaccggacttggactggctatttcacagaatatcgtgaaggaactcaaaggcgagatcggagtgctgtctgagttggggaaaggttctactttctggtttacgctgccttatgaaaagatgggtgcacaccgttctatccttccataagtgatttctaatcattttctaatctcgtataagtttattataatccgttccggaagccttaatttttaaggagttgtacttttgcctcaaaattgataaaacaatgatgaggcagattacatttactctttttcttattttctcatgcagcctgtgggcgcaatcgaatccgttaaagttgacgatgaaggaggcggaggaacttttccgtacccacaatcttttactggttgccgaatattacaatgtagacatggcacaggcacaagtggtgcaggccaaattatttgataaccccattatcacattggagcagaatatttataaccgtctgaacggtaagtattttgatttgggaaaagaaggagagtccggagtgcagatagaacaagccatcaatctggccggacaacgcaacaaacgaatacgtctggaaaagattaatcaccaatccgctttattgcaatttgaggaagtagcacgcaccttaaacagtgagttgaaggaaacctgtgtcgaaatgtatttcctgaccaagtccgtgcagatttatgataaagagatcacttctttagaggaactgctgctattctacaagaatatggcagagaaagggaatatttcattgttggaattatcccgtatgcaggcattactgttatcactgaaaaaggagaagaatgatgcagtaaatgaattggtatcgaagagggggaatctgaagatgttattaaacttgccggtcgctcaggagatagaaatacttctggatgaaacgatgctgagccggttggatctgtctagtctgtcacttgctgatctggattccttgttaccttcccgccccgaccaacggttggccttctctatacttgaggcttccaaagcaaatttgaagttacagcgttcattgtctgctccggagtttgctattcaggggatttacgaccgtgcaggaaacttcatcaacaattattttgcagtaggtcttagcttctccattcctattttcaatcggaatcagggtaatatcaagtcagccaaactggaaatagaaaagagcctgaaagagaaagaatacacagagaacaaggcaaactcggaactgtatgtggcgtattcccgtctggaaaaggctatggaactttatcaatcagcagacgatgacttggaaaagaacttcaaccggctgcttgaaggggtgaacgagaatttccgtaagcgtaatatcagtatgctggaatttgtcgattattacgagagttataaggaaacgagtttacaattgtatgagacccggaaagatgtttttctggccatggagaacttgaatacggtagtaggacgaaatatatttaattactaagcaatggatatgagcaggattttacagatttttataggtgcagtactattcttgagcagttgctcgacaaaagataataatgaaacttcagtatctccggagatgtgtctgacagatagtttgatgcaagttgtcagtatagataccgtacatacacgtattttaatcgacgagttgacactgaacggtcgtgtgacgtttaatcaggagcaagtggtacaggtttttccaatgttcggtggacgggtgattgctgtgaatgccgaggtgggagactacgtacataaaggggaagtgcttgctgtggtaaagagtggtgaagtggcggaatatgagaaacagctgaaggatgcggaacaacaagtggccgtaacccgccgtaactgggatgttgcgcaagatatgtacaatgccggcatggcttcggcccgcgacacattgcaggcccgtcaggaattggtgagtgccgtgacggaggaaagacgcctgaaggaagtctattccatctataatctgtccgatgaatccagatatgagattaaatcaccgataacgggctttgtggtggagaagcatgtgaataaagatatgcagatacgctccgaccagggtgaagaactattcacggtatccggtctggataatgtctggattatgggcgatgtatatgagagtgatatccgcaaagtaaaagaaggtgctcctgtccgtatcacggcattggcctatcccggcagagagtttgcagggagtattgataaggtctaccacatcctcgatgaagaaagtaaaaccatgagcgtgagaattaaacttcgtaatgaagattatctgttgaaacccggcatgtttactaatatatatgtacaatgcgaatcaacggatgatacgatgccctgcattgatttacatgccctgatctttgagaatggaaagaattatgtagtgacggcaaacgaagacggcaagctgcaagtaaaggaagtggaagtgtataagcagttaaggaaccgatgctatatacaatccggcttgcaggagggcgaccgtatcttgaatagaaacacattgctggtatataacgcattgaatgctgaataacagataaagaacttgatatgcataagtttatagataacatcatagctttctctttgaagaataagttcttcatattcttttttacggtacttgcggttattgcaggaattgtctctttcaagcataccccgatagatgcctttccggatgtaaccaacaccaaagtaactattattacccaatggcccgggcggagtgccgaggagatggagaagttcattaccatccctattgaaatagcaatgaactccgtacaaaagaagacggacatacgctctaccaccttgttcggactatcggtggtgaatgtaatgtttgaagatcatgtagacgattttacagcccgtcaacaggtctataatctattgaatgatgctgatttgccggaaggcgttactccggaagtacagcctttgtatggtcctacgggagaaatcttccgctatacgttgggaagtgagaagaaatcggttcgtgaactgaagaccattcaggactgggtgattgagcggaatttacgttccgtatccggtgtggccgatattgtaagtttcggtggagaggtgaaaacctttgaggtcagtgtgaatcccaaccaattgaggaattacgatatttcctctctggagttgtttgaagccatagagaaaagtaatatcaatgtcggtggtgatgtgatcacaaaaagctcccaagcctatgttgtccggggtatcggactgattaacgatgtggaggaaattggaaatatcgttgtgaaaaatgtgaaaggtactcctattctggtgaaacacctggcagatgtgcacgagtcctgtttaccccgcctcggacaagtaggccgaatggatgaagatgatgtcgtgcaaggcattgtcgtgatgcgtaagggggagaatcccggtgaagtgattaaagccctgaaagaaaaaatagcctatatcaataaagaagtgctgccatcggatgtacagatcgtacctttctatgatcgtgagaacttggtagatctggctgtgagcacagtgacacgcaacctgatagaaggcatcctgtttgtgactttcattgtgttgatatttatggcggattggcggactaccgtggtggtggcagtggtcattccattagcattattatttgctttcatttgcctgcgtataatgggtatgtccgccaatttgttgtccatgggagccattgatttcggtattattatagacggtgcggtggtgatggtcgagggtatctttgtagttcttgacaagaaagcgcgtgaagtgggaatgccggcattcaatgtcatgtcaaagatgggattgatccgtaatgctgccaaagataaggcgaaagcggtctttttttccaaactgattattatcaccgcgctgattcctattttctctttccagaaagtagaggggaagatgttttcaccgcttgcttttacgctgggttttgccttgttgggggcattggtgttcaccttgaccctggtacccgtactttcggccatgctgctaaagaagaatgtacgcgaaaagaataacaggttcctccgctttgttaatgagaaatcatccgccttgtttgatgtctgctatgcttatcgcaaggtgacgattacgattgctacgtttgtggcagtggtgggactgtatgcgttttctttcctcggaacggaatttcttccccagttgaatgaaggctctatctatatccgtgccactttaccgcaaagtatagctctggatgagtccgtcaatctggcaaacaagatgcgggcgaagctgagaagctttcctgaagtgaaacaggtgatgtctcagaccggacgccccaatgacggaaccgatgccaccggattttataatatcgagtttcacgtagatatttatccggaaaaggactgggaaagcggctttaccaaactggaattgattgacaaaatgcagcatgaactggagatttacccgggtatagactttaacttctcccagccgattacggataatgtggaagaagcggcttccggtgtaaagggttctatagctgtgaaagtcttcggtaaagatctgtatgagtccgagaacaaagccgtagagatttataaaatattgggaaccgtggatggcatcgaagatttgggggtaatacgaaatatcggacagccggaattgcgcatagaactggatgagaataagctcgcacgctatggagtggctaaggaagatgtacagtccattatcgaaatggcgattggaggtaagtcggcttccttgctttacgaagatgagaagaagttcaatatcatggtgcgttataaagaggaattcagatgcaacgaagatgagataggaaaaatactggtacccgctatggatggtacgatggtgccgattaaggaactgtcggagataaagactatcaccggccccttacttatcttccgtgataatcatgcccgtttctgtgccgtgaaattctcggtccggggtagagatatgggaactgccgttgctgaggctcagaagaaagtgaatgccgcagtgcatttgcccgaaggatatactttgaagtggactggagattttgaaaaccagcaacgtgctactcaacgtttggcgcaggtggttcctgtcagcattatcatcatctttattattcttttcatcctgttttccaatgcacgggatgcaggtttggtattgctgaatgtaccttttgccgctgtgggtggtattgctgccttgctcataacccgctttaatttttcgatctctgccggtatcgggttcattgctctttttggtatctgtatccaaaatggagtgattatgatatccgatatcaaacacaatctgcaggcgaggttggcgttgcccgatgctgtaaaaaccagtgtgcgttccagggttcggcccgtgctgatgacggctgcaatggcggctatcggcctgatgcctgcggcgctgagtcatggaatcggttccgaatcgcagcgaccgctggccattgttattatcggaggtctgatcggggctactttcttcgctttgtttgttttcccgttgattgtcgagatcgtttatggtaaaatgttatatgataaagacggtagattgaagcagaaaaaactataaaacgtatatttgtgctttctttaagttttaaaaactatggcaaagatactgttggtagaagatgaagtcaatatagcctctttcatagaacggggattgcaggaattcgggcatacggtttctgtagcttataatggtgcggatggttggcagctggctcaggacgaaccttttgacttacttgttctggatataatcatgcccaagatgaacggactggacctatgcaggcagtaccgccaactctatggatacgattcccccgtcattatgcttacggccttgggtacaacagatgatattgtaaaaggactctacgcaggtgccgatgattatttggtgaagcctttcagctttcaggagttggaagcgcgtatcaccgctttgttgcgcaggagcaaggagaaaagaacttcggagcttgtttgtggtgaccttatcctcgattgcaataccaggcgtgcccgtcgtggtgaccatgaaatggaactgacggtaaaagaataccgacttttagagcacttcatgaataaccagggtgttgtgctctctcgggtgaatctcctgaaacatgtatgggataagaattttgatacgaataccaatgtagtagatgtgtatgtgaactacctgcgtactaagattgataaagattatgaaaacaaacttatccatacggtggtaggtttgggctatattatggaatctcattaaacggagaatcgtagtgaagataggaagtaaaatagcgttgttctatacgggtatcacaatatgtatgcttacctgtatcatggttgttttctattttttcatttataactatatcaataggctgtacgattcttacctggcagataaagcctatcttactgcccagaaacattgggaaaaggatgaagtagacgagagtagttatgaaattatccgtcaggaatacgaagggcttcttccccaggctaaggaaattttactgaataccgatagcatggagactgtgaaagatacacttgataagtatctgaacaaagagcagcagaagcgactattcatggaagagccggtttcattccgttataaaaaagaggtgggtgcggcattgtattacccggataatgaaggtaattttatagttctgatacttgcccggaacaactatggaacggagatacagaatcatgtgcttatcctgatacttcttttgttcattttcagttccatatcggtttatttcattggaaggttttatgccaatcgaatgttggcaccggtgaagcgtattttgaaagagctgcggcgcatccgggggaataatctgaatatcaggattaagacagccggtaaccatgacgaactggacgatctgatcacttctatcaatggtatgctcgaccgcatagacgcggctttcaagtccgaaaaatctttcgtaagcagtgcttcccatgaacttaataatccgctgacggccattcagggagagtgtgaaatcagcttgctgaaagaacgttcgccacaagaatatatcaaggctttgaaccgtatttcggatgaaagcaaaagaatcagcttgttgataaaatccctccttttcctttcgcatcaggatgaagaacttctgaagaataatatggaagatgtggacctggcagaacttctgatcatactgtgtgccgagaatgagcggatgcagttcagtaatacatttcagaaagagagcctgccagtggtaagggctaatctgcatttgctgaaaatagcaatccgtaatatactgaacaatgcctgtaaatattccggtgaacaacctgtagccgtgcggctgtatcctaaggaagggagcactattttggaaatagaagacaaaggtattggcattcctgaagatgaaatacagcttattttccaggcattctatcgtgcaaccaatacaagggaatattcaggtcatggtattgggctgggactttctttgaagatattatctatttatggagcgaggatggagattttatccaaactaaatacgtatacgagagtgttgataacctttaagtgactaatcattagactttggttttaaaataaaatgtatctttgtgtcggtcaaaaatgctatggagtatatttaatatagatattatgaaaaagaaaaacactcttttactttttttgtgcttgttcagtctgtgggcagtggcacaagaaaagaaacctgtaaagattgcctgtgttggaaacagtatcacttatggctcaggaattaaaaatcagtttcagaacagttatccggggttactttcccagcttttgggtgaagggtacgatgtccgcaatttcggaattagtgcccgtgtattgttgaataagggagatcatccttatatgcacgaacagaagtttcgtgatcttttggcatttcagccggatatcgttaccattaaattgggaacgaatgacagtaaaccctggaattggcgttatggaaaagattttaagaaggatttgacggaaatgctggatattcttcaggaattgccttccaaacctaagatatatctttgtctgcctgttcctgccgtaaaacggaattttggtattaacgatagcgtaattacaaacggtattattcctgtaatacgcagtgtagcgaagaaacgtcatctgcccgttgtggatctttatgcactgctgaagccatatcctgattactatacggatggtatccaccccaatgaacaaggagctgcattgattgccggtgaactttatcgtacactgaccggtaatgaggcgcctgcaattgttaccgatcaacctttccccggtaagaagtcgcaatgggaagggttcgatcgttatgattttatttgtaatacacgccgcgctatcgttgttgctccccgcaaggtagcggaagggcgtccctggatatggcgtcctgcatttttcggagctttcccttcggtagataaggctttgttggaaaaaggttttcatgtggcgtattatgatttgactcatctttatggaagtccgcgtgcgcaacgcctgggcactgatttctatgaagtcatgcgcagatattatcgtctttctcccaaagtgacgttagaaggcttcagtcgtggcggattattcgcatttaactgggcggcaaataatcctgataaagtggcctgtatctatgtggacgctcctgtatgcgatatgctctatttctccgagaactgggaacgtgatttctggaaaggcttccttgcagaatggggattgactgaagaaaatgccaaagatttcaaaggaaatccgattgataacctggctccattagcggctgccggtattccagtgatgggcgtttgtggtgatagtgacaagattgtgccgtatgaaaagcacatgaagattgctgctgaacgttatcgtgctttgggaggtaatgtcgaaatcatattgaaacccggttgcgatcatcatccccatagtttagataatgctgaaccggttgttgattttataatccgtaaccaaccggattatcagaagaaacaagtgatccatcaacgtggtagccttactaactcttatctgaagtttgcaaaagagaaaaaaggttgtgtcgcttttctgggtggttccattaccgaaatgcgtggttggcggaatatgatacaggaagatttgaaacagcgtttcccggaaactgaatttacgttcattgattccggaataccttctaccggaagcactcctcatgctttccgttttgaaaatgatgtgttgcagaaaggaatgcctgatctattatttgttgaggcagcggtaaatgatgatacaaacggattcgattatatccggcagacgcgcggtatggagggtattattcgtcatgcccgtactgtcagtccagaaatggatattgtcatgcttcactttatttacgatccattcatacctttgttggacaagggtatacaaccccaggttattatgaatcatgaaagtgtagccaatcattattatgtttcctctatcaatctggcggaagaagtggcgcagcgtatgcgcgatggtgagtttgattggaaagaatttggtggcacacatcctgcttggaatggtcatacatattatgctgccgctattaaccgtctcttcgaccttgaatggagtggcgacgtggtaaagaaaaccgtccgggcacatgaggtgccggaaaaaccgatagattcctattcttatgataaaggtgtatttgcggatatccgttctgccaagcaactgaatggttggaaagtggtggatgactggacgcctacagtgaaagggaatacccgtaaaggtttcgtacatgttcccatgttggtggctgatcgtgccggagccagtctttcattctcttttgaaggacgcgctgtaggtatcttctgcgcagccggtccgcaagcctgtgtgctggaatacagtgtggatggcgctccgttcaagaagctggatacatttactgattggagccggaacttatatattccatgggtgtatatgctggaaacagaactggtttccggtcggcataccttgtgtttgcgtatagccaaaggtgagagaaccgggtgtcagatacgtaatttcgttgtgaatcagtaagtcattatccccttcatagtacctctgtgagggggataaaaacaaattgtacctttattagtaacatttcaggagtgaggattaaccaatctgtctcctcttcataacattcttttcaaagtctttcaacttcattccatacatttgtcgtggtttcttttgtaaacgaaaaagaacacaataaaatctttgatattaaccattaaacaatgtacaatgagaaagacattctttgaaaagtgcataaatttgcatttatgccgtgttgcattggtactgctacttctggtacctgcaatcagtagtcttcaggctatcccttctcaaagcaaaaccatttcgggagttgtgacatctgccacggacaatgagccgttgattggtgtcagcgtccaggtgaaagagacttccaccggtggaataaccgatatggacggtaaatattccataacagcccaaaccgggcaaacgctggtattctcttatatcggctacaaatctcaggaatttaaagtaggtgattcttcggttatcaatgtttcattaaaagaagataccgaaatgctggatgaagtagtcgtggtaggttatggcgttcagaagaagaagctggtaaccggtgctacggttcaggtgaagggtgaaaacattgccaaactgaacacgacgaaccctctctctgctttgcagggacaaacacccggtgtgaacatcgtctctacttccggacagccgggtgccagcatgagtgtaaccattcgtggattgggtacggtgggtaattctcagcctctctatcttatcgatggtgtgggtggcgacatttctactttgaatcctgctgatattgaaagtatcgatgtattgaaagatgcagcttcggctgctatttatggtgcgcaggctgccaatggtgtagtgttggttactactaaaagtggtaaggaaggtacttgcagaatcagctatgatggttttgccggttggcagacgataggtcg

SEQ ID NO: 6349 - DNA, 30443 bp, Unknown
  gut microbiota DNA sequence
tactgactggattgaccaggctattgaagatggcggattaactaccagccacaacctctcgttcacaggtggttccaaaacttctacttatgctatttcaggtggctacactggtcaggatggcctgattggtggctcagatgtttcttattataaaaggtataacttccgcgtcaactctgaacataagatgtggaacggactggtgactgtgggcgaacatgtgggttttgtctggaaagacacacgaggcatgggtacgggaaacatctggaataacaacctgcgcagtgctttctccgcatctcctattattcccgtttatgatgctgatggcaactacaattctacggtaaactccgactggaatgtaaacgatggtaatccttatggaaacatgatggtgaatcgctataacaacagtaagaatggttcactcgatgccaacgtatatgtgcagattgaacccatcaaaaacttgagatttaaaacggtctacggtatcagctacggcgcttccgaataccgtgcctatacaccgaagtatcagtttactccgcaaacggccaacaccgtgagcaaagtgaatcaaagtcatggtcacggtctgtcgatggtgtggaccaatactctctcttacgatttcaatattgctactgaacatcatatcaatgccttgataggtagcgaattgtctacctatgatggtagtaataccgaaggctccaatactggccttatccccggattcgatgattgggatcatgcttatctggtaaataccaacggcacggaaaataagacagtgaaaggttctccttacgactctacccgtggtatgtcatatttcgctcgtttgggttggacatggaaagaacgttatatggtgaatgccaccatgcgtgccgatggctcatcgaagtttgccaaaggtaaccgctggggatattttccttcagtatctgccggatggactatctccgaagagaagttcatggaatcggtgaaatcctggttcgatttcttaaagatacgtgtcagctgggggcaggtaggtaatgccaatatcaactgctatcaatatcttgctcctgtgtccaccacgaataccaattataactttggttccggtggaggtcaagatgcctgggttacgggttcttataccagccgtctggccaatgaaaaagtgaaatgggagacctctgaacaatataatgtgggtatcgatgcccgttttctgaatgggcgtctcgcacttactgccgacggttatatcaagaataccaaggactggttggtacaagctcccgtattggcaacggcaggtaccagtggccctattatcaacggtggtgatgtgaaaaaccaaggtgttgaactggggctctcctggaatgaccaaatagggaaggatttcacttatagcgtaggtgccaacttagcatacaaccacaacgaagtgggaagtatccctaccgaagatggtattattcatggtgctaccaatcaaatctatagtaatgcggaagagttctaccgtgctgagaatggtcatgctataggttacttctggggcttcaaaacagccggtatttttcagaacaaacaggagattaatgattggatcgctgccggaaacggtgtgtaccaaagcagtgtacaacccggtgatgtgaagtatgtagatgtgaatcatgatggtgtcatcgacgccaaggataaagtagacttgggtaacggacttcctaaatacacattcggtttcaatattaacttgggttataaaggtttcgatcttagtctgaacgctaccggtgccgccggtttccagatagctcaatcttatcgtgacccaaactcctcacagtccaattacagtcgtcagatactgaatcgctggacgggtgaaggtaccagtaatcagattccccgtgtaacctatggtgatgtaggtaactggcaattctctgatctctatttgcaggatggtgactacatccgtttgcagaatattactctgggttatgacttcaaacgtctcatctcctggaaggggctgtctaaattgcgcctctatgtgcaggctcagaatctcttcacactgactaagtatgatggtatggatcctgaaatcggttcatacaacggtacagacggtaacaaacagaattcagacggtacgaccaaccagacatgggtgtcgggagtagatatgggttactatccacacccccgcaccttcattgtgggtattaatcttgcgttttaaatcatgaaaaagaaaagtaatatgaatacaaaacatatattattaacgagcgcgctcgttgtgtcagctttagctttcacgtcgtgtgaagacttctttgacacttcatcaaaaaaggatttgaacactgaaacggcttacagtaatttggaatccgcagaaatggctttagtaggttgttatgatgggtggcaacgtactatttcagatgaaggagtaggtatgtatttgctggcggagtttgcttccgaacaggcttttgcaggtcttggcctttctgatgctaaaaacaacaatgtgattgaccagttcaatctggggatcgctccttcatacaatgatatctttaatgtggattggcagaactattataaagctatattccgttgtaatcagctcattgttcaggaagataatatcgactgggcaggggacatcaaggcacaaggacgagtgatgggagaagcacatgccattcgtggtattctttacttcgatcttgtacgtatgtttggagatgttcctttgcttaccgctccttccgaagagaatattccccgttctccggcaagtgatgtttatcagctcattttcgaagactttaaatatgccatcgaacatattcctgccgatgcttatcccttggataataacgatactaacgatggtcgcatcaccaaatatgcggcagaggcattgatggctcgtgcctatctttaccataccggttattacggtgccgaacacccttcatgtaccaaggctgaggcagtggctgctatcaacgatgtggtgcagaatggaaaatatgaactggagaaaaactatgccgacttctggatgcctgcttgtactactgatgcttcgaatggcgacacttatgcctggaatacgacatacgctggcaagtggtatgacggctccgcttggaaagccggacaaggcaaactctcaagggaaatagtgctcaacctgaagatgaatactactcatgactataacggtaatggtgatggtaatacgttctcggtctatttgggaccacgtaacaggaatgctacgagcgtatgcattgccagcggctggggcgcttgtccggtgactcccactttcgtggagcaatataagaatgatccccgtttcagcgcttgtgtatggagttgtagtgaggccggttttgatgctgacattaccgattcgtatgaatataccggttattatacccgcaagtatgcgccgatgtgttttgccgatggtacacgtcaggaagtaggatttaagttgggtgaacagcatcagaatgttacttactatcaggattacactatcatgcgctatgctgatgtattgctgatgcattccgaactcaatggcaatgccgatggattgaatcaggttcaccagcgtgtatatcccggtgaaacactggcttacagtattgaaaacatccgtaaagaacgtgctattgaactggctttcgagggtgttcactattgggacctgatgcgttatgagaaggatggtgcatacgctgcacgtattattactgctgcacagaatggtgccaaggtgacaaatggcggaaatgaggcaaccacttcgttctccgaaagtaacttcacttcgaagaaaggtttgatgcagattcctaatacacaaatcaccctttcgggtaatgtgcttactcaaaatgccggttggtaaatccatgaaggcttaggtttatcaaggaaaaacattaaaaataataagatatgaaattgaatcattatatatattcgctcattgcaggcttggtgctgatgttgtcggcctgttcacccgatgagtatgatatgggtaagaagacctatgtatccgatgacttggcggaaggtattgcctacactgtgactatcgcaggaaatcaagtacgcctcaaatcaaatatcactggttgtactccgttgtgggttactcctcagggacgttcgcaggaaagtgaacttgccattgaattgccttttgcaggttcgtatgaggtgactttcggcgtagagacgcccggcggtgtcgtgtatggcgaaccctatactttcagtttagcacaaaacgatttctcgttgctggaagatgagaaatggttcctgctgtccgataagaactttaagtcgggtgatgctctgcctgatgctgagacattggctgaaggggttagtaagaaatggtatccttgcgatgcgaactatggtatcggtcagtgttcgggacctgtgatgtatttgtctccttacgatcctgatggtgacggtgctggctatactcaggatgatgtggataacggagtttacaaagacatcgtcttcggcaccggaaattggaaacccaactgggatccgggttttcaaagctggcttatccctgcaacagatccttacatggactcatatatgactttcagcatggatgccgtcaacggctgtgtggctactatgtaccgtggtgaatccggagaaaaaggctcaagcacaggtgcaaacatgaaaggcaagttcaatatgaaccttactgaaaagactaagcctaccatctcgttcaccgattgctactccatgcacaacgtgaatgccgatgatatgtgtgctaactacacgcaagatatacagataatagaacttactccgtatatattgcaattagtaactaaacgtaccaattccgaaggtaactggtatattgtatggaactttgtttctgaagaagtgattgaaaccaagggtgaatgcattcccaaagaagatagtggagagattgagaaagtagcccccgtgcttcccacattcgataatcttcttgacgacctcttcacgaccgaaatcaacggtgtgacttatgtcggtaaccagatgacatttaaccttgataccgaagcaccttacgattggttgtggtggaacggttctcctaacgtacagaaatgggaaagtgtaacgggaggtgtgtacaacgactcatgggctcctgctgccggtgatgaggtggaagattttgaacttatcctaagtaaggcttccgatggctcttataattatgaattcggtgaagccagtggtaaggtaagcgttgcaaagggcgtaataaccttcgatagcgaaatcacccttcttaccgcttccagcgatcagcgtacggttgctgttacaagcaaagattttacggtacttgccatggaggctggtgagacactggtcattggtgttcccgaatcaaaagatgagaatggcgtggtgaattcttatcttgtagctaatctgctctataagaagattagcggcgggacggaaggacccaccgaaatcaaagtggacaacagtaagttggaaatcatctttggtgatggaaatcctgatcgtttgcgtatccagctttataactcatggggtggtaagaatgaatgtatcgacataacgaaagttaagctaaaaaagaaccagactttgaagattcagtacaaggtgctgagtggtataacctggaacgagggggcagctcctaaaacagtgattatggaaaacagaatcggagattcgtttgaagatggttgttacgctttggagtatgcttcgaaattcgatacaactgcgggagcaatccagacagtatcattgccaaatactacaggtgctacgcaaacttttgaaaccaattgctgtcttatcatcggaatccagaacaagggacttgctacagtggaaactttggaagatggaagcccgaatgtacaggttgagattgtttccatgactattgagtaatcacttaaatgaattagtataatgaagaacaaaatattattcggaataatggctctcgtcatgggtatttgggcgacgggatgcagcgatgacgattatgccataaaccaacagccattgcttactgataactccgtggtaacaggttcggcagatgtgactgccacatcagcaacattacatggtaccgtatctgggcttgaaagccaggcttcaagtgcttatgtcattggttttaattacggtgctgcggccgatgcactcaccgaaaggattattgctacgggcggtgaaacattcactgccacggtaaatggcagcttgaatcaaactatttattatcaggcttatgtcactttacaaggcaaagtaacttataaaggtgaagtaaagagccttgtactgactaatgctcgtgctactaccggcgatgctacccagataggtgctaacaaggttactttgtctggttcgcttattggctttcctgcggatgcggaaggtggtatcattgtgtcgggtatagaaggtacggaaaatgtgcgtgccggtgtacgtattgctactgttcctaaggaaagctatacggtagatgtagaaggcttgttggccaatactacttattattatgtggcttatcttgatctcggtgcaggtatggtctatggtgaagaaaagtcattcactacgactgggcatacgtttgatcttgataatgaccttgttgaccttgggctttctactaaatgggcaaagtacaatttaggtgctacctcagaaacggaaattggtggtctgttcggtttcggtgataagacaggttttaataccagtatcgatcctgcaagttatgcttctgccgatatctacaaaacagctaatgaccttgcctataaagcatttgaaggtaaagtgaccatgcctaccattgctgagtttgaagaactctttgcactctgtaccagagagtgggtggaagtggaaggtgttgccggctataagttcatcggtcctaacggaaactctatctttatgcctgccgcaggttcgcgcacacaaggcactactaccggtgttggtgtggaaggctgctatctttccggttccatcaatgtttctgatactcagtttgccatgagctatcacttcaatagtgctcttgctactcgtgccaccactcctgtctatcaagctttggctattcgtgccgtttctaccgccaagaatgttccgtttgaccgctcattgctttatagtaaatggtatattgacaatggtcaggatggtgaacaacatgtattcgaaggtccgttcacgcagtggggcgaaacgtacgactgggctatagtatctaacggacagcccaatatcggaaaagaaattcattgggaaatgggtactgagaatggctggattggttatacttatggagttgattatggttacatggagtttttcgaagacggaactgtcaatatccatcgtttgactgatgacggtgtagctactgatgaaacaggtaaatatactattgatgaggcgaacaaagtgattgacattgatatcaatgtactttgtgccaatacttgggtagcggtaaagagtggtaagctgaatatcctgtccttgacgagtgacggtttgcagattgctcttcccaataaagacggttatgcttactcggtcaattattacagtcagcgcaaggcggaagccgataccaagattcctgttacattgctttgtgcaggtgctgatgagagtggtacttggggaaccgaagtcgggcgtttggctccgactgagttggctggtcagcatacttttacatatgaaggctcatgcggcgatgctatggtatttacccttgatttcccggacttgctgaccagatatcctaacgctttcgtacgtattgatgagatgaagtgcgatggcaatgccattcagttcaatgccaataattttttctatggagatattgagggtaaaggtaattatcgtgtcgagttattcaacatttatggtaaaggtgcggcagacggcaaagtgttgaacagcgctttcagtaattcgcagaatctggcttccgaaccggcactacatttcagtaatagactggaaataacttgcacagtctttactgatggcaatgggaaaggtgtatatatcccaaatttagtcactatccctaattgggatggtgcgggtacatggggggataatgccggaggtacattagaagtgaaatatgaaaatttccaatatagtcttgttgctccgcagttcgacatcaagtatgaaggtactggttgtgcagctggttccattatgaccttcattgaagtggcagatctttacggtttcttccctggtacgcatgctgtgttggataatctctatcttgatggttcagaggtgacgtttgatgcgacaaaagtgcttgatgccaatgatggctccaagtatcgtctggaactttggaactgttatggggcaaccaagaatgcgggttgtgctttcggcacacctgatggagatgtaatcaaggagcttggtttcagcacttctatggaagtgaaatttacgttccataagctttttgctgttcctcaatggtaatagaggagaggatgtgatacattccagagttgggaatatatatgaatagggagtggggaaggcgaagatacttttcccgctccctattcatttcaaagagtaatattattaaagatgctgttgtttagcatatcattttgtattttaaactacgcttagaattccgtatttgtaaccaactgacaactaccaagaaaacaagcgaacaaaaacttgtatgctgttaattaacagaactatataaaatacgcaacagttgaaatagactgttttcttccggttttacccgtttccttccatcaattcgcgcttgactatggcagaattccacttcctgcacgaacgatatatatgtccttcgcgcacgacattaacttcctgcgtgaaggagcttaatatccttcgcgtccgatgtatatatccttcacgtacggtattaatatcgtgcagttctccgatgcactttgcttccataaacgtgtaaaatgttgcatgaatattaactcattcatgctcaaaggaggctgttacgctttttttatgcgacctgtatgttagcgagaagaaagaaaattaagacaaaagtttatatattgtttggtttgctgaataaaatgatatattcaagaaacaacctctttgtattttatacaaagtactatttgtaaagtaatagagaaatcttttatttgctgcctgcaagaagttaagagtttgtcaacaagaagttaacttcctgtcgacaaactcttaacttcttgtaaacagcaaattgattatttgtaatactttgatagtcaactgtgaaaaatcggttatggaagtttgggtatgaaaataaatcagataaaattataataggggacaactattccatatctttgttccattaaccccaataatatacatattatggaaaatagtttggatgcaacagtgagtagctttatcgagtaccaaaaccaatttagttcaataatagaaaagttaaaggaagggcatcagaacggtagatttgcagattggaaaggggttattactgtaaacggtcctgttatctatcaaccggaaatattgtttatgggaataaatccgggaccagggctttataatgaaactaattatcgaaacaatgataataaggttccatttcggatattgacaggggatagtaatctctaccgggatgagagtgcatatcctttaagtagacttgtttatcgttcggatggtaaaacgattgcactggactggtttaccaaaagtaattattgcgaaggaagctcatggtatgagctgaaaataaagcgggggaatggtttcgttgaaaatatgcttaaaatcatttgcaaggttgccttcggtttaggtaaaggtgaatttgtgaaaggcgaaaagccagaatggtatgatacattcgggaaagaaataatgtttatgaatgtatgcccgttggctactgataacttgaatcaactctcacgacttaaaaaagaattgggaataaacgaatggaaagatatcgtaaagcctgtaagaaccttggttagagataatattaaacctaaaataattgtatttgcaggaatatccgcatacaacaatttcatgtgggaagataaaggtgatcaaatctttgatattcctgtagttataatagacagaaaacgcggatataactcagaagcaaacttatcgaagatcgcatctgaaatagttgaaagaatatcccaatgaattctacttcttttaagcagtatttatgtttctcagtgcatttgagtaatagttcgacgttacttaaattaaatagctatgaaatactcaataacgcacaatccccctgaataatatgcatttattgcatacttcttatttttggaaacattttacacagagtgttggtcctacgcttggatggaataagtggtggtatatcacaagtctacccgttttgtagcaggaacccgggggaaaggcgataaatgatatgtcgcctattggaaacctttcgtccaggggtaataacaaattatacccttccatataacatcctaaacgctttgtgtggctgctttgccctatctttgccaacacggatttctatccataacctaatatttgagaacgaaaaacataatgctcatgaataaaattaaagcttatctgttgctgttgacgattgctctctctgctttcgctgccgcatgttccagtgatgacaatgatcctgtaacaccggaaataacaatttccgaaaacattctggcgaatggaatgagtttttccaaagccggaggtacaaacacactctctgtgaaatcgaatgtgacgttggaagttaccagtaaccaggattggtgcgtagtgactccgacagtttcggcttctgctacggtctttaaatatacgatagatgtaaaatccaattcaactaccgataatcgtacatctgttattactgtgaaaggtggtaacctgacagagacattcaatgtcattcaaacagctaccgaaggactggatctggagactgtcttgtttgaagacatatcggcagcgggtggtactatcactgtgaaagtgatgactaacggtgaaccaactataactattaatgatagctggattaccgagaaaacagaaacgcgcgctatggtggataaaacgaagacttttatcatcgctgccaataccggaaaagaacgtaccggtaccattacttttattttgggtgacttgccggcaacaactgtgaccgtgaagcagttggcgggaggtgagataagctcgaatgaaatagcaggtgaagatccctggactgtagctaaaagtctgggattgggttggaatctgggtaatcagttggatgcgcataatagtggtgtggccaatgaaacggcctgggggaatcaaaagacgacacaggctttatttgataaattggctgctgcgggtattactaccgtacgtattcctgttacatggatgggacatattggagacgcccccggttatgaaatagagaaagcctggatggatcgtgttgccgaggtagtaggatatgcagaaaatgccggactgaatgctattgtcaatattcatcacgatggagctgatagtgaatactggcttagcattaaagatgctgctcaggatgaaactaaaaataccgcaattaaaacagaattgaaagctgtatggacacagatagccgaacgttttaaggataagggcaactttctggcattcgagtcgatgaatgaaattcatgatggcggttggggctggggcgacaaccgtaatgatggtggaaaacaatattcaatattgaacgactggaatcaggtgtttgtagatgcggtacgtgctgtaggtggtggtaatagcaatcgtttcctgggtgtgccggggtattgtaccaatgtggcacttacggtgagcaacttcaaactgccgactgataaagttcagaatcgtctgatggtatctgttcatttctatgatccgaatgaatatacactggatgcaaagtattcggagtgggggcataccggcgctgccgataagaaagctaactggggagacgaagacaatgtgaaagatgtattcaatagtttgaagacaacgtatatagataagggcattccggtatatattggtgaaatgggatgtgtaagccggacgactgaccgtgcggaatctttccgcaagtactatctggaatatatatgtaaagcagcgaaagaatacggattggctcctgtttattgggataatggcggtacaggtagtggaaaggaagaatcaggcttgtttaatcatgctaccggtgattatctgaataatgcagcggaaatagtagaagtaatgaaaaaggccatctttacagaagatgcatcttatacattgcaatccgtctatgacaatgcaccgcaataggttttcataaatactcctcgtgtatacagggattgttgttaatacaggtttttttttgattggttttgggaagtagcttctgtgagggaagttacttccttcttttctgtccgggaaacaaatgatggggtatgaaatgataaaaaaacacattgaaaaccttgtttttacaattcctttttgtttcatttgcaatatgttaacgatattcctatatctactactatgaagagattgattttacttatcgtttcagtcgttgtggcatgtttttctgccttttcacacgactttatgttcaaacatctggaggttaaggacggaatgcccagcaaccaaatcaatgccatttataaagattcaagaggttttatgtggtttggcaccgctgccggactggcacgttatgacggatatcgtttcagggtattccggagcactgacaatggttctgcgtctttacctgacaactatattgagaagatagtggaagacagtgaaggacgtttatggatacggacgggagaaaacggatatgtaatttataactgggatacggagagctttgtctgtgatgttcgttcccggatgtgggatatagggatagacggaacaccccgctatgtatttgtcgacaagcaaaagaatacctggtttgccatagatgggaaagggtgctactgttatcgtcccggtgaaaagaatgctgtatccctgcctttcggtgagaaaggaatacccgaaggtgtcattatagacatggccgaatgtaaggatggcattctgttggtatatgataacgggcgcgtaatctgtatcgaccgtgagacggtacgtgtaaaatggattttgacagatattgcagagcacatgggaacgcgtactgatatcttcttcctgtatgtggataaggatgaagatttatggatatatggtgccccgggtgtatgggcttacgatttgtctgacaggaagtggcattcacaatggaatttcagcgatagaggtcaggcgcatatcgtagcagtagctcaggataagcagggacgtatttggtttggaaaggaccaggatggcatcgatatctggaataaggcgactggtgaaactgtctcgcttacgtatgatgtggatgacgaacgaggtttgcccaataataccatcaatgtgctttatgaagatgaaggcggtgtgatgtggataggtacttataagaaaagtgtggcttattatgatgagggcatttttaagttcggcatcaaccacttgggggatattaactgtctggaagaaagtaatgacggttcgttgtggttgggtaccaatgacgccgggttgatacgttggaatccgaagacggatgaaaagaaactgtatgcatactcaccgggaggaaactctattgcttcgaatgtcattgtaagtttgttgcaagctaaggacggcaaactctggatagggacattttgggaaggattggattgtttcgacggcaatcgcttcgtgcattaccggaacagaccgggagatgataattcgctggctaataacaatgtctggtcattggcagaagataagaacggaaatatctggattggaaccttgggaggcggtttacaatgtctgaatccggggacaggtgagttcaccacttataagataagtaactccggaattatttccaatcatatagcctctttatgtatgagtcgtgataatcgtctgataatcggtacttcttctacgggggtatccataatggatctgactacccggaaaataacgaatctggtaggcaaccagtcgggaagtatccgcttttccaatcagagcattaaccaggtctatgaggatagccggggattgatatgggtgggaacacgtgaaggactgaatctctataatccgaagaacgaccatttacaggtagttcctctttcgcagaacgattctagggtatttattaccggtatcgtagaagatgataataaaaatatgtgggtgactacggccaatggtgtagtgaatgtaattccttctatcgatacaaaaaacggagattatactttcaactattacaggtatgatgataaggacggtttgcagggctgtgagttcaatcaacgttccattaaacgtctttcctcgggtgagattgcaatgggaggtatgtatggattgaatactttcagaccggagaatatcaaatataaccggacgttgcccaaggtgatgtttaccggcttccagcttttcaatgaagaagtggaggttggaaaggagtatggtggacgtgttttgctgcgtgagtcgctgaataaagccagagaggtgaaacttgattataaacagaatgtcttcactgtattgtttgcatcggataattacgtcttgcctgagaaaacccagtatctgtataaactggagggatttaatgaggattggatggcaggtgcggctgatatgcaccgcgttacttatacgaatttggcacccggtacttatacgctgaaagtgaaggcaatcaatagtgatggatttgccggaacagaagagtcaagccttaaaatagtaatcctaccgcctttctggatgaccccctgggcgtatgttctgtatgctatgctattgataggcacattgctgctggctcgcaatgctgtgctgcgccgtgaacgcaataagtttaggatacaacagatggaacgtgaagcggagcggaatgaagaagtcaatcagatgaaattccgtttctttaccaatgtgagccatgaactgcgtacaccgctgacgttgatcatttctccgttggaaggaatgatgaaagaaacccatgatgaacggaagcaggagcaattgaaactgatgcatcgtaatgcattgcggttactgaatcttgtgaaccaattacttgatttccgtaaaaatgaggtggcagggttgcatttgaatctttcggagggggaggttgtatcgtatgttcactctatatgcaactcattcctgatgctttcggaaaagaaaaacgtgcatctcacttttttctcggcaatcgaatcgctgaatatgtcgttcgatgaggataaaataggtaagatagtgatgaatctgctctctaatgcgtttaagtttactccggatggagggcgggtggatgtttctcttgaactgataaaaggaactacagaaacattggaaatcaaagtatccgatacgggggtaggtatcagcgaccttgataaagaacgtatattcgaacgtttctatcaatcggagcgtataggtgatagtaaccccagtacggggagtggtatcggtttgagcctggtacgtgattacgttacgctgcatggcggtgtggtgcgcgtgttcgacaatgtgggtacgggcagtgtatttgtggtagatattccggtgaaacattcggtggtgaacgtagcgactccactctcggaagaagctgcagaagaggatgcggtggcacttgcttcagtggaagaattgaatgaggaagaacggaagaagccacttgcactgattgtggatgataatgaagattttgtttctttcatgcgttatacgttgagtctgtatttccgtatagaatctgccggaaacggaaagatagcctggcagatgataccggaactaatgccggatatcatcgtttgtgatgtgatgatgcctgaaatggacgggaacgaactgtgccgttgggtgaaggctgacaagcgtacaagtaatattccttttgtgttgcttacggccaagcaatccgtagagaataaggtggaaggtctgacgattggtgcggatgactatgtgacgaaacctttcaatatggaggtactgattttgcgcatgcgtaaactgatagatttgagcagcaaaaataaacttcgcacccgtattgatcccgaaccgagtgaaatcgttatcacttcgatggacgaaaagctgattgagaatgcgataaagtatgtggagacgcatattgcccgtcccgatttatctgtggaagaattgagccatgaactgggcatgagccgggtgcatctctataaaaagctgttgcagattaccggtaaaactccgatagaatttattcgtattatccgactgaaacgtgcggcacaacttctgcgcgagagccagcagaatgtgtcggaggttgcctatcaggtgggcttcaataaccccaaatatttcagtaagtatttcaaggatgaattcggcgttttaccctctgtatatcaggaaaaggagggtaaataacaaaaagtacccattgttgaaacatctgatatttctataaatcaaataagccctttcctttcaacatcgggagggcttgtttactgtatgatttcctacttttacactcggagaaaataactttaaaaacaaagatatgaaattgaaaaacacttcagtttgtttgctcgcaggatggatgctgatggcatgctccggaggcgggtatgagaagacgagtaacggcattattgtaaatgtcgaacaacagcaaccgacggatgtgcgaaaggtgaaggttgaagtaatgggagagaagttgattcatgtgtcagccactcccgaaaaaaacttttcaaaggcggaaagcctgatcatagttccccaaaaagataagacggacttcagcgtggaagaaagtgaagatgccgtttcggtaaaaacctcagaggtgtgcgccattgtatccaaagccacgggtgaagtacgctttaccgatgcttccggtaacctgattttggcggaagatgagagaggcaggagtttccagcctatcgaagtgcagggaacaaaggcgtatacggtacgtcaggtattccagtcacccgatgatgaggcattctacggactgggacaacaccaggctgatgaattcaattataaaggtaagaacgaggaacttttccagtataatacaaaggtttccgtaccttttatcgtttccaataagaattacggtattctgtgggatagttattcgctttgccgtttcggcgatccacgtgattatgcacagttaagcacggttttcaaactctatgataaggagggtaaggaaggtgctttgacaggaacatacgtaccctctcagaaatcaacagcggagacactggtacgccgggaagattctgtttattttgaacatctgaaatcggaagatttgtcgaaagtcgtgaacttaccagaaggatttcctttcatgggttcgcaggtgacgtatgaaggagaaattgagccgatggagagtggtaggttccgttttatcctctattatgcaggatatatgaaggtatacattgatggtgaactggtggttcccgaacgttggcgtacggcttggaatccgaacagttataagtttgccgtagatttgaaagccggtaaacgtgttccattgaaaattgaatggattcctgatggatatgtatcctattgcggtttgcgtgcattgtctcctgtatctgctgaagaacagaacaaacagtcgtggtggggagaaatgcagaatgaaatcgattattattttgtttatggtgaggatatggacgaggtaatcagtggatatcgtgctctgaccggaaaatcacaaatcatgccgaagtgggcgatgggatactggcagagccgcgaacgttataagacgcaggaagaaatactggatgctttgaaggaattccgtaaacgtcagattcccattgataatattgtgctcgactggagctactggccggaaaatgcctggggtagtcatgagttcgacaaagctcgtttccctgatccgaaaggaatggtagattctattcatgccctgaatgccaagatgatgatttccgtttggccgaaattctatatgactgcggaacattataaagagtttgatgaaaaaggctggatgtatcagcaggccgttaaagacagcattcgtgactggattggtcccggctacatcggttctttctatgatgcttatgctgagggtgcacggaagctgttctggaaacagatggaagatcatctttatcccctcggaattgatgcctggtggatggatgccagtgaaccgaatgtacgcgactgtacggatttggcttaccggaaagctttgtgtggtccgactgctctcggtccgtccgaccaatatttcaatgcgtatgcgttgatgaatgctgaggctatttatgacggacaacgtgccgtagccaatgacaaacgtgtattcttgctgactcgttcgggatttgccggattgcaacgttattctaccgcaacatggagtggcgatatcgctacccgttgggaagatatgaaggcgcagatttctgccggactgaattttgcagtcagcggtattccttactggacgatggacattggcggattctgcgtagaaaaacgctatgaagacggacaaaaggaattcaataagaccggaaaagagaatgcggactataaggaatggcgtgaattgaatacacgttggtatcagtttggcgcattctgcccgttgttccgtgcacatggacagtatccgttccgtgaggtgtggaatatagctcccgaaggacatccggcttatagttctatagtgtattatacgaagttgcgctatacgatgatgccttatatttattcattggccgggatgacttattttgatgattatacgattatgcgtccgctggtaatggactttacggcagatacaaaggtgaataatatcagtgatcagtttatgttcggtccggcgttgatggcggctccggtgtatgagtatggtgcacgcactcgggaggtctatttcccggcaacttgcggttggtatgatttctataccggtaagtacatggccggtgggcagcagttgaaagtggacgctccctatgaacgcatgccgctctatgtacgcgaaggggctattgtgccttacggaccggaaatgcagtatagtgatgagaagcctgcggaagaaatcacactatatgtatatgcgggtaaagatggtgagttcactttgtacgaggatgaaggtgtgaattataactacgaaaaaggacagtatgccaccatcccgtttacttacaatgatgcggaaggcactctgactattggtgaccgtgcaggagaatttcccggtatactgaaagaacgtacattcaacgttgtaaaggtaagtaaggataagccgcaaccttttgacgcgaaggctaagggggtgacggtgaagtatgatgggaagcagcagagtgtatcaatatcatgaaacaactattaataataccaatatcctgtttgctcctcttcttggtattgggaggttgcacctccgctgaacgggttactgataaccgtcgacaggacttcaccgctgactggactttccatctgggagatgactctgcggcatcccgtcccgattatgacgacacggcatggcggatcctccatcttccacatgactgggctatcgagggagagttcagcagggataatccttccggaacaggaggaggggcattacccggtggtatcggttggtatcgcaaaacgtttactgctgacaaagcggatgaaggcaagcgcctgtatattgattttgacggtgtatatatgaattcggaagtctttatcaatggtcattcccttggtttacgtccttatggatatgtctcgttcagttacgatctgactccctatatcaagtggggcggaaagaatgtagttgccgtacgtgtggataacgcggaacaacctaattcccgctggtattcgggatgtggcatctaccgtaatgtatggcttacgaagcttaaccccgtgcatatagcgcaatggggtacttttatcacggcgcaagatgtgtcgaagaacagtgcacgactaaacatacgtactaaaatacagtatgatgcggccgctcaactgcaagattccgtgaagcaggcggatggtacgtatgttgtttttgattcggaaattgtttccttggcagatgttgtgttgcagtcacggctaatggatgcagaagggaatgttgtgggtgaggttgcatcggaactgcaagtgatacctgcctgtccgaacgaggtagaacaggaaattgtagtgaagaaccctaatctttggagcgtgaacactccttatatatataaggtgaacagtatccttattgataagacaaccggtaaagtattggataactactgtacgaataccggtatccgtaccttccgttttgatgtacagaaagggtttattctgaatggagaacggctgaagattaatggtgtatgtatgcatcatgatctggggtgtcttggggcggctgtcaatatccgcgctatcgagcgccagttggagatactgcaagaaatgggctgtaacggcattcgctgttctcataaccctccctcaccagaactgctcgatctttgtgaccgtatgggatttatcgtaatggatgagacgttcgatatgtggcgcaaaagaaaaacggctcatgattattctcgttacttcaacgagtggcatgaacgcgatctgacggatttgatactgcgcgaccgtaaccatccttctgttttcatttggagcattggcaacgaagtgctggagcaatggtcggatgcaaaagcggatacgttgaccttggaacaagcgaacttgattctgaattttggtcatgatcagagtatgctggcgaaagaaggtgagatgagtgtgaactctttactgacgaagaaactggcagatatggtaaaagctctcgattctacccgtcccgttacggctggctgtaatgaaccgaacccgaataatcacttgttccgttcgggagcattagatctcatcggctttaattatcatgatgattggtttgccggtgtacccgagaaatttcccggtaaaccgttcattgtggcggaaagtgtatcagcactgatgacgcgtggctactaccggatgccgagtgacgaaactgttatttgtcctgaacgttgggataaaccttattttgatgatagtttctcctgttcttcgtatgataactgtcatgtaccttgggggaacagtcatgagggcacgatgcgccacgtgaaaaataatgattttatcagcggacagtatgtctggaccgggtttgactatttaggtgaaccgactccttacggttggcctgcccgtagctcttatttcggcattgtcgatttggccggttttccgaaagatgtgtattatctctatcagtcggaatggcatccggagaaaaaggtattgcacctttttccgcattggaactgggcgccggggcaggatatagatatgtgggcttattataataatgcggatgaggtcgagctttttgtaaatggcgagtcgcagggtgtgcgtacaaaaggtaaggatgattttcatgtcgtatggcgtgtgaagtatgaaccgggtgtggtaaaagtcgtttcccgcaaggatggaaaaacggtattggagaaggagatccatacagccggagaaccagcacagatacgcttgaaggctgatcggaatgaaatcaaatcagatggcagagatcttagttttgtaacagtggaggtgctggataaagatggtaatctttgtccgaatgccgataatcagatcatgttcgatgtgcaaggtgcgggatttattgccggtgtagacaatggtagtcctgtttcaatggagaaattcaaagctgatcatcgcaaggctttctatgggaagtgcctggtggttgttcaaagtgacggaaaatccggaggcatcaaactgacggctacatccgaaggattgaaaacggcagtgaccgctattaaagcaaaataaaagtaacttgttagcagaattcatttataacggtataggaatgaataagactcaccacagattacacagattcacacagattcacacagatttattaatctaataatcagtaaaatagaatctgtgtcaatctgtgtaatctgtggtgaattaattcataaccgaaaagaaatgaattattccagcctactcttattttctcaggaaactacttttctttctgaataggcaatacaacttccagcggagtgattgcataggctgtagaatatcaaataccggaagcgtaaagatgtaacgtcgtttctctccgagatcctttgccgtcttattgataatcagcgcttgcagggtgtatcgcaaggcgaacaacagaaatgcaatgccggctgccaaccagtgaaaattcagtatcccaatcaccagagcggttatccatgctgcatgaaacagtaaccgtgtagtagtttcaaagcccgataaatagcgttggataccccggtagaaatgtgctgtacccatatagctgattttctcttcccgccagtccttggcacggtaaacgggttgcacacgtaccactgcattggcatcggtctctatcctcgtgttctcggctgtagctgtcttattgatgaataaatcatcatctccgcgttgcaggttcaggtgtgctgaaaaacctttctgggcatagaataactctttccggtatgccatgttgcgtccgatacccatataaggctttcccgctagtgcatagcccaggtaacgcatggaagtaaacagattatcaaaagatactcgtttgtgcagccagccttttccacgttcgtatccgctgtatcctagtacgatttgcgcacgggaggtaaagttacgtgccatggtgcgcagccattggttgctttcgggcagacagtttgcatcggtaaacacaagccagtcatatttgcttgccttaattccgagagtgatggccagtttcttgcggctgatgtagcgtgaagaactgggcacgaagctatgatacaggttcgggtacttttccccttgcagagtcaggtaatcttcgctttcatccgtgttgccatcattgatgacgatcacttcgaattgcgggtaatcctgttccagcacagcaggcagattacggcgcagattttccacttcctcgcgggcatagatgatgaccgataaaggaggcaactcctgtgaaaaatgtatgtcacttcgctttacggcacggctacgggcatgtatacgattataaagacaaaagtaataaaggagttgaatcaggaaaaggataccgacagcggcaagtaatgcttgttctgtagtattgaatgttaatgcttccatgtggtcgtatgacgttttttgtgttgcaaatgtacacaaaaaatatgattatacgacaggtaccaccacaaacttgcttttcgggaaatacttatccagataccggtggatatactgcatcgtatcttcttgtattgtagtatcttctacggtaggatagagattatacagcactgtatccagttgtattcctctgcttcggattgcctcgaagctgagcaatgtatggttgatacttcccagcttgccggaagttacgaatatcaacggatattgtttttctgcaatgtagtcaatcgtcaggtaatcctcggtaaggggaaccattaacccgcctgcaccttccacgagtaccacatcgtagcgtcgggcaagttcttgtgtggcacgttctatctttccgaagtcaatcggacggttgtcgatacgtgcagccagatgaggagagcagggataagagaatatctcaggcatggtcaatccctcacggtcttcctccgtcatgccgatgcccatgagacggcggtgcaggtctatatcctcggaatagccgatgttacctgtctggataaatttctgagtgataacacgtttaccgctgccaatcagttgacaggcataataagctgtacaataagattttccggcatccgtatcgataccgctgataaaatacacattcttttccatttcctttaatacttaatacttatagttcaccacagagtaacacagagtatcacagaattctattcttttgatttcaaactgattaaactctgtgatactctgtgttactctgtggtgaatagctcatttatatatcttaatcttttttcttcgtgtaacaatataaataggatgatacgtcagagtgacatttccgtcctcccgtctgaactgttcggtatagctgttgcagaaagtctgtaaccgtccccgtgtccatactttcttttccgttcctgtcactccggtttccttcagatgttgcaacacctggagtggggtgctgaaggggagggagactatttcctcttcagcatacacagtctcaaaatgaggagcaaggagttctttcagcgcttctatgggcagataatcaagtccatgtcctgtgagcgtgcggatttcgcgcatattttcagtaccgaaggtgctgaaagtcagataaccgtcttccgacaggaaacgatgacagcgggcgaagaactccttcggatcattgaaccattgcaaggtagagcaggaagtgattaaatccgtcttttcggggaagtccagcgcttcagcatctccgggaatgaactgcacggtatcttgtggaagcaaatcggtgagacactctttcatctccggacatagatcgttcagcagcaggctttccggttgcaacttgtgcagcaacaacctggaatagctgccggtaccacatccgaactccacgatacggcgaaagagcggagaagcgcgctccgtcagcagttgcagcattttttcggctacctgttgctgtacgcgggcttcgtgcgagtaagtatcccgtgcacgggcaaatcgttccgcaatcagtcttttgtccatatttcctgtaaatagtatcggaacagttctacttgataatgggcatcttctgtataatgcactcgtaaggttttccggctgatttccgcttcttttcgccaggcattcagctgattatcgggaggaatgatgcggtcgttgtttcccactaccgcctgttgccaatagaacgaagtggcgggcagcgagagatacatgcgttctatttccgccagttcctctttcagctcctccagcggccgcctgggtgtaatgttcaggaactctttgaaggcctccccgttgaagcacattcttctcagaaacttatgcagggaagggccggtcaaaccttccagggttccgtgatagattgcagtcggaatgccgtatgtatcatcaataggatagggggttccattgatggctatactgtttttgatgacgagagctgtatccgtttcctgcaatttacccattacttgagttgccgcccatactcccattgaccatccgatgacattgatttcgcggtattctttcagcaaggaagcatcaaactccagtgtccggtaatcgtagcagagcatgtagtcactgtccgcaggttgataatctttgaacggggtttcgtcggctccccatccggcaaagaatagtaataaccggggatgtctgtcttttatgatataaacttgcttcataattctgtatcttttttctaaggtacgcggacaacacggatgaaaaattaaaactccgcgttcgtccgtttcatccgcgtacctgtattattattatttaatatattttactagctttctgacttcttcctcccttatttccgccgtcagcgaaaagcggatacgcgatgtcccctccggaaccgtaggtggccgtacaggcaaggcataaaagccatgccgttgcaactcctcggccttcagaatagtctctgagctttttcctgcaatcataggaactatataactggcactcggacactcatatcccttctctttcagagcttcgcgaagaatattgctgatattttccaaatgtattcttcgctccctgaaaccatccaatcggcggatgataaacaaagtccatgcgatatttaccggaggaagagccgttgtaaaaataagtgttcgcattctgttcactagatactcccggatggtgcgtcggcaaacaatgtatgctccggctgatgcggctgctttgccaaaagtgcctaccagaaaatcaatctcccggatgcatccggtttcttcggcgcagcccagtccttgttcgccccgtgctccgaaagcgtgcgcttcgtccacgtagagcaatacgttttcgtacatctgtttcagccgtaccagttctttcagatcggcagtatctccgtccatgctgaaaatactttcggtgacgacaatcacctgtctgtatgctgcatgattttcggcgagcaaccgttccaattgtttcaggtcattgtgccggtagcggatacatttggctgacgaaagccgaatgccgtcgatcaggcttgcgtgtaccagcttatccgccaatatcagtgtttgcgtatcgctcacggcgggcagaatacccgtattggcatgataaccgctgttgaacaccagtgccgcttccgttccgaacagttgtgcaagcgtctgttccagttccgtgtagacggtgaagttaccggtcagcaggcgcgaggaggaagaggtgggcagaaaactgtcggctgtcagttcttgcagaaactcttcccgcaagttgcggtcggcagccagccccaagtaatcattcgaagaaagattcagcatacgctgtccacctgcgataacctcccgtccttcatggatcagggcgggcagggttcgcaggttgctgcgctctttcagtccttgcagctcttgctgcatttgatctgttacattcatcccatttctcctataatcttcaataatccgcttgtcagctttgtcaactgctccggctctatgatgaatggtggcataatgtaaaccagtttgccgaaggggcgcacccaaattctttcctccacgaaccgtttttgcatccacgccatgtctaccgggtcttgtacttcaatcacaccgatggcgcccaacaccctcacatctgccacctgtggaagtgccagcgcaggttccagttcacgccacaactgttcttcaatgcggctcacttttccctgccaatcgtattcggatgaggtcaacaggcgtatggaggcgcatgccactgcacatgccagcggatttcccataaatgtggggccgtgcatgaaagctcccggtgcatgattggaaattgaatccgccacttcgtttgtggtcagcacggcggacagtgtcatgtatccgcccgtcagcgctttgcctatgcacatgatgtccggttccacgcctgcatattcccaggcaaacatcttgcctgtacgcccgaatccggtggctatctcgtcaaagatcagcagaatgtcatattccttgcatattctggcggcttcacgcaagaattgcggatgatagaaccacatgccgccggcaccttgaacgatgggttccagaatcagtgcagccagttcctcgtgatgcttttccacaatgtccagcagttccagtgtgtcgtcggcattccagtcgccatcaaagcgcgattgcggacgggaagtgaaataccgcaccggcaatgccgagccgaacagggagtgcattccggtcaccggatcgcatacggacattgcgttccaggtatctccgtgatacccgcgacggatggttacgaaattacttttctttgtcagatgcgcccgtccgggagccgactgacttttggcataccaatactgtacagccattttcatggctacttccacagctaccgaaccggagtcggcataaaatatcttttgcatggatggcggcaccagtggcaacagtagtttgcccagttctatcgccggatcatgcgtcagtccgccgaacatgacgtgtgacatcttttccgtctgttcccggagagcctggttcagcaccggattgttgtagccgtgcaccatgcaccaccaggacgacataccttctatgagcacctctccgttttccagtgtgatggttgccccgtctccccgtttcaccttatacaccggtaaggggttggtggtcgatgtgtaaggatgccacaaatgttccctgtcgaactgtgagtcgctgaagcggtagcctgcatcttctatcagtgctttgtcttctgagactttcgatccgagggtcgtgagcaaatctcccacgatggcggagttcacacctatgtacaaggattttttcacggcttcctttgtcagttgagagcgtccgcctgcaaaacgcaggtaggctgtggggttgatgaagcggaacagggcgatggtggtcagcacttcttcctcggtcagccgggactggctttccaacggtgttcctggaatgggttgcaacaggttcagcgggatagagggcacttccagatctctcagtgtaaaagcgaattcaatccgctgtccggctgtttcgcccatgccgatgatgccgccgcaacaaatatccattcctacgcgacgggcggctgccagggtttgtagtttttcttcctgtgtgtgcgtgctgcacagggtggggaagtggcttggggcggtttccaggttgcagtgatagcgcgtcacgcctgccgtatgcaaggcacgcagctcgtcttcattcagcagtcccagcgaagcgcagagttggatggagcttttccgtctcatatatcgggcggcttcacacagtttctccatgtttttccccgaaggcttccgcccgctggtcaccaatgagaagcgggctacgccttgtgattcgttgtgcagtgcatggcgcaggcactcatccttatccaccagatcgtaaacatccgctttcgtcttatagtgtgatgattgtgcgcaccatttgcagttttcggggcagcggccggactttgcattgatgatggagcacatatcgaactcctgcgatgcccgtgcggcggtgatctcgtgtgccgcttcatagagggcttccttatccggctgtgtggccaaccattccgcttctgcctgtgtgatggggacatcttgcagtactttgtttttcaattcttctactgtcatattcttactaattttagcaaattcataggagttatcatttcattaggaattaaaggaggtaaagccgatactcctgaaaaaagatttttgggagctacttcctttacctctaaatacatgtgacgcgaatcgtgcaaatctgaaaacagcatttgcatgatccgcgtcacatgtgttccactcttatttataatggtgtttatatccaacccctgtcttgttctgagataggggggatttatatactttttccctttaggaccgattgtagccgggcacaaaacaggcatcaatcctctgaaaccgaagatttcgagctttgtttccaatccgttctcgcttcccaacggtatgcctatgtcagtttcctgtcctttaccgttgtctgtatcttccaggctctgcctgccgcttttgcagccagctgatgttccggacttttgtttggagagcgaagagtccgccacacttttgggcaggcaaccgatagtgacgcaacgtcccaggctggcaaatgcagcataggctttccggctccatttcctgaagcgcagggtcgttctattgagttgtctttttctcatggggtttccggatcggttcaatgccgtttttcggtattattcttgttaatcggccgcaaatgtaacaaaaatatttttctctttataacgattgaaggcctatgatcgcatgaataaaaaatagttcccccacgtttcacaacgtagagccgaaattccatcggacgttggtacacttggtacagaggttcaccgttccctttgcttcacacaca

SEQ ID NO: 6350 - DNA, 54370 bp, Unknown
  gut microbiota DNA sequence
caacgactaaaagtaatatctttaatgtaataataatgaagaaacaactcttttcaactctcctgtttgcctgttcattgactactttgacagcgcaaactcctgtatatttagatgatacgcaacccattgaagcacgtgtaaaagatgctctcaaccgtatgacactggaagagaaagtagccctttgccatgcgcagagcaaattcagcagtcccggtgtgccccgtcttggtatccccgaactttggatgagtgatggacctcacggtgttcgtgcagaaatcaactggaacgattggggatatgccaaatggactaatgacagtattactgcttttcctgccttgacttgtcttgccgctacctggaatccggaaatgtccgccatctacggcaaggctattggtgaagaagcccgttatcgggaaaaagatgttcttttgggccccggcgttaatatctatcgtactcctctgaatggtcgtaactttgaatacatgggggaagatccttatctggcaggcgtgatgtgtgtaccttatattcgggagatacagaaaaacggggttgccgtaagtgtgaaacactatgctttgaacaatcaggagttatggcgtggacacattgatgtgcaactaagcaaccgtgccttacacgaaatctacctccccgctttcaaggctgctgtgcagaaaggtggtgcctggaccgtgatgggagcctataacaaggtgcgtggtcagcatgcctgccacaatgatcttttgctgaataagatattgaagaatgactggggttttgacggtgtagtcgtaaccgattggggtggtgcccatgatacttacgaagcagccatgaatggcttggacatcgagatgggatcctataccaacggtctgacctcagaaagtgcatttaccttcgacgattattatctggctaagccttatctccggatgttgaaggaaggtaaggtgcctatgagcacagtggatgataaagcctcccgtattcttcgcttgatattccgcacggcgatgaatcgtcagaaaccttatggttcgctgacaagtgaagagcattatcaggctgcccgtgagattggtaatgagggtattgtgcttctgaaaaacacacctgtccagaaaaaaggtacccctttgctgccgcttgatgactctaaatatcaacgtatactggtagtaggtgacaatgctgtccgcttgttgaatgaaggaggcggttcttctgaactgaaggtaaaagatatgatatctccactcgatggtatgcgtgctctttatggtgacaaggtagtttatacgaaaggttacgctgccggacgtccgatgtatgggcgtgcagaagaaattccccagtcggtgatggattccttgcgcacagcagcaactgaacttgccaaagaagccgatcttgtgattttgttcggtggattgaataagaatcatttccaggattgtgaagccggtgaccgtgtgacatacggtttgccattcggacaaaatgaactgattgaatctctgttgggagtcaataaaaatatggtattggtattgttgagtggtaatgccgtggaaatgccttggctgaataaagttccggccgtcctgcaaggctggtatctgggatctatgggtggtaattcacttgctgatgtactgagtggtgcagtgaatcccagcggaaaacttcctttctcctttcctgtgaaattgacggattgcggtgcgcatgcatttgacgaattgagttatccgggtgatagtatcaagcaggtctacaaagaagatattctggtaggttatcgctggcatgataccaagaagattcccgccttattccctttcgggtatggtttgagttatacgacttttacctatggcaaaccggtagcttctgctaaaacaataactgctgacaattctctgactgtgaccattcctgtaaagaatacgggtagtattgctggaaaggaagtcgtacaactgtatgtaggagatgaaaaatgtagtgttctgcgtcctgtgaaagagttaaaggcattccaaaagataactttggcaccgggtgaagaaaaagaagtaactttcaccatcactccggatgatttgaagttctatgatgaaactgttggcggatggacggcagaaccgggtaagtttaaggcttatatcggagcctcttccgcggatattcgtggaacgattccgttcgagttgaaataagatagtgattgctgaatggggaaggggtgtggagtgttttcgcatttcttctccatttattatattcccctttatataagccctttgcagggctttttttcgataatatctatcgaacctacagttagaaattactttttatttttctgtaaaatcaataagtttatcaggcaacttgtttcataaacttacggattcatctgtcacagtatgtctactgctgtggatgttttgcaaatctttatctattttcttaggtatttctattgtttttattgagaaggcttactacttttgtatgcggacgtcacaggtatgggagcttactgtccaactacaaatgtggtacgtccgtatgcaaacttcttactgcttgacgaagtaaatagctcattgtgtggtagctcaactcatagaggtttgcttaatagacctttacttttagaggatatttcgtttctttcttggaatgaagtgaacattagtagttaatttacgaagttaataacaaataaaaaggtattcagttataaggaatacaacatcgaagatgaataattctacggaactttccaccctttggacatttttagacaatataaccaataatctgaaaagtcagagattagcggatgtattccgttttatttctttttatccttttgagacctatggacctcacaaacatttgcgtattgagattaaccatgttaaaaagggcaattgcattctgtatttggacaatgagagcatcaattttgttgagggtgataccatgatcattctctcgaatgtcaatcatacgtttgaggcaggctctggtggaactactttaatgcagcttgaatttcttcctgagatattttccggttttgatttaaactttccgaattgtatagatggtacgtcaccaaattccatctctcttttctcggaagagaacaagctgattaaaatagtgaataatataggtattatgcgtgtagtacaacgcattgtaaacgaattggaagggaagaattcctattatcaatatttggttgtgatgttttatgcagagttgatggttcttatttatcgttatatggatgaaaactatttgcctgtttgccaaaatgatgctttaaaaaaagctatatcctttattcgtttcaattttcatcaggacattagtattaatgatgtagctgcgcatgccggcattagtgaacgttacctcagaagcttatttttgcaatacttgaatttttctcctttagattatctgaatcaaatacgtattaataaatctattgagctgcttcgaaatacagaattatctgtaaaagaggtcagtttccaatgtggattccagtcaccacaatacttttcacgcatcttcaaacagcgaactgggatatctccacgtgaagtaaccagatagtatttccgttttgtacattatttctttttatatgagccttttcggacacgtcttacaatcttgatttatccattcttttcgttaagtgaactaactttgctcttaccggaacaaagagtataactttataaaaaagaatgaaaaatgaaagaatggaaagatgataagactctgataaccttgataaaagccgaactctacacggcagttatcggagatattatggataagatgggatatctccatcagtttctcccccctcatattcgtccgcttcgtgatgatatgttgatagccggacgggctatgactgttttggaagccgacgtacatgacaattctgcatcggggggaaataatcctctgttacagcgttccttcggcttgatgttggaggcattggatgatttgaaggaagatgaagtgtatatctgctccggttcttctccggaatatgctttgtggggagaattgatgagtgctcgcgctatgcaatgcaaagccgcaggagctgttgtaaatggatactcacgcgataccaaaggtattttagctttagactttccttgtttctcgtatggtccttatgcgcaggatcaggctcctcgtggaaaagttattgattaccgcgttcccattgaggtagacggggttttggtcaatgatggtgatatgctgattggggatattgacggtgtatgtgtggttcctcgtcggatagaagaagaggtttttacccgtgcattggagaaggcacgtggtgaacggatagtattgaagaaaatacaggaaggtatgcgggcacgtgatgcttttgacaagtttggtataatgtagatttaatttgagtttgaagatgaagataactgatgtaaaggtgtggttggtgcaaggcatcaaatacaattggacattattaaagatttatacggatgctggttatacgggagtaggtgaagctaccaactggccgggtagccctgtcgtttatgaagctgttaagcatgttggacagcgtataataggtctagatccgatgagaacggattttatttggacgaaactgtatcgtgacttgaattggataggcccgtatggtgcgagtatgtgtgctattagtggtattgatatggctttgttggatttgaagggtaaggtattgaatgctccctgctatgaattgctgggaggagcatatcgtaaagatattcttctgtatgcaaattattggtttacaaaaggtaaacataatgaggaggactatgctgcccaggcacggatcgtaaaagaggctggttttaccggtttgaagtttgatccgtttgcgcatacaaactatttttatggtgaggatttggcttctaatctgacattgacccctgcacaacaagatttggcattcaatgtatctaaagctgtgcgggaggctgtgggtcctgagatggatattatgatagagacacatgccatgttgaactaccgtattgccgtgaaaatggcggaacgtttggctaagttggatatcacttggtatgaagaaccggcaggtcctgagagttcacaaactttgcgggctatgcgtgagcgtattccctcagatgtgactatttgtgtgggcgaacggcactatacgcgatttggtatccgttcgttacttgagaaacatgtctgtgatattattatgccggacataacccgttgtggtggtccttctgaaatgaagcggatggctaccatggctgaggcttataatgtattgatcgctccacataatcctaatgggccattgtctacattggcttcgtcgcatgtttgtgccgccattcctaattttttcaggcaggaatttatgtttaatgatgtggcttggagggatacagttattgatcatcccatttcggaaatggtgtatgacgggtatctgcatctgtctgacagacccggtttgggagtagatttggttgaagatgaattggagaaacataccggtatcgtagccgatgctcctgataatttttatatttgataagatatggcatttactattgacttaaaagaaaaagtcgtactggttaccggtgtatcttctggcattggtttaggtgttgcacgcgaatttgctcgtgcgggtgctgatgtggcgggttgttcacgtaaggcggcaaatgatgaaagtatagttacttatgtggaggctgtagaaagtgaggggagtcgggggctttatgtgcaggcagatgttacaaaagagcaggatttggaacagttggttagaaaggtgattgatacatttggcaggctggatattcttgtgtccaatgccgggatgaatgtttttgagggcgcagaacattgtgatgaagagcattggagatataatcttgatttgaatctggcttcacattggcgcttggcaaaactttgcaggccctatttgaaacaaacgaaagagggggttattttgctaatgacttcaaaccatgcgttttgtacaattcctggatgttttccttacaatgtcacgaagacggctataacgggcttagtacacagcttggctatagaatggggacctgagatacggacagtgggtgtagcaccggggtttatcgatacggcaggaaatgacacttggttcaattcttttcctgatgcaaatgccgaacgtcagcgtacggttgatcatcatccggtaaagaaacttggtacggcagaagaggttggtgctttatgtgtctatctggcttccccgatagcttgttttattagtggaaccactgtactgatggatggaggccgttcggcattgatgcaggatttttaataatgaaagaatcaacatgaaagcgaatctactatatcgttgttatgacacgattggagaggctgttacttggcttccggatatgaaaactttgttgtgggttgatattgacagtggtatcctgcatcagtataatctggagagccagaagatggaagaacaccaatttcccgaaatgataactgctgtcattccctggaaagggcatgagcatgaaatcattttggcaatgaagaatcgtctggttgtttatcatcttgtagaaagagagtatcaggtgcttttagaattgacaggtctgcattcacagttgcgcactaatgattgtaaagcgtctccggagggtcgtatttggtgtggagtaatgcatttgatggaacatacccgtaccggaagcttgtactgtattaataatgatttgtcttgggtgtcagttctgactgagcaatatattccaaatggaatggtctggaataaggctggtgaccggatgtattacattgattcaggtcgtggctgtatcgaagaatatggatatagttgttcagctaaaataacctggcgacgtacagttgtacaagttccaccggaatacggagtcccggatggaatgactatcgacgctgatggacttttatgggtagcacattggggaggatttggggtgtatatatgggatcccgatactggaaagttagtagacaaggtagatgtgcctgcccctaatgtcgcttcttgcacttttggcggaatcggggatagcaggttgttcataacgacagctttagacgggctttctgatatggaacgtagagaatatcctttgagtggcagtgttttcgttgtcgatgtacctaaagttgttccaggcgagaatcattacccatttataactgattaattgaaaaattatgcatatctctgttattgatttgattatcttttttgcctactgtttattgattttatttgtaggactctttgtttcccgtagaaacaaaaaagaaacacagagtgcaaaaggatattttttggcgggaagaggactggcttggtgggcaatcggtgcttctattattgcttcgaatatttcggctgaacagtttgtcgggatgtccggttcaggttatgctatcggcttggctatggcaacttatgaatggattgctgcactggggctgttgtttgtggcaaagtttttcataccgattttccttgagaagaagatatttacaatgcctcaatttctggaagaacggtttgatagtcgtgtaaagtctgtaatggcgtttttctggctggttgtttttgtgtttattaatctgacttccattctttatctgggagcgctgaccattgagaagattatgggagtacccatgattgtgggagtgctgggattggccatatttgcaggagtctattctatttatggcggattgaaagcagtggccttgacagatgtgattcaagtggtatttttaataggtggcggattaataacaacttatattgcactggatactctgggaatgggggaaggagtagtacaaggttttaaaaatctttatgtacagaccgaagataagttccatcttatacttgacaagtctcaccctagttatatggatcttccgggtatttctgttattataggtggtttatgggtcgccaatctctattattgggggtgtaaccaatatattattcaacgtgccctggcggctaaatcagtgagtgaagcccagaagggaatgttgtttgccggttttatcaagttgcttattccattgctggttgtcattccgggcattgcggcttttgctttgaatgctccattggaaaaatcagatgaagcttacccttggttgttgagcaatttactccccgtaggcataaaaggggttgcattcgcagcgctaacagcggctattgttagttctttagcatctatgatgaatagtatagctactatttttacaatggatatttatcgttcgtatatccgtccgcaagttggggaggctgatttggtacatgtgggccgctggaccagctttatatctttggtaattgctgttataatagcgcctatgttatctggacttgatcaggcatttcagtatattcaagaatttacgggttttatcagtccgggtgcattagcaattttccttgcaggtttcttttatcgcaaagccacagccaatggagcattagcagctgctttaggaacctttatcttttcccttttactaaaattcctttgtccggggttgccttggatggacaggatggggattgtctttttgctttgctgcggattgattgttatgctgagaaaccgaacacaaattgatgtgtctgcatctccggtacgatggtcacttttccgcactggaaaattatttaatattttgtcttgtatcattattgccattctgatttatttctactgtttgtggtggtaaaaagtaaaaaggcattctgggataagtctgatatttatttctttaaatctaataattgttttgtgttatgaaaaattatttattgacgttgattggattgctattcgcaatcggattgtctgcacagacagtgaaagttactggtacagttttggatgaaggtaggcagcctttattgggtgtaagtatttttgtgcagtccaatagagctcatggaactgtaacggaattaaatggtaggtttaccattgatgtagcggtaggagagaagttggttttctcttatatgggatttgtgaataaaactgtgcttataaacaaagctgaacatgatttgcttgtcattatggaagaagataagcaggctttggatgaagtagtggttattggatacggtacggcgaaaaagaaggatataacaggtgctatatcttccgtatcggcagacaaactgaaggaaactccggcagtcagtctgaatcaggctcttcaaggcaaaagtgcaggtgtacaagtgcagttgagtgataattctcccggtggaggtgtcagtgtgcttattcgtggaaaaggttctattaatcagtcaaatgatccgatttatgtagttgatggtatcattatggaaggtactttgaataatatcaatgtcaatgatattgcctctattgatattctgaaggatgcatctgctgcagctatttatggttcaagagcagccaatggagtagtgattgtgacaacaaaaaagggcgaagaaggaaaggcaagagtgtcattcagtgcccggacctcatttcaatctccctccaacttgcctaaaatgttaacggcacaggaattggctgaaatccgtattgaggggaatgtaaactcacaaatggatgcaaaattcttggcaaatccacaaatgagcatagaagaataccgtagtgagtttaatgccttgaagcaacagtatgccaaggaattacccacgtctatgttttcggatgttgaaagacaaactttacttgccggtgaaacgtatgactggtatgatcaaatatcacaaactggtgtggttcaggattatacggtttcattgtctggtggtacaaataaaacgaattattatatcagcgctaattattatgatcagaagggtattattcagggaacaggacataggcgttttagttttcgtgtaaatctggaacagcaaataaagtcttggctaaaagtaggggttaattcaagctattatgatggcgcaactacttatggaggagctaatattggaaatggattaggtgcaaatccgatgtacccgtttgagatagatggtaaagcgcctttggagttaccttactatacgaatcccggacaaagtaatccggccttatccaaacagatagataatgatgcaaagtccaaccgtttttctatgaatgcatatttaaagatagatattacaaaagatttatttttaaagagtagcgtgtctttggatcaggtgaataatttttccggatatttcgctccttcaaacataaaacaggggcaaagcgtgaaaggtgaagcacaaataaagaataacagatggactgacgttatgcaggaaaattcactgaactattctaagttgttccaagaggtacatagggtgaatgtgatgttaggcaacactgttcaggtaaataattattttggtaatacgcaatatgggaatgggttcgctacgaatgtaatgggatataataatatcagttcggcatctgaatttccggcgggaaagcaatcttccagtaaaaccagatgggccttggcttcttttatcggtcgattgaattatgcttataaggataattatatttttacttttacaggacgttatgatggtaattcccgctatgctgagggacataaatggggctttttcccgtcagtagccggtgcttggcgtatttccggagaaaggtttatggaaaaggcgcattggcttgatgatctgaaattgcgttttggttggggacaactgggtaatagtaatgtagcgctttattcatcgtttactaaattatcccccggaatcacagtcgattaccaaggaaattcggtaaataccatccaaaattcagatcagtttatgggtaataaggatttgcgttgggaacgtcaggaacagatcaatgcaggggttgatttagcggcttttaataaccgtttgcgttttactctggatgtgtataagaaaaacagtaaggatttggttttgcaaactcctttaccggtgactaccggttatctgaacatttattctaatgtgggtgaattggaaaacaaaggtatcgaaatttctttgggaggacgaatcattgctaccaaggacttttcctgggatttggatgtaaattgggcaactaacaaaaataaattgaagtccttgtatggaggtatcaaggaaaggatgaacgacgcatctaatccattaaatgccggttggtgggtaggaaagcctctgggtacgatatatacctatcgatatgaaggtatttggcaatgggatgatgatagggttctaatggataaaatgaaagatggtcgcgaaggtggtgatacttattatcctggtgaaaacaaaattgccgatttggacggagatggacagataacaactaatgacagggaaattgttggttatactgatccgaaggggtatggagggatatccactactttgaattataagaattggactttgaatgtaatattcaattatgtgtatggtaatgatgttttcaacagatcttatcatgaatatacgctgggtgcaggctatggaactctgaacatgttcaatgatgaactgaatcgttggagtgttaataatacaagtggttccataccgagagctcattccaataatctggatagaatgttgatatccagtagagttatgcaggatggttcttacctgcgtatgaagaatgtgacattgaactatcagttccctctgaagtggattaacaaggtgggattgagtaatctgaatctttatgtttcaggagagaatttgctgacatggacagggtttaagggagccgatccggaatccgtaggtacgggttatgatgagacttatccgaacgcacgttctttcactttgggattaaatgttagtttttaaggttgtacaaataaaaatacgaagtatgaaaaagatatatatatatgcattggctggagttttagctttatcttcatgcgatgagtttttaagagaggaaccggaagatttcatgtctgctgaatctgaagacgtagatgaggcattgattgaggcagaaatacagggagcttataagtctactttgtggtttaaaaatggacgtcaggggtttattgggataaccggtacggatgaggccagaggaaaaacggtggaagttaactattgggctgaacaaggagcgatagaccgctacaacacgtcattgaatgctgacaattggttgacgaaatggttgtgggactccggttatttcggtatatcacgttccaatacagcaattaatgctgtacgtaactatacaggcagtacggaggaatggaggcttagtaaagaagctgaggcgcgctttgtccgtgcattcgattattttatgttggtacagaactttggtggtgttcccttgattactgaggaaacggttctttctgccactcctaattatccacggattgataaggctgaaatttataaatatataatccaggacttagaattttgcgaatcacacctaaagacagattatcgtgcaggacgacctacggttggtgcagccaaggctatgctgatgaaagtttatatgtatgcaccggagtctaccggcatacggagttattctgaagcaaaacgcctttttgaggaaatagaaggtttaggcgtatattctttgcaaccgtcttatgccgatttatttaagccggaatttgagaatggtgtggaatctgtttatgagtttcagtttgaatatccggatgagcaaaatcaatttcaatatttttgtggaagcagagctctcgaccagtttacagagggaggtggatttggtatatttctgccgagtgagaggtacttggggttgtttgatgatacggatgaacggtttgatgccagtgtccggactaagttctatgataagaatggcaatttgctgacctcggcggccgatccggaatatatagctcctcattgcaagaaatatgaagattatgatcgtgtaatggatgccggagccagctcgaaaaatatctattttatccgctatgctgatctaatcctgttatatgcagaatgtcttttggcggagaatgacttggctggtgcaaagcagcaagttatccgtgtccgtaatcgtgcaaaggtttccactccgattacagcctcaaataatacagaaatgctcgacttcatttatgaggaacgcatgcgtgaattggggatggaaggttggagaagaatggacttgatacgtcgtggagcagattattttgctgcgcaagttgataagtataatccgtttgcgaagggaaatgtacagccatatcatgctttttatccaattccaacgaatgaaattaatatgaatgacggaataggggcggaagatcagaatgaaggatataaatgaaaaaagtacaactatgaataaactgttgttaggattgatttttacaatacttttgtgcgcaagctgtaccaatagggggatggttgctatagataatggtattgtaaagctggaatttgatttgaagcagggaacttataaaggaattgatgtggaaacaggacaaacctgtatttacgatgcctcttggcgcgtgaatgattttctttctacggatgcagactccatctattatcagatagaggcaattcaggattcgttgggaaaaggtcaatctatacaggttgtttcagtaaagaaaggacaaccggacttggtttttaattttaatttgtatgatcaggaaccctttgtcataatgtatggtggtatccgtaacggaacctcagaaggtatacagattaaagaaatatcgccggttgcaaacgcccgtttgttttacggagcggatatctctaaaaatttcaagcttatagacggtgaaggtggaggttgcccgacttatattcgtgaaactccttctttgttgtcacaaaacaacatgatacttcatttcggaactgacgatgactttcatactttggtgggtggaggtgcttcttatggagagtttgccaagtatgccttaataggagaaaaagaacaaaggaaggctgacttgaaggaacatccggtagaagacttgcagttggtttcttatatcgatgtaggagaagaggctgttggcacggacactgttcagccgtatattacactttcttccggtgctccttataagtttgagggaaacatagcctacaaagaggcaaggactgtagtatgggcggacagggaaataggcgttaagctgcataatctggataaagataaatcctacattgtaggcttgtcgtggtgtgatgatgcggacagacgaaaacagacggtacatctcaaatatggtgataaggagataacttgtattgaagattgtcggctgccttctttggcaaaaggagagaatgcccaaatcatttattttgagattccggcagcggccaatgaactggaaccgcaattattggtgaaacaggctggtggtgataatgttgtgatcagtgaagtacttatttatgaagggaaacttccggaagaacgcttgaataagcctgaaacggttgaaattcctgcggctgattttaccaggtgcaccctgaatttatatgcatcagatgttataggtaaacttgtggatgcaaagtcaggatatatgacggagaaggaccggttctacttggattttgtaactgccaatccaatttattctgctgaaaagtatgcgcagactttacggatcttacagcaaataaatttgaattactactattttccgacaatttgtatgtggtatgccatgatgcctatttatggtggaaatattgtcatggggacaaatgatactgttggagccgtagaagaaatgaaacgtgtaaaactgagtggattcttaaaatatactaccatgggtattcgtcttgtacccgattgttatgatgaaaacaatgagaatggttggtgggatgatgagcactggcgtttacgtgggagcggaccgcagggagaaagtatgaagttgaaatcaggtcattaccgtgccccttatgatacttccaggaaatgggcacaagctattttggatttgggcggcttgccatttacctactttcaaacggcggttcgctcgaaagattatgcggaagcttatccggaacatatgctttttaatgaatcttttcatgagattgatacattcgactggctgaataaaaattatacgacttatgattttactgacatcggtttcttggcacacatgcgtgatgtatatcacaatttgaacgacgcaggtatcgtcggtatgatgtttgattatccatatacggggtggccagtgtatggcgggatggatgacaaatatagtacagcagccggtgcttatcgtacgatttttaaattggcttcagaagggttgggcaacaaagcatatatccacgaacgtaatttgaagtatggctctgatattgcattggggtatgtggcttcccagcgtacctggggagatacagatgtcattactccggagatggtaactcgaagtggattacgatggtataaaaaccgtgttgtggtaaattatgatatggatgcaaagaacctgttgaaggcacaaccggcagattcggaagatggaataaataaattgttgactatgtcttatgtgacggcttcccgtttgctcttggccaatagtttcggtacattggatgctgagcacgtatataagctgtcgcgtatttatcctttccatcagtttgcaaggagtgcccgccctttggatgctttcactactgactatccaagagtttatggcatgaagcttacagataaatggagttcgttgacattcttcaatgaagatgaagaacatcctcaaaagatcagcattaagctttcggggatagaaggacgtggaggagccggtttacatcccgacaagcaatattatatttatgatttctggaatgataaactgattggaactttcggtggtaatgaaactctggaacaagagttgcgcaaaggggaggcaagacaaatggctgttcgtgaagtggaaagtaatccgcaagttttgtctacagacagacatttactgcaaggactcctggaattgtccgaagttttttggaatgaagaaacgaaggaattgaccggctatgctgagctggtggagggtgaatcgatgcatattaccatagcaacgaacggttggcaaccccagcattgcactgtggctgataatgaagtggcatgttctttggaaaacaattctgagaatcttgtaaaacttgttttgaagagtacgcatggaggaaaagtatcttggaaattctcttttaagaaatagtttgtagaatttataaagtatctgataaattaaaaatacgaaaaaatgaaatatactgcaattatatggggagtattgttgttcctatgttctgcttgtggacagaaaacagaagtaacttcgcccgatggcaggaacaaactgatgttgatgttggatgaatccggttcattatattatcagattttttccggtgggaatgaaattgttcgcagctcgctgatgggggtggttgcggagaatggtaaatattgttttgacagtggattggtgtatgtggatcaaacgggacggactatcaatgaaacatatactttgcccacggggaaacgctctgaatatgtgaataagtcaaatgaaagaacgttcgtctataaaaacgccgccgggcagttattgaaggtcgtttgccgtgcttatgatgacggggttgcattccgttacgaactgggcaatcaggagccggtaaccattcggcatgaactgacagagtgtactttgtcggatgaaacccatacttggatgatggactggattaaggattatgagaatttctacccggaacgtgtacttgatactattacgagacctacagagtttctgtttcccgtccttacattacaggataagcagtggatgttgatgacggaagctgaagtgtattccatgccagccatgcacttgtcaaaggaaccaaaatctgctacatttcattatgtgtatgcacctgaagattcggcatttgtggctgaaccttcttttaagacttcatggaagacttttattatgggtcaaaatataggtgatattgtagaatcctcgttggttgagaatctgaatccttctacagatttctctgatatggattggataaagccgggagttgcggctttcccttggtgggggaattatttggcaaacagttatatcgatactctaaaaatgtatgttgacctggcagccgagatgaagtgggagtggttggaatttgatgtttcactaatcaatactccgttccattcttcaaaggaatgggaggatgtgacctggataccggaattgactgcttatgcaagggagaaaaacattcttgtatatgggtgggatgagataaaggtgttggacaataaggcgggacgtgattttgttttcgaccgatataaagaaatgggcttggatggaataaagattgattatatcgattctgattcaaaatatgcaatgatgttccgcgatacagcttgtgctgaagctgccaaacgtaaaatgatggtgagttttcatggagagactttgccgcggggacatcgcagacgttaccctaatatcatgactaatgaaggagtgcgaggagctgaatattataccttcaagggggcccaatcacctgatagccgccataattgtactttaccttttacacgtaatgtggttggatctatggactacactcccgtgacctttactatccgtgatgagaatccgcgtacaacaacgtatgctcatgagttggctttggcatttacctttgaatccggatggatttgtatggcagacaggccggccgcctatttgaattctccagctcgtcctttgcttgaaaagattgaggcagcttgggatcagattcatttcatagacggttttccgggcgaatatttctgtgtggctcgatgcaaagcggggaaatggtttgttgcgggaattaacggcggacaaaaacgtagaattaaggttcccttgtcttttctggataaaggtcaacataccataaccttatatgctgacaaggaagggaatgaattgcatgatgtacgcattgaaactttcccggaaataagtgagaaagaggtgctggaaatagatgtgttgcctcatggaggctttgtactggatattgattaaaaaaacaaccacatgattttgagaaatttattcgtaactttcctcgcatttgttgcgtgggggattcaaacaaatgctggtgaaataccacgaaaggaatatccacgtccccagtttgagcgtaagacatggctaaacttaaatggagaatgggactatgcctttgattttacaaatattgggatggaaaaggaattccataaagctacaactttcagcggtaaaataacagttccttttccgccggaaagtaagttgtccggggtagaacataaagattttatcaatcatatttggtatcatcgtatcatacggagaccggaagaatgggcaggcaagaatgtaatactgaactttggggctgtctattttaattcggaaatctatattgatggaaaattggttggaagacatttcggaggtagctcttcttttggtttcgatattaccggatatgtagaggatgggttagaacaccatctggtggtgcgtgcaagcagtgatctaagatctatgatgcaaagtgctggtaagcagagtcttttgctgaactctcatggatgccaatatacgcgtactaccggtatttggcaaactgtatggctggaggctgtggcatcggcagggttacagtctgttcatgcgctaacggatattgaccaaaaacagttggttattcacccccgtttttatcgtgacagttataagaacacattgcggattgttttgcaagagaataacaagaaaatcggaacagtatgtgtcaaagctgcaaatagttctgtggctgtattttcattgaagaatgtcaggttatggtcaccggaatcgccttttctgtatgatgtcctgtatcaagtgttggatgagaatggaaaggtgatagatgaggtgacttcttatgtgggaatgcggaaggtccatattgagggaaataagatttatcttaataataagccttattatcagcgtttggtacttgatcagggattttatccggacggtatctggacagctccttcggatgaggccctgaaaagagatatagaaatctcgatggctgccggttttaacggtgcccgtctacatcagaaggcttttgaagaacgtttctattattgggccgacaaactgggatatatcacttggggggaagcaccaagctggggaatggatgcaaacagcattgaggttgcacgtaactttctgcaagaatggtcggagcttgttttgcgcgaccggaaccacccgtctttattgatttggacgccgatgaatgaagagtggtggcccgatcacatacaatatccacgtttcacagcagatttgtatgatttgactaagtcattggatcccactcggccggtgaatgatgctagcggaggatgtcatataaaaacagatatatggacggtacatagctatgaacaagatccggctgctttgaaggatgccttatataaagatggagttttctttcagacacctaataatccgcaaggagtgccatccgccaatgtgggatttaatgggcttggtgtagatagtccctatccttttccgaaatatgagggcgatatgccctatttgatagatgaagtaggtggtataaaatgggtagagacgaaagataaaagtaatacagatagttcctggggctacagtacacctcctgcaactcaagaagaattcctgcaacgtcttgaatcgcagatagatgctatactaagtttaaaggaatatgtttggggatattgttatacacaattgaccgatgtagagcaggagcagaacggcattttcttttatgatcgcaggtccaagtttgatttgaaacttatttcccgtatcttttctaaaactccccgggaataaattttgcattttattcttatcagttataaggcaaaaagataaaagtggcagctgagcattttattgtggaataataagaaagatgggaagaaggtcgtatgaaaaccccgctttgctttattgtttttcttcttttgcctgtagtaaaacttcgtcccacggttgcgggctctatggtttccaattggaggctgtgtagcccgcaattgtgggatatacagtccacaactggaaaacgaggttttgctacaggcataatgacattagtattaaagctttaggggaaaaaggaaggagcatatcaagttttacatctacagttcagcttcctatataatgagagtatagggtttagctcctaacaaaattatacgtttttaactccagtaatgaatagttcaggctaaaaagagatatctgcatgaattcaaacaaagtttgtgtaatgcatcttaagagtctgttaattagggaaatatgagtttgaaaggatgaaacaactggtgtaggatgaagctttcatacatcttcctacaccactttctacaccatttatctatttgataatcaaatgaaaataatggcgggtgtaggatgtaggagatattgatataaactcaacagtatgtgatttcatttctataatatatttcaggttttcatttatgtatatctcctgaaaaatatttttaatagaggggatagggaaaacacttctaaatggagtagctttatttaatttttgtattatttttgtatcgatgtacaaaatcattgctaatactattatgaaaactctttttgctttttttctactacttgtcacctgtaattctgttatgggaactattccggcaataccagcggatgttcataatcaccaactttactataccgctcctgctaccatttgggaagaaacacttcctttgggtaacggtcgtctcggtatgatgcctgacggtggcgttgatcgtgagcttattgtgctgaatgaaatctccctgtggagtggtatggaagctgattatggtaatccggacgcttcccgaagtctcccggctattcagcaacttttatttgaaggaaagaataaagaagctcaagaactgatgtatagcagttttgtgcctaagaagcctgaatccggtggaacttatggtaactaccaaatgctggccgacctcaatatcgacttcagttttccgcatagaagaaaaactacttcagaaaatgatgcagctccggttactgattaccgccgttggctcgatctgcgtgatgcagttgcttatacctcatttacgaaagaaggtgttgactatcaacgtgaatatttcacttcacgcgataaggacgttgtgatcatacacctgactgccagtcgtcgccgtgccctgtccttctctgctcaactttcccgtcccaaacaaggtgtggtctctgtgcttccgggtattgggaagaaagaaggaactttgttgttggaaggtactttagacagtggaaagcccggacgggaaggtatgaagtatcgtgttgccatgcgattaatatctaaaggtggtaaacagaatatttctgccgagcgtggtatcaccctgactcaggggagggaagcatggctggtgctttctgccactacttcttatgctgcttccggtactgatttttcaggaaaccgttataaagaagtttgtgatagtttgctgaatgccgctactcaacatgtgcaaattaaagagtcccacatagcctcccatcgtaccttttatgatcgtgtatctctaactcttccgtttacggaagatgatgtattacccactaacgagcgcattactcgtttcacggagcgtgagtctccagctttggctgctctctattacaattatggtcgttatctatttatcagcagcacccgtccgggtagcttgcctcctaatctgcaaggattgtgggcaaatggagtagaaacgccttggaatggcgattatcataccaatattaatatccagatgaatcactggccacttgaacaagccggtctttcggaactttaccagcctttgactgcgcttgtagaacgtcttatcccctcgggagaagagactgcccgtactttttacggtactcatgctcaaggttgggtgcttcacatgatgacgaatatctggaactataccgctcccggtgaacatccctcttggggggctaccaataccggtggtgcctggctttgtgctcatctttgggagcattatcaatatactcaggatattgagtttctgaaacgaatttatcctgtgctgaaaggtgcttctgagttcttttactctacaatggtgcgggaacctaaacatggttggcttgtaacagcccctacctcttctcctgaaaatgctttttttgtcggcaatgatccgactcccgtcagtgtatgcatggggcctacgatggatgttcaattactgactgagctatataccaatgtaattgaagcaacttccatactggaatgtgatgctgactatgccgcgaagttgcgggaggcattagataagttcccacctatgcagatcagtaaaggaggatatctgcaagaatggttggaagattataaagagcaagatgtacaccaccgccatgtctcccatctgtatggtttgcatccgggtaatctgatttctcctgatgctactcctgaacttgccaatgcctgtcgtgagacgctaaaccgtcggggtgatggaggaaccggttggagtcgtgcctggaaggtaaatttctgggctcgcctcggtgatggggatcgtgcctggacactgttcaagagccttctttatccggctgttgatcctcagacaaagcgttatggcagcggaacgtttcctaatttgttctgttcgcatccccctttccagattgatgggaattatgggggaaccgcaggaattggcgagatgttgttgcaaagtcatgagggttttattcatctgcttcctgctttgccgaaaagctggcatactggtagctttcatggaatgaaggcccgtggcgggatctccgttgatttggagtggaaagatggaaaggctgtgaaggctatacttacggcaactataccgggaatatttcatgtgaaaatgccggaaggtgtcattcgggcaaaggcgattatagacgggcaaagtaataactacacaggtaaaacgatttctttgtcattgcctgaaaagggggaatgtgtgttatcgtttgagtaaattatctcttaaagatttgcctgccctatgtgaataccttacttttgcacgcagttaaacctaattgcttgctgcaacatgaatatgaagaacagaattactttatttctccttgtgctctgcctgttgatacctgcaacgaccagtgcacagattcgcgaactggaacgttcgatacccgaagtggaaggggttccttccggagcacttattgctttgatggactctctgatgggcttgcctaaaacggacatacatagtgtgatggtactacgtcatggaaaggtaatcgcggagatttatcctgaacctttcgctccggaatatcggcataccgtatattcttgctccaagaccttcgttggtgccgctgtaggcctcgctatttctgaaaatcgcttgcggctgacagatcgggtggcttcttttttccccgaccaacttccggatactatatctgcaaatcttgcagatatgaccgtccgcaacctgctgaatatgacttccggcgtcactcctgactggaatatgcgtaatggtcgtacagactggatcagagggtatctggaaaaaacgataaaagttcccggcaaacatttcgattatgactccatgagctcgtatattctttccgctattgtgcagaaagtgacgggaatgaaagtattggattacctgcggctgaaactgttcaaaccgatgcatatcaccgatatatcctgggaagtaagccctgaaggaatcaataccggaggttggggtgtgtatttgcagagtgaatcgttggctaagttcggacagctgttactgaatcgtggagtatgggaaggcaagcagttgcttccggcagagtgggtggacaggatgatgactaaacagtcggataccggtagttttggctacggttatgggtatcagatgtggctttgtgaatatccgggtgctgttcgcatagacggtgccctgggacaatatgcgcttctcataccggacaaagatatggtagtggtcatcactgaatgtactttgatagatggagctacacagcgccgtttggtgtggaatcgcctgttgcctgctgtcggcgatgataccttgataccgggaaaggattataaacgcttgttgaaaaaacaatcttcttatcagttgccttttgtaccgggaaaagcgagttcatctcttgcccgtgattatgcaggaaaaagtatagttctcgaaccgaacaagttcgactggcaatctctggatctccagtttaagcagaaggaagtaatcatgaccgtaacagagactgacggtacaaaatataatctctcattcggttataagcaatggaaaaaaacttcaaccgatgtctatcctccctattcgatagaagcgaaaggacgttttaatggaatagaggggccgttttatgtagcgggcagttatgcctggccatcggctgcgatgttggaacttaaagcacattatgttaactggattacagctctcaatattactttccgctttgacggggagaatgtgcagttgacggttaaggagaactactcgtcggaaccgaaagttatcaaaggaaaggtatgcgactaagcggagtgttacttatctttgtgcccaataaaagaatttatatgttatgaaccgtatcacactgaccctgaaacgcccttttatctggttgagccgttttcgccatcgttgcggctatggggtacattcgccttttgctttcaatctgattacgcaggtgatttacgaatctactccttattataaatataaagatctggcagtagagcagaaaaaactggccccacagaaagacaactattggaagtatgaatcgaagaaagtgaaacgcctcttgttccggttggtaaattacatccagccggacacgatagtggatgtcggcaggcttgccgcttcgtctctctatctgaaagcaggaaaggagggagcggactatacagcggcatccgaactttccgaattatttctggaagccggcgtacccgtaggtttcctttatctgcatgattatcgtcacccggaatttatggaagaagtattccgtatctgtgtagcacgtacctgtggaaagtcggttttcgtcatcgaaggaatccgctatacttcgcaaatgaaagcgctttggaaacgtatgcaacaagatgagcatgtgggcattacgttcgacctttatgaccttggaattctcttcttcgataaaactaagataaaacagaactatattgtcaacttttgattatctttaggcgtttcaatagtgattaacagttagtgattggtgattagcgtcacttactaactgctaaacactaattactaaacaccaatcacttatgaagatatataccaaaaccggtgataaaggtactacctcattagtaggtggtacacgggtaccgaaaacccatgtccgtctggaagcatacggtacagtggacgagttgaatgctaatttgggagtgcttgtcacttacctgccggatgaagcggatcaggtacttgtccgtcatattcaggaccgtcttttcgcagtaggttccaatttggctaccgatcttgaaaagacagaattgaagtgtgccagtgttattcaccccgaagaaatagaacgaattgaacgggagatagatcgtttggataatctgctgcctccattgcatgcgtttatattgcccggcggtagtcgtggagcatctgtttgtcatgtttgccgcacggtctgccgcagggcggaacgtcgtattctggccttggctgaacaatgcgaagttgctcccgaattgcttgcttatgtgaaccgtttgtccgattatttgtttgtcttgtcacggaaaatcaactgggatgagaaaaaagatgaaatattttgggataatagttgtaagtgagagattttattatacttttgccgaaaaatagaaagtaggacttaatattcacaattttaatacttaggacttatgtattggacattggaattagcatctaaactggaagatgctccctggccggcaaccaaggacgaattaatagattatgccattcgttcgggcgctccgctcgaagtgattgaaaatttgcaggaaatggaagatgaaggcgatatttatgaaagtattgaagatatatggcccgattatcccagcaaagaggatttcttctttaacgaagaggagtattagcatgctttttgaaccttgctccggttggagaaatacaaggtagttaacacatagaaagaggtagtccgttagatctgtttataacaggttaggaggactgcctcttttttatattattccatttatgactgaaacacgagaaaaaacggtatgccgcctgccggaactaaaagaacggcacttacccggagattgccgggaagcggtatacacgcttttaaaagagacttacggttacgaacaatttcgtgatctggaagtgtacgacgatttgttcaaggggaaggacacgcttcaaatttcacagggacaattgatagaaagtgttattgtcgaagcagagaaagcccggaatggaggagaagatgtggataacatcttgcttacagcacctaccggtgcgggaaaatccttgttgttccagttgcctgccatctatctgggtaatgaatacgggatgcttaccattgtcgtatctcccttgaaagcattgattgtagaccaggtggaaggcttgcaggaattggggtacatgcgtgtggcgtatgcctcttccgatttgtcgcccgaacagaagaacgaagtgtacaggcaggtgcgtgaaagtgaggtggatctattctatctttcaccggagttgttgctctcgtatgatatcaagcactttgctggtgaacggcgtatcggtctggtcgtagtggacgaagcccatacggtaactacatggggcaaggaatttcgtgtggattattggtttctggggcgctatctgcaaggtttgaagaaaagccttggatatgcattcccactttttgcactgacggctacggctgtatggaatccgaaaggagggaatgacatggtgttcgaaaccattcgttcattgcaaatggagccatgtgtgctttatgcaggtacagtgaaacgccggaacatcggctttgatatccggcagatggagatagaggaaggagaaacctatgataaagccaaacagcgtgttgtggctgaccgtgtagaggatttcctcgacgggcataagactattctttattatccttttgcaggtggtatcgacatgcgtctgaaaacgtgggtgaaatcgacggattggcacttggtcgcctcctactatggtaagaaggacaaagaacaaaaagcagctattgtacaggagttcaaagaaggcgagaagcgaatgattgtggctacaaaggcattcggcatgggggtggatatcagtgatatcgaccgggtgtatcatgtggcgccttccagcacatttgtggactatatacaggagatcggacgtgcagcccgtgatacggatattcatggaatctcggcgacggattatcatgaaagggatttctattatatgaagcgcctgcacatggcgggcaatatagcacaggaacagttgtcgctgattttgaagaagctgatggaagtgtaccggatgaaaggcgaaaaacaggaaatgctggtgtctttgtccgactttgagtttgtggtgaaattgccaagaatgaagaacaagctggaatatgaagcggaacttggacaattgattaagactgctctgctatggttggaagatgatttgagccatcgttatggaaagaaattgctggaagtgagtccgcaaaacctgctgacggaaggatatattcaggataagactggtgatgtttttattcatgagttcaaggattatcttacgaaggtgaagggcacggaagatgtgtatacggcacgtttggagaaactgtgggaagaacgtttcgcagagttgggatatagagaatttaaacagaaattgaatggtggtacgttgtgggaaggttcccgtgcagtgtctgtgggtaagcatgaagtattgctgaaagaagatgcagccgtaattcgccaacgaatggatggactgttctatagtttgaagactttgcttgttgataagttgcggaagactaaagggcgttttgatgaagaagaattgcgtgcgatatttgccgagcatggtatggatgtgccgtcagcgaaacgtttcataggttcactgctggagtcacgtacggaagaagggcgtagtgtgagctatatcagtagtgtgaagaagaaagactccaatgaactttctttcacggtgacgaaaggatttgacttgttgctgtcgcgctatcagaaactctttagccagcgcattgtgggtaaaaaaggtgaccggttattgttctatagcactccgttctctgatttgaatatgctgcttaatctcctttccatgctcgattgtctttcattcagtgtagaaggtggcggtacgccttgtgtgcaggtgtgtttcgatgaccctgagagcttacagcagattgcgtcctccgatgaatatcataatctgatacttgagaataatgagcagatatttcaggagcagatcgaactgttctctttcttcttcggaacggatggaatggatgatacgaaacgctgggattttattgaagactactttaccggaatgggagtagaggagctgaaggcgaagtatgctgctccactataaaaccaattctttgaataatctttctaacgtcctgtccagatcgtcggagaaaccggcatgcggacgggacgtttgaatacaggaacttctcacggcagtcagccagcggaaacgttccggtacatcaagttgggcgatggggccgccgtctttggctcccgaacatattttattaaatacatccaaatgggcaaataccaattcccggtctacttcggaaacatatagcttcagtttgtcctcgtttacctgacaaacggacttgatgtaacctgcccttttcgagaaaaggattactcccacattgaagaactcctcacgttctactttgggaaccaggcgaataactgcgtattcatataagtgctttccttgcattctgtgcttcttttataaatatttcggaatgggccagtctttcggtcagaaagcgggtatagatatctctgatttcttcgggcgtttcatgggtatcttcccagtgcagccagtcgtcaggaataagtgcgacgacctgctgtatcttttcatcggtcagcatgggacgaaggagggtatcggcttcttcaagtcgggatgcttcgggtagcagcacgtgatttttgatataggtgaacggacttaccgcatgtttctcccagttttcccatgaatggtgaaagtaaagagaagcaccgtggtctatcagccaaagttccttgtgccacatcaacatgttggtgttgcgaaaagtacggtctatattggtcaggtaggcatccagccagacaatacgtgaggcaagttccggatctaccttggtcgctacaggatcgaatgtcagggcacccgaaaggaagtgtaaccccaggttcagtccgcggctaccttgcaataagtcttgtatctcttcgtctccttcggtccgtccgaatgcttcatcgaggttcaggaacaccagctccggcactctgaatccaagtatatgcgcaacctctccaccaattaattcggatattaatgcctttgttccatgcccggcaccacgaaactttacgacgtatttgaattcgtcatcagcttccgccagtgctggcagtgaaccgccttcgcgtaaaggagtgatgtaacgggtcagattgactgttcgcaactctatcatgattgtcctttcagaaaatagttaggccgtccggctcttttgaggggatgactgttgcaaagatagtgaatattcacgattgcccaaggctggcttccagaaactgttgcagaatgcgggcatgattacggacaggttctttggaggcatatagcaaagtaactgttttatagggtttgattgatgccagaaagttccgtgtggcttcagatgtttccagttctttccgatacatatctgagaaagcctcccaatgtcctgccatatcttcatgaaaccatttcctgagttcaggggaaggcgtgatgtctttttcccagacatcatatttcagatattcttttttcatgccgcgaggccatagacgatctaccaatacgcggtaaccgtcttctgcttcggggtcttcatagacccgtttgatttttatctgcgtcatagctttcttttttatatatacaaataattggtagaattagttcattactatacggttatgaattaattcaccacagattacacagattgacacagattctattttactgattattagattaataaatctgtgtgagtcagtgtaatctgtggtgagtcttattcattcctaatacgttatgaggtcaagtgataagtaatctctttttccttgaaacgaattatctgtttgtggtaaatacatggcctgtttccagagtctttctctttttgattctgttttacacaattttttctcgttttatcagttcttatattgatgaaatatagccgtatcctgaaatatataatttttatctgtcttttcttttgtgcggcaaaaggtcaggcgcaatttgatgcacgcttcagtcaatactgggaggtgaagggatattatcatcccggctgggtggggcagacagataataaaatgaatatttatggttcgtatggcatgcagttgatgggttttacacatgctccgcgcgtgatgtactttggggctgatatgccttttactctgttcaataaacagcatggtgtgggtgttggctttttcaatgaggggatcggcttgttccgtaatcaacgtttttggggacaatatgcctatcagatgaaaatccggaaaggcaagttgggtatcggacttcaagtggggatgctgaccgtatcgtttgatccgtctgatatcaatcttggagatgaaacggatgatgaagcttttccgactgctgcggagagtggaatggccgttgatctcggactgggtggatactattcgcaccctaaattttatgcaggattttctgcccatcatctgacggctccccgtgtctctctgggagacaaaagccaaataaaaatacatcctatcttttatttgacaggtggatacaatattcagacgcgtaatccgttaatttccatacaaccttctatgcagttgcaaagtgattttacttctacaaggctggatgtaacggggcgattgttttatacctatcattcccgggtgcttagtggaggattgacttattcgccggatacctcggtgacattcagtttcggattgacggtgcggggcgtgacgttaggatatgcttatgagtgttttacttcgaagataggtgtcgcgagtggtagccacgatctggtagtgaggtatgcattggacttgaatgtatttaagaaaaaccggaacttgcataagagtgtacggattttgtaagagaatatacgaacaatgggaaagaataaaggaatgaaaacaattcatgcgtggtacggggcggctttattgctgttcggttcgctggtttcgtgcatggggacggtgggaaacagttccatgagaggtggcgaagtgataggagccagtgctgtggcatggaatgagcctgcgccttacggtatggtgctggtgaaacgtggttcggtgaaaatgggccccgacaagcaagatagcttgtggggaacaatcgttccttcacgggaaatttcagtcgagtctttttggatggatgatacggaagtgacggttgccgaatataaacagtttgtcaattgggtgcgcgattccattatccgtgaacgtctggcagatcctgcttatggcggtaatgaattatataagatagaagaagaccgggaaggaaatcctatcaaaccttatttgaactggtcgaaacccattccctggaagcgggcgacagaggatgaacagatggctatcgaaagcgtatataagcatcatcctatcgacggtacgctgatgctggatgccggtcagatgaattattattatgagatttatgactatactgaggctgccaagcgtcataatcgcctgaatcccgctgaacgtgttaagaataccgatatacaggtgaacccggaagaggtgattatgataacgaaggatacggcatacattgatgatgaagggcggattgtgaaccgtactattacacgtccgttatccagcgaatgggattttctaaacagctatatagtaaatgtttatcccgatacaacctgttgggtgaatgactttccgaatgcgaataatgaacaatatatgcgtttgtatttcaaccatcccagttacaacgagcatccggtggtgggtgtcagctgggaacaggcgaatgcgttttgtgcatggcgtaccaattatttacttgcaggtctgcgtggacaggctaaatatatccagcgctatcgcctgccgaccgaggccgaatgggaatttgccgcacgcggaagggaggataataaatatccctggaaagaaagtgaggaaaccaaagatgaccgtggatgctacaatgcgaactataagccgggtaaaggaaattacaccaaagacggcaatctgatttcaacccgtgtaggagcttatacacccaattcgaatggattgtatgacatggcaggtaatgtggcggagtggacttcaacggcttatacagagtcgggagttctgcaagcaagtgacatcaatccggatattcagtataatgccgcgccagatgatccgtatgcgatgaagaagaaagtggtgcgtggtggttcatggaaagatgtaaacgcgtttatccgttcggatgcccgtacggcggagtatcagaatgagcagcgttcgtatgtggggttccgttgcgtacgtacacaagtgggatataataagaaggggaaatgataagatggtaaaatggtaagatgatggaaaaagatactgtaaataaaaagagggattttggacaaaagttgcaggactttatggcaagttaccgtggcaaggtcattatgaactatgcttatagctggggtgctgctatcgtcattgccggtacattgttcaaactgacgcacttgcctggtgctaacctgatgctgtggattggtatgggaacagaggtgctggtgttttttatttctgcatttgatttgccgaaaaggcagacggaggcggctacatccggcggtatcgttgtggtgggagatggcacaatcggcagtgccggtggatggacaaatgatttgctgaagacacaatccgtcccttcaaatcagccggtatcagtgactgtaggagcgaatcaatattctctcggaactccggcccctgcttttactcctgaaatggaagaaactacgcaggcttacatagcccaactgaaagaaatgacagaaatgctttcgcgctttacagcacaggccgaatctctttcacatgatgctgagcagatgagcgctttaaaccgtaatctggcaggtatcaacgccatctatgaaatgcagcttcgtagtgccagcactcagattaatacaatcgatcaggtgcatgaacaaactcgcaagatggcgcgtcagatagaagaactgaatgctgtctatgcccgtatgctacaagccgtgcaggttaagtgataaagtggtgaagcgatagaacgagagttaaagctatcgtgcagccaaattgtaaattgtaaattgtaaataaccccatgtctctgaacaccaacccggattctccgcgtcagaagatgataaacctgatgtatatcgtcctgatggcgatgctggcactcaacgtttcgtcggatgtgctgaatggtttttcattggtagatgaaagtctttcccgtacaacggcaaactctaccgtgcagaatcaatcactatatgacgggcttgccggtgccaatgaacgtaatcctgagaaaataggaccgtggtttgagaaagcggtacgtgtgaaaaatatgtccgattcgctctatacctatgtggatgaattgaaactacgcattgtgaaggaagcggatggcaagaatggggatgttgccaatatctccaataaagaagacttggaagctgcttcttttgtgatgcttgcacctggtagcggacagggcaaagcgctgttcaaccgcatcaatcaataccgggaaaatattctgactcttgttaccgatccgatacaacagaagatcatccgtgataatctgggtactgaagtaccgcgtaaggcgtcagctgcaggaaaaaactggcaggaatatatctttgaaaatactccggtggccgcagctgtcacgctgttaaccaagctgcaaagtgatgtacgctatgctgaaggtgaagtattgcatttgttgacgcagaataccgatgtgcaggatgtacgtgtaaatcaacttcaggcttatgtcattcctacctctcagaatgtggtgcgcggtggtacgtacagtgcccgcgtcattctggctgctgtggactctactcagcgtccttctatttatatcgccggtgaaaagcaaccggataatgccgaaggatggttcgaaaccgtttgcaaccgtacaggggagttctttttggatggttatctggagttggcgcaagggaatggcgaagtgcttcgcagagagttctcacagaaatatacggtggttgaacctactgctacggtttcagctacaatgatgaatgtactttatgccggatatgataatccgatcagtatttccgttcccggagtgccggggggacaagtacaggcaagtattgtgaatggaaacggaactctgaatcgtgccggaaacgggtatattgctcatcctacgactatcggtaaagatgtagtgattcgtgtgacggcatccgttggcggacgtacgcagtcgatgggggattatacttatcgtgtgcgccagttgcctgatccttcaccgtttatagaatatacggaagacgggacacctaaacgatatcggggaggccgtggattatctaaagcaattttgatgaatactcccggcattgtagctgctattgatgatggtttgttgaatatcaacttccgggtgctgggatttgaaactgttttctttgataatatgggaaatgccgtgccggaagtgtcttcgggggcttcattctctacacgtcagaaagatatgttccgccgtttatccagaggtaaacgtttctatatttcccgggttcgtgcggtggggccggatggggtggagcgtttgttgcctactacactggaagtgattgtgaattaaaattagaaatcgaatataataaggtataagactatgaaactttccttgaaactcatgatagctgtcacactctgtgcactggatctttcagtggggtgggcgcaaaggcaatatccgggttcgccaggcttgccggaggatgtggtgtggatgcgcgaaatctatcgtacgctggatttgacaaaggataccaatggtgcattatactatccggtggaaccgcagggaaataagatgaatcttttcgctaccgtgttccgtttgctggcgcaaaagaaaattccggcttatgaatatcagctggatggtacggagcgctttcagaaagatgctgaggtgactttccgtgatgtgctggatcgctttcaaatttattatgaactgaagaaagtggcaaatcgccgtgacagtgttttgtctatcagtaatagtgatataccttcagcggatgtattgagttactttgtgaaggaggtatggtattttgatcagcgtacttctacttatggctcagtgataacggctatctgtccggtgttgcatcgttcggaagaattcagttcggagaaagtgaagttacctatgttttgggtgaactataaagacttggttccctatctgactcagacaaaagtctccgttagcaattataataatgcagcaaacagtacttgggatgacttctttacggcacgtttgtataaaggagatatttataaaacaaccaatctgcaaaatcgtactttgtcacaatattgccctacggatagcgccatggtgaaagagcagaagcgaattgagaaggaattggtggattttgaaaagacattgtatggtagggaccttatagaagaaacggattcggtttccatggcttcgggaataaaaacagcgaagactaattcgaagaaaagggggcgtgacaatgctgttacaaccaaaagtaaatcttcttcctcatcaaagtcaaaatcttccgcaggtaagtcccaatcggtatctaagcgggaagcagcagccccgaaggcgtcagtacgacgacaacgccgttgaacaaaaatgaatctttattgttctttttaagaataaatccatatatttgtcccgataatttaaacaaaaaagaattatgaagaagatttttagtgctttcattatagctgtaggctgtatgtttatggctatgcctgctcaggcccaactcattaaatggggtgtaaagggtggtgtcaacttgacaaagatagactgggatggcggatataaaggtaacaaggacaactctgccggtttctttattggtccgatggctgaaattacgattcctattgtaggcctgggtgttgatggtgctttgttattctcgcagagaggtaagggtgatgtaaagcaaatcggagcggaagttcccatcaatctgaaatatacgattggcttgggtagcctgctgggtgtttattttgctgccggtcctgattttttctttgattttgataagaaagacaacgttgatcgaaagaaaactcaggtaggacttaatctgggagtcggtgtgaagctgatcaagcacttgcaagtgggtgtaaactatcagttcccgatgggtgatagctttaaatggaaagaggtaggtcatgccatcggtgcaaagaataagacttggcaaatatctgccgcttatctcttctaagaaaatagaatctattgcgatataatagcgttgctgattttgattggcaacgctatttttttattgtatctttgtcgccgcaatgaagaaatttgtggatgtcatattgcctttgcctctgccccgctattttacctattctttgcctgaggaatgggcggatgaggtgcaaatggggtgtcgggtagtagttccattcgggcgtaagaagtactatacagcgattgtacgtaacgtacattattgtgagccggcggattatgaggtaaaagaagtatctgcattattggatgcccatccgattttattgccggaacaatttaagttttgggagtggctggcagattattatctctgtacacaaggcgatgtttataaggctgctctgccttccggcctgaagctggagagcgagacgatggtagagtgtaatccggattttgaatcggaagttcgtttgccggagcgtgagcagaagatattggatttgctctctgcggagcccgaacagtgtgtgacaaaactggaaaaagacagcggcctcaagaatatactttccgtaattaaatccttgctggataaggaggccatctttgtaaaagaagaactccgccggacttataagccaaagaccgaaacgcgcgtgcgactggcgaatgaagtacggaatgaaaaacggctgcaagaactttttgatgaattggcgcgtgctccgaagcaactggatttactgatgaaatatatcgaactatccggtattttgggaggtgacgggctgaaaagttttcctaaagaggttaataagaaagaactattgctgcgggcatccgcttcgccggctgtgttcaatggcttggtagataaacatatctttgaagtttaccaacaggaagtgggacggctgaattccgttcttcgggaaattcttcccattaatcctttgaatgaacatcaaaaaatggcatacgatgaggttgtacgaagcttccaatccaagaatgtgtgtctgctccatggggtaactgccagcgggaaaactgaaatctatattcatttgatagaagaaactatccggcagggaaaacaagtgttgtacctgctacctgaaatagctcttaccactcagattaccgaacgtctgcaacgggtgttcggagatcgtttaggaatttatcattctaaatttccggatgccgagcgtgtagaaatctggcagaagcagctgacggaaaagggatatgatattatccttggagttcgttcttctgtttttctgccttttcgtaacctcgggttggtgattgtggatgaagaacatgagaatacctataaacaacaggatccggctccccgttatcatgcccggaatgcggcaattatattggcagccatgtatggtgccaagaccttgctgggcacagctaccccttctattgaaacctggcataatgtttcttccgggaagtatggactggtggagctgaaagagcggtataaagaaattcaattaccggaaattatccccgtggatatccatgagttgcatcgcaagaagcgtatgaacggaccattctcgccgttgttgcttcaatatattcatgaggctttggatcaaaaacaacaagtcatcttgtttcagaaccggcgtggctttgctccgatgattgagtgtaatacatgcgggtgggtgccgaagtgtaaaaactgtgatgtgagcctgacatttcacaaaggattgaatcagctgacttgccattactgcggttatacctatcaactgccccataagtgcccggcttgcgagggtactgacttgcgtaatcgtgggtttggtacagagaagatagaggatgatatcaagattttatttcccgaagccgctgttgcccgtatggatttggataccactcgtacccgctctgcttatgaacgtatcattgcagattttgagcaggggaaaacggatatattgatcggtacacagatggtttccaaaggattggactttgatcatgtcagtgtggtaggtatcctgaacgcagatacaatgttgaattatcctgatttccgttcgtatgagcgtgcttttcagttgatggcacaagtggcaggacgtgccggacggaagaataaacgcggacgtgtaattttgcagacaaaaagtatcgatcaccctattatagctcaggtcatccataacgattttgaccagatggtggcgggacagcttgctgaacgtcagatgttccactacccgccttactatcgtctggtgtatgtctatctgaaaaaccgcaatgaacaattgcttgacctgatggcacaaaccatgtcaggcaagttgcgtgcagtcttcggtaatcgtgtattgggaccggataaaccgcctgttgcccggatacaaacattatttatccggaagattattgtcaagatagagtataatgctccgatggctcgcgcccgcgaactgctggtgcaggttcagaaggagatggtggcggaggatcgttttaaatctttaatcgtctattatgatgtagatccaatgtaaaggctactctttggttccttgcagaataccggaatctgtatctatattctgaattcccttattggcacccttgtattgtcgtccgaagttcagattaaaattgagcttgacaacaatggtatttgacatattcgtactgtgtatatctgattttacaggattcagtgcagaccagttcgcattctcggagcggtaagtcttcataaatggattgtgtattcctgccataatagaccatgccggttgtttataacctatcatgagtgtatgcatcagatcacctttcagcaattgttcaccgtatacataccggttgggtggagtgatggtcataaagctcagaagccagtttttataggaagcatctaggttaatacgtaattctttcagggtataggtgtgcaggtaattgtttcctgtacttatataccggttaattcccggtgtaacagaaaggctgatgtgatctttccaaggctttatattgaatgtgacttccgctgccagatgttggaaggacttctggttttcataagtgtggataaacataccttcttcataaatcacagattccatgatgggattcttttcgtatgcatagctcaccaaagcgtcaatactgaaaattcctgtgctgaatattgcgttaaaatcttgaatcgtactacggaatgattttaagtccgggttacccctacgagtttgtaggatgtcgattctttgctccacatcattcagataagctatggaaggggcgttgtttttcagattgatatgatagcggaaatgcagattgtccacagggttgtaggataccaagagagaaggttggaagccatatctttcactatggttatctctctgactgtagtagaaacgggtgagtgatagatttgctatgtatccccaattctgaattttacctttatactcggtgtaggcataactttccgcttgttttaggaggacgttcattacatcttccccttcatagcggttgtctgtataagattgcatatgtctaaggcctcctgtcagtgtcccttgccctaattttttctcataaatgccttcagctatcagcgaatatttctttccggcaatatcggaatataactctgtattggcgatgccttcctgtttctcctgataaatgcgtgtattgctgctcttgatgtacgtgccgacaagattgaatatgagtcgttggtcattctttagattctgctgatagtatagatcgagggatggcaaatggtttcgttcctgggtatggtcgtagatggataccgggatgtcggaatcagatgtgtagagtttgctcttccggtcttcatatccggcaggattatcttgcaaggtatatctgaattgtgcattaaagagatattttcctttttcttgcagagtatagtttaggttggaagctaacaatttcttattgaacagcgttggctctccggtttccaggcgatgaagttcattgtcggggaaaatgaagcgttcgtcatactcacgtgtccagtctcctttacgttgtatataccgcacgttggctgagatttcagactttccgtagttatatcttccggaaatcatatcgtcaatagaggtgcggttgctactgaggctgtggatggcaccgccgctgacgctacctcccacttttttgtttttggttatataatctatcacggcagcagcgtttccgtagcgtgctcctggagtatcgtgatattctatgcggagaatatcttcggggctgagggaggatatctctgtataagtaacccgaacaccgttgatccgtaattgtacttctccgttgccggaagtggttatttcgcccgacatgatatcaactgtgattcggggaagctgtaatttgcctaataagtctataccgctggacgacattttcagttgattctgggtcggaagtattactttacggtcgcctttttcgatgatagaccgtgcctggatggtaacttcatccagagagatagccatgactccggtagaatctttagcaatgagttgggcataggaggggctggccatacacagtagtatggtcaaaattgacactattgttttcataatttttgtgggaatagctgttacccggtgggtaaaacagagagtttaaaaatgaggttagtaatttagaaggtcgctatacagtcctttcaaccgttcgcgaaggtggatgacggcataatgttttcgtgataataaagtgttgactgatatcccggtagcactggcaacttctttagctgacaatccttccatttccagtaactcaaatgcttcccgttgttcgggcggtagttcggcaagagctgtttcaagttcttgccacacgagtgaccgcatgtattctacttccggagtaggcggagcatcgctgaacagcacttccgaaaactcgctcagtacattgtcttctttatcatagcttgaatcgggtagttcttcttcctgcatctttttgcctttattgataatcgtatttcgtgctacgcgatatagccatgctgttacctgttcgataggattgaaagtgctttcaatggttttcaccaattgatacagcacatcttgcagaatatcttcggcatcttctttactggaaacccgcttgcggataaatgctttcaggcggggttgatattccacaatcagttcttccaaactgttgcctttgccggtcagattattcattctttttgggagtttcgctaccgttgtttctatcaaagtttctctcgttgaagaatccgtctcttccgaaagggccaccgaatccgaacttctttcttttattaatgaaatccttgcgttcttccggagacatcttctcccatttagcgcggaacgggttaccctctttaccatcgggcattcttcttcggccggggaaagctcctctaccagggaaacctccgaagaaaatgcgtgcaagtacgaataatgccaaagcttgccagaaattgatgcttgccagccctaagactccgggcactacgaaattccataatagcatgactattgctccaaaagccgcaatggctaatacccaaaacaaagatataataaaaaatctttttttcatgatgttctaattttattgatttacatattactttgaaaacgttctctgtatatgctgacaactgagaagaagaaatattttaagagaatgcaaaaaaacttctatatttgcgttcctaaattaaaaaatgtgcttatgaagcctcatagaatactttttgtttgcctgggtaatatttgccgttcttcctctgcggaaggtgtgatgaatcatttggtttcagaagccggactggaagatcagtttgtgatagactctgctggtattctctcttatcatcgaggagagttgcctgacagccggatgcgtgctcacgctattcgtcgaggttacgaactcacacatcgttcgcgtcccgtacagacggaagacttttataacttcgatttgataatagggatggatgaccggaatattgaagatttgaaagaccgtgcgccctcccctgaagaatggaagaagatacaccgtatgacggaattctgtacccgttttacgcatgccgaccacgtgcccgatccgtattatggtggggcggaaggatttgaatatgtgctcgacttgctggaggatgcttgtgccgggctgttggaacatctgaaataatcgggttcgtcagtgcgtggtgtcttgatagaatctcttgtcttcattcaggctgcatgttgcatccactcctgcactttgtagtacttcggcaatatcattcaaggttcggcgcgatacccttcctatataatagaggcgatagtgatagtctttatctaatatctccataacatgcgtaaaagcctgttcgcgtgcaaagtcaaaattgactttgagtatatcttcgtaaggatacttaatttcacgtcctacgctgtatatcctaaggctttcgttatctactttcagataacagaaacgtgtcatcaacatgtgtataaagtagatactcaggccgaatgaaatgattccgagaatatatgcccaccaacttccgaatactacagcctgatatcccaatatcataaacgtgatgaaaagcacaaagaagtagaacatatagagtgatgggcgctgataggtcgtggtcggaatctctgctactgtccgttttcgggtgatatggttctcaaaaggtatatcttgtgaaatcagatagcggataacagatgacggcttttgaaacggatggacataaaaagctctttgaataccctgttttaggcgcaatgttaatatgcccgcgccatatttatctttgaccttcaggttgctcttgcgcggaacttcatgaaaacgtttcatgaaactgaaactttggatgtcgtgtagccggatacctctgcgttgtagcaggctttcggtacgtttctggtcttgtgcgattgttttcatatcttttattttttaagttcgggatagctgatgcgggtatgataaattgttttcagtttctctttgaacaccgatttcacgatagcaatgtctttgaatgtaataggacattctttgaagaaaccttcttctacctgagagtctataatcttttccaccagattgttgatgctctcttccgtatattcgggcagactacgggatgcagcttctactgcatccgccatcatcagaatggccgtttcgcgggtgaacgggtttggaccggggtaagtgaataattcctcgttcggctcttcatcgggatgctcgttcttccaagagatatagaagtatttagtctttcccttaccgtgatgggtactgatgaagtcttttatcactttaggcaaattgtttttttccgccagtttcagtccgtccgtcacgtgactgattatcacctgtgcactttgctcgtagctaagatttttatgcggattgacacctcctgattggttttcagtaaagaataccggattttccatttttccgatgtcgtggtacaaagctccggtacgcaccaactggctcttagctccaatacggttggcagcttctgcggcaagattagccacttgcatggaatgttgaaaagtgcccggaacagtctctgacaaacggcgcagcaacgggctgttgatattggaaagttctaccagagtaacgttggaagtaaatccaaatgttttctccaacaagaacagaagcggataggtgaacaatagaagtataccattgactataaagtaactatacatacttccgtttaatttcgataaatcgttttcggtgatcagttcgaaagcgaagtaaagagcagcataggtcagtatcactaataatgccgtacggaagagttgcgaacgttgtgacaattcgcgcaaactgaaaatagcgaccagaccggcagccagttgcagcaatataaattcgtgtgggtagcgtaggcaaatggagcagatcagtatagtgaccacctgcgtaaggaatgctgtgcgtgaatcgaggaatacgcggataatgataggcagcatggcatacggaatgatataaacattgtatatgttattcgacaccatgagtgctgtcactacacaatagaacataatcagtgtaaatagtagggataaactccccttgcgttcgtaataatccttgcggaataaatcgaggtacagcataaaacacagcatgaaaatgctgacaaataagatttgtccggtcaatatcaaacgtttttgtccgatggattcactacgttggatagactcctttctcagactttcaaggatattataagtttccttatctacgatttccccccgatcaatgatcttctggccactttgtacaacaccattggcccaggcataattatccaatgcttccttcttggctgtttcggtgcgttgctcatcgtaagtcagattagggtacaaatattcgttgagtgaacactggcgcaggatatacggagaataatgtgccgtgtccgcagtgagcaggtaggcataagcgtctttaacggaaaaaagctgttcggtcccccgctggttggccagcttatcatcaatcaccatgatgacagcggtgctgtctttttgtaatttgctgcgttcttcggtagaaagtatacctgctttataaatttcggataaccttttctccagatagcgcatatagtcagaagacggaacaatgtcgcgtaagtgactttgataatccgtttttaatttgctaagcacggttttttctacatttttatccaactgatagtagggttggaaactggcaagaatgctgtcttgttcatgttttactacagcatcatctttatatatggggaaattgaatgtggccataagttgcccatacttccatggtttgtcaatatcgaactgataattaaacttgccgtcacgcggtaagaagtatactatgatggctaccgtgccgataaaaatgagtgctttgtatagcaaatctctgtaagaaaagctttttttagtcttggatttattcatatcggttgaattttttgcgaaaagtacaaaaaaaaacattagtgtggaaaaaaaggtttaattttgccgtctaattatctcataagtaatgcaaaatatgacagaaagaagagtcagagtccgttttgccccgagtcctacgggggctttgcacattggtggtgtgcgtacagcattatataattatctctttgcgcgccagcatgggggagacatgattttccgcattgaagatactgatagtaaccgttttgtacctggtgcagaagaatatatccttgagtctttcaagtggttgggcattccgtttgatgagggtgtcagctttggtgggaaatatggtccgtaccgtcagtccgaacgccgcgaaatatacaagaagtatgtgaaggtattattggagaatgataaggcttatatcgcttttgatactcctgaagaactggatgcgaaacgtgccgagatagccaattttcaatatgatgcttctactcgtatgcaaatgcgtaattcattgacactttcgaaagaagaagtggatgcattgattgctgaaggtaagcagtacgtagttcgtttcaagatagaacccaatgaagatgtacatgtaaacgacttgattcgtggtgaggtaataatcaattcttccattttggatgataaagtactttataaatcagctgacgaactgccaacttatcatcttgccaatattgtagatgaccacttgatggaagtttcccatgtgattcgtggcgaggagtggttaccttctgcacctctgcatgtattgttgtatcgtgctttcgggtgggaagatacaatgccggcttttgctcatctgcctctgctgttgaaaccggaaggtaacggcaaattgagtaaacgtgacggtgaccgccttggttttcctgtattcccgttggaatggcatgatcccaaaaccggtgaaatatcttctggatatcgcgagtcgggatatttgcctgaggctgtaattaatttccttgctttgctgggttggaatccgggtaatgatcaggagctgatgtcaatggatgagttgatcaaattgttcgatttgagtcattgtagcaagtctggcgctaaatttgattataaaaaaggcatctggttcaatcatgagtatatattgttgaagcctgatgaagaaatagcggaactttttgttccggttctgaaagaacatggagtagaagttccgttcgagaaagtagtaacggtggtaggcatgatgaagaatcgtgtaagtttcgtacgggaactttgggaagcatccagtttcttctttgttgctccaacggaatatgatgagaaaaccgtgaagaaacgctggaaagaagattcggcccagtgtatgacagaattgatggaagtactggcaggaattgaagattttggcattgagaatcaggaaaagattgtaatggattggattgccgaaaaaggatatcataccggaaacattatgaatgctttccgcctgacattggtaggtgaggggaaaggcccgcatatgttcgacatctcttgggtgctgggcaaagaagagacactggcgcgtatgaagcgtgcaattgaagtactttcttaattcaataagtatgctttacgaccttgcgataggtatctatgaccttttggtgcatcttgcggctccattcagccgcaagccccgtaaaatgatgaaggggcattgggtagtgtatgaacttctcaggcaacaattggaaaaagatgtacgttatatttggtttcatgccgcttctttaggcgaatttgaacaggggcgtcccctgattgaaaaaattcgtgccaaatatcccgattatggtatattactgacattcttttctccttcgggatacgaggtacgcaaaaattatcgcggggcggatgtagtgtgctacctaccgttcgataagcctcggaatgtgaagaaattcctggatatagccaatccttgcatggcattcttcattaaatatgagttctggaagaattatctcgatgaattacataagcgtcgtattccagtgtacagtgtgtcatctatatttcgtcgtggccaggtgttctttaagtggtatggtggtacgtatcgccatgttcttcgtaatttcgaccacttattcgtacagaatgaacgttccaaacgttatttgagtaagattggcatcaaccgtgtgacagtggtcggcgatacgcgtttcgaccgggtgttgcagatacgtgaggaggcgaaagaattgcctttggtgaaactctttaagaataacaccatgaccttcgtagctggtagttcctggcaaccggatgaggatctgtttattgaatatttcaataatcatccagaagtgaaattgatcattgctccacatgtgatagatgagaatcatctggtagagattatccggaagttgaaacgcccgtatgttcgttatacgcgtgcggatgaaaagaatgtgttgaaagcggattgtttgattatagattgtttcggtctgctttcttctatttaccgttatggtgaaattgcatatatcggaggtggcttcggggtcggtattcataatacgttggaagcagctgtttatggaattcctgtaatattcggacctaagtaccagaagtttatggaagcaattcaacttttagaagcccagggtgcattttctatcaagaattatgaagaactgaaagaattgttggaccgtatgttggctgatgaggttttcttgcgcgaaaccggaacgaatgccggatactacgtcactagtaatgctggggctacggataagatattaagtatgattaatttctaaggaatacggaataatgagaacagcgggcggatagatttctattcgcccgctgttgtatatggaagttcatctggctttattctttataccagttagaatacatcagataattgtgtgctatcttctgattcagttctttagcctgagccggatctactttttttatgaacttggcaggtacaccgccccagatgcttcccggttcaataactgtattgcttaagaccaatgaaccggcggcaacgatagctccttcgcttatcactgcatggtcaaggattgtagagcccattcccactaatgcatagtctttgatggtggctccgtgaatagtaacattatgtcctacggaaacgtggtcacctatttcaattgtagacttttcatataatgtgtgcagcacacttccgtcttgtatattgactccattcccgatacggatagaatttacatctccgcgcaatactgtgctgaaccaaatgctgcaatcgcgccccatttttacgtctccgatgatggctgcgttatcagctaaaaaacaattttcgccaaactcgggagtaaaccctcttactgatttaattaatgccattttatatagtggttaatattttgattataattgattcgttgcttctttcaaccatgcctgttcttctttgttcaagctgggcgataatttctcatatacagtctgatgatattggttaagccaattgatttcttctgatgtgagcaattctttgataattccctttttacaaatagggcaaagggttactgtctcaaattgtagatagttgccaaacattccttctccggctggtactactaaaaccagattctccgtacgaatcccatgacttccggctttatatactcccggttcattggaagtcagcatacccaattgcaatgttaccggattttcattcatacgaatactctgaggtccttcgtgtacattcagaaagtggcctacaccatgccctgtgccatgcaggaagttcattcttctttgccatatcggcatacgtgccagcacatctagttgcgcaccccgtgtaccggcagggaatacagccattgccagtgcaatgtgccccttcagtatcaatgtataatctgtcttttcttcttctgtcagttttcctaaagcaatggtacgtgtgatatctgttgttccatccagatattgtgcccctgaatccaatagcaaaaaaccttccggttttagctggacatctgtttcgggagtggcttcatagtgcacgatggctccatgttccttgtatccggcaatcgtatcgaaactttctcccatatataaatcctgttccgcacgaaattcatgcagttttttatctatgctgatttctgtttccttacccgttggaacagatgcttctaaccatttcagaaacttaaccaaagctactccatcccgttgcatggcagcatgtattccagctatttcctgttcgttgcggatggctttcaataaggtgaccggagaagcgccatgaataatcctgcaatcaggattgactgctgaatacatagcataatttgttttagccggattaagaagcagactctcaacactgatccggctgaggtatgcttctgcttcctcgtaggtgtgcaggtttactcctgtttctttcatataagtagcaacctcagcggttatcttttgaggttgaatgaaatagtgagtttcgttctcttcgataagtagatagctgacaagcacgggattgcaatgtacatcgtttccacgcagattgagagtccatgcgatttcatctaaagcggataagaacaatgccttcgcattgcacttttttagttcttttcgaataatggcaatcttttctatgctgctttttcctgcatattgggtttcataaataaaagcaggagcttccggcattggcggacgatccgtccataatttatctaagggatctgagatgctttttacttttatctgacatttttgcaactcggcttgcatcctttctacttcttctgcagaaaacatctttccatctatgccgacagcatcgccaggagttagttgtgtacttaaaaaagctgaaatgctgggtgtttcgggaagcatctccttataaagttttatttccgtgccttttaattgctgggcagcctggagaaaatagcgagagtcagtccatagtcctgcttggcttgtagtaataacaacggttcctgccgaaccagtaaagccggaaatccattcccgggatttccagtggggagcaacatattcgctcagatgagggtcggtacttgggataataaaggcttgtatgccttcctggctgaacaatgcccgtaggccttgtagccgatcattgatagtttggctcatatactatatataataaggtgtaacattcactcttcaaagatactcactttctctgaattttttcgaaggatggtcacactttatctgtatcgagaatttgtttttggcgggttgtgaatcagctacaagccaagcgcctttcggatatagcgcagctacttgtagctcgtaactgtacggtaacgaatgatttcagcgtttctatagttttttcttataagttttagcttcttcattagtagagatttattctttccaccacggtggaaagaaaagtaccccgcggtggaaagaataagtatttgctatggttgcgcttagttttcacaagagaaagagataaaagtgacggtgcggtgatttaatttggcattttgcagctaattctttacctgtttccttttttattgatccggatttatttttctgtaggtctaaatcttgtttctttttgcagaattttcggcagaaagttttgtgaataaagaaactatgtgtaattttgccgctcaatttaatcgtgagatttttaaaccattaacattttaataaaaagaaaatgattgtagtacctgtaaaagaaggcgaaaacattgaaaaagcgctgaagaagtttaaaagaaaatttgagaaaactggtatcgttaaggaattaagaagcagacagcagtttgataaaccgtctgtagttaaaagacttaagaaagaacgtgcagtttacgtacaacaacttcagcaagtagaagattaataattcgtaatttcctttgaattattgaattcttttcatacattcgttgcatgatttttgatgtagcgatatatgtggttgacaaactcttttcttgactatctccagtacgaacggaattattctgaagagactataaagtcttatcgggaggatttatgtcaatttgagaaatttgcaagagaagaaattggagattctgctctatcggaagtaaaggctgaacttgttcgtgaatggattgtttctttaatggacaagggatatacttctacttcaattaatcggaagttaagttcgctcaggtcattttataaattccttttaaggaaaggtgaagtgtgcgtgaatccattgcaaaagataacggggcctaaaaataagaagccgctacctacttttctaagggaaagtgagatggataaattgctggacgaagtggatttcggtgaaggatttaaagggtgtcgtgatcatatgattattgaaatgttttatgctacaggcatgaggctttcagaattgataggattggatgataaaaatgtagatttctcttctttacttattaaagtaacggggaaaagaaataaacaacgtttgataccttttggcgaagagttgaagaatgcaatgatagagtatgtcaatgtaaggaatgagattgttctgactcgcacgggtgctttttttgttcgtgagagtggagaacgactttcccgcagtattgtagaaaatctagtgaaacgaaacctttcgaaggtagtgacgttgaaaaaacgtagtcctcatgtgctcaggcatacttttgctacgacgatgctgaatcatgatgcagaactcggggcgataaaagaacttctcggtcacgagagtttggcgacaacggaggtttatacgcatactacttttgaagaacttaaaaaagtgtataaccaggctcatcctcgggcctaaaagtaaggaggtaagtatggaagtaagaattcagtcaattcactttgatgcgtcagagcaattgcaggcttttgttcagaagaaagcagtaaaattggaaaagtattacgatgatataaagaaagtagaggtgtcattaaaggttgtgaagccagagaccgcagaaaataaagaagcaggtataaaagtcattattcccaatggggagttttatgcaagcaaaatctgcgatacgtttgaagaggcgattgatttgagtgttgaagccttggaaaaacagttggttaaacacaaggaaaaacaacggagcaaataaaatttcgctaaaattttgcggaaaagaaataaatgcctaaatttgcagccgtttcgctcacgatagaacgtaacggttgcattttttgagtaattgcctctttagctcagctggccagagcacgtgatttgtaatctcggggtcgttggttcgaatccgacaa

SEQ ID NO: 6351 - DNA, 4314 bp, Unknown
  gut microbiota DNA sequence
gcagactgtaaatctgctggcttacgccttcggtggttcgaatccatctttgcccacacctctttttctccttgctgttatagctcagtggtagagcacttccttggtaaggaagaggtcccgggttcaaatcccggtaacagctcgtaaggatgtaaatgctgattattaatcaaataaataacaagtaaagctatggctaaagagaaattcgaacgtaaaaaaccgcacgtaaacatcggtacaatcggtcacgttgaccacggtaaaaccacgttgactgctgctatcactacagtgttggcaaagaaaggtctttcagaagttaagtctttcgatcagattgataatgctcctgaagaaaaagaaagaggtatcactattaatacttctcacgtagagtatgaaaccgctaatcgtcactatgctcacgtagactgtccgggtcacgccgactacgtaaagaacatggtaactggtgctgctcagatggatggtgctatcatcgtagttgctgctactgatggtccgatgcctcaaactcgtgaacatatcttgttggctcgtcaggtaaatgtaccgaagcttgttgtattcatgaacaagtgtgatatggttgacgatgaagaaatgttggaacttgttgagatggaaatgcgcgaattactcgctgcatacgaatttgacggtgacaatactcctatcatccgtggttctgctcttggtgcattgaatggtgtggaaaaatgggaagacaaagttatggaattgatggatgcagttgataattggattccgttgcctccgcgtgacattgataaaccattcttgatgccggttgaagacgtattctctattactggtcgtggtactgttgctactggtcgtatcgaagctggtatcatccacgtaggtgatgaagttgaaatcctcggtctgggtgaagataagaaatctgttgtaactggtgttgaaatgttccgcaaattgctggatcagggtgaagctggtgataacgtaggtttgttgcttcgtggtattgataaagaatctatcaaacgtggtatggttctttgtaaaccgggtcagattaaacctcactctaaattcaaagcttctatctatgttttgaagaaagaagaaggtggtcgtcatactccgttccataacaaataccgtcctcaattctatctgcgtactatggactgtacaggtgaaatcactcttccggaaggaactgaaatggtaatgcctggtgataacgtagaaattaacgtagaattgatctatccggtagctttgaacgtaggtttgcgttttgctatccgtgaaggtggtcgtacagtaggttctggtcagattactgaaatccttgactaattaccaaatatattaatcagttcccggtttatatcgggaactgattatattcacacgggagtagctcagttggtagagcaccggtctccaaaaccgggtgtcgggagttcgagcctctcctcccgtgctaatatttttgaaatgaagaagattgtagcttattttaaagaaacttacgacgaacttgtacataaagtatcgtggcctacgtattctgaacttactaacagtgcagtagttgttttatatgcttccctgcttattgcattggtagtattcgcgatggacttctgtttccagaacgtaatggagaaaattatttatccacattaaaaacgagggaaaatgtctgagattgagaaaaaatggtacgtcctgcgtgctattagcggaaaagaagctaaggtaagggaataccttgaagctgatattaaaaacagcgaccttggtgattacgtatctcaggtattgattcctaccgaaaaggtttatcaggttcgcaatggaaagaaaattgtgaaagagagaagttatctccctggttacgttttggtggaggctgctctggtaggtgaggttgctcatcacttgagaaatactcctaatgtgattggattcttgggcggatcggataaacctgtccctctgagacaatcggaagtgaatcgtatacttggtacggtggacgaattgcaggatgccggtgaagaactgaatatcccgtatgtagtcggtgaaactgtgaaagtaaattacggcccgttcagcggatttagtggtatcattgaagaggtgaacaccgagaagaagaaacttaaggttatggtaaagatattcggacggaaaactccgcttgaattaggctttatgcaagttgaaaaagaataatgcaggtgttacgctgtagtattctttattaatgtttatatataaatcaataagaaaatggctaaagaagttgctggactaatcaaattacagattaaaggaggcgcggcaaacccatcacctcccgtaggccccgctttgggttctaagggtattaacatcatggagttttgcaagcaattcaacgccagaacccaggacaaagcaggaaagatccttcctgtgattatcacttactacgcagataagtctttcgattttgtaatcaagactcctcccgttgctattcaattacttgaagtggctaaggtaaagagtggttctgctgagcctaaccgcaagaaagttgccgagcttacttgggaacaagttcgtgcgattgctcaggacaagatggttgacttaaactgtttcactgtagaagctgccatgacaatggttgccggtacagctagaagtatgggtatcgctgtaaaaggggagttcccggttaataactaataaacttcaattagaatgggtaaactgacaaaaaaacaaaagttggctgcagaaaaaattgaagcagggaaagcatactcactgaaagaagctgcatctttggtaaaggaaatcacttataccaagtttgatgcttcactggatatcgacgtgcgtttgggcgttgatccgcgtaaggcgaaccagatggtgagaggtgttgtatcacttcctcatggtactggtaaagttgtgcgcgttttggtgctttgtacaccggatgctgaagctgctgcaaaagaagccggagctgactacgttggtcttgacgaatatattgaaaagatcaaaggtggatggacagatgtggatgtaatcatcactatgccttctatcatgggtaaaattggtgcactcggtcgtgtgctcggtcctcgcggattgatgcctaacccgaagagtggtactgtaactatggatgttgctaaagctgtaagagaagtaaaacaaggtaagatcgacttcaaggttgacaagagtggtattgttcatacttcagttggtaaagtttcatttagcgttgatcaaattcgtgataatgcgaaagaattcatctctactttgaataaattgaaaccgaccgcagccaagggtacatatattaagagtatttatctttctagcacaatgagtgcaggtatcaagattgacccgaaatcagtagaagaaatctaataaaacggagtaataatgagaaaggaagataaaagtacgattattgagcagattgctgctacagtaaaggaatataatcacttctatttgatagacatcactgcaatgaacgctgccgctacaagcgcgttgagaagagaatgtttcaaatcagacatcaaattgatgctgattaagaatacattgcttcacaaagcattggagagtctggaagaagattattctccgctttataattgcttgaagggtactacagctattatgttctgtaatactgccaacttaccagctaagttgattaaagcaaaagctaaagacggtattcccggactgaaagctgcatatgcagaagaaagcttctatgttggtgctgaccagttggatgctctcgttagtattaagagtaagaatgaagttattgccgatattgttgctttgttgcaatcaccggccaagaatgttatttctgctctccaatcaggtggaaacactcttcacggagttctcaaaactcttggtgaacgtaccgaagcgtaaaaatgggaaaggtgtcatgacctcgggagtaacgtcccgaataaattttcataaacaaattagtaattaaacaattaaaatcatacaaaaatggcagatttgaaagcttttgcagaacaattagttaacttgacagtaaaagaagttaatgaacttgcaactatccttaaagaagaatatggtattgaacctgctgctgcagctgtagctgttgctgctggtcctgcagctggtggtgctgctgccgctgaagaaaaaacttcttttgatgtagtattgaagagcgctggatca

SEQ ID NO: 6352 - DNA, 26109 bp, Unknown
  gut microbiota DNA sequence
tagtctgatcaataatcttcgtcccattatataccgttactttataggtaacggaattgttgaataaaaagaaaaaacgtacaagaaaactctagaaaaaggcttttattagtcaaatagtacatcgggacatgaaagaaattacctatcaaactaatttgtaagaaaagagtagattgaataaagtgagaaagaggaacatttaataaaactaactaaagaatagtatgatattttactgatatacagcgatataccccaacatataagttataaaaaaagaaacaagaaaaaccgccggagaaaatatcccaggaaattagctgattatttgcatttctacaatagtcaaatatcagcgttttataatgaaattctataaaatccgccccactctttagaagacagcagcatactctttcacaaaggagataacttcttgattagcttgatctatcctttgattttgaaaaggcttcaaataagtttccgtaaccttgatagatgaatgtcccatcgcttctgaaatgatgcccggatgtatttcacaatgataagccattgtcgcccacgtatggcgaatagtatacgtacttagatgagcatgacttcccatccatttcttcaacacagacaatttatagttgaaagccctcaatgccgattgatattcatgataggccgtttctgtgccttcaggactggataggaaagagaataggtaaggagaatctttatctgtattagctaccattcgaatcaatctcatagcctcaggtgtcaacgccactgtcaatgatcgaccggttttccgacgacggtatttcagaatattatcctgaatatccgctttacgcaaatacaccagatcaacaaatgggattccccgcagcaaaaacataagcgcaaatagtatctttgttttttgtacgtctaaaggtaaagtaccattaataggtactttctctgtttcataaagtaaatttccaatatcagaagcatctaaagatcttctctgatcagcacatacacttgtatgtacgtgcctgaaaagccttggtatgtacaaggcataaccattatctactgcccggttataaaccgcccggagcaccttcatataagtagataccgtattccaactacatcttcgctggcgcaaataaatttcgaagcgtttcaaaaggttcggattcaatttgcagaacggtatatccttatcatcattaaatgcagagaaagaattccgtgcgctccggtatacatgtgcagtgccccactgaccattggcacgaagttccagaatagtagaggatagcatctccaataataatttttgtttcataattgaatgttttttgaatacaattactcttttttttaagaattatagaaaaaagaacagctttatttgcacatttatggaaaaacacttatgtttgcaccatattttgtgccgttacctataaagtaacggcattttttttaataaaaatatcaaataaaaaaagcggggagaatgttcaaaaaaacattctccccgcttttaaaatctatagatatttctctacttttcaggtgtttgttccagtgttgctaccagaaaatcgtaaaatttaggaactgtaggaattaatgcacgttcatccggtgaatgcggagaacgcagtgtaggtccgaaggaaatcatatccaatcccggacaattggcaccaataataccacattccaaacctgcatggattacttttacagcaggttctactccaaactgttgtttatacgacagcttcatagcatgcaaaatcggagaatccacattaggctgccagccggaatatcctccacttagttctaccttcatacctgccatggcaaaacaagccgtcaaactgtctgccaggaattctttcatcgtatcgcaagaactgcgtgccagaatacgtacttccgctttaccaccaccaatgataacaattgccagattagatgaagtttccacggtatcgggcactgtaggaatcatgcgcatcacgccatcctgacaagccatcagcacattaatcatattgtcctgaatttcagcaggtacaatagctgtaggaagttcaaccgactctatcgtcaaagtaatgccactttcaattggagcatattccgcattgatttgcgcctcatattctttaatatagtcttccagcccttccgtatcttccggattgaacaccaatacagcacacgcttcgcgaggaatggcattacgcatatttccaccttcgaaacttgccagctgagaatcaaattcaatcagcacatcatgtgccacgcgagccaaaagtttattggcattaccacgtccctgatttatttccagaccggaatgtccgccacgcaaacctttcaaggtaatcttacgggccacagaatcagcagcgggcgcttcttccttatattccagtgtagccgtcagatcaatacctccggcacaaccgatataaagttcgccttcatcttccgagtcaagattcagcaaaatttcccccttcagtgtccccggtttcaaaccgaaagcaccatacatgcctgtttcttcatccttcgtaatcaaagcctccagcggaccgtgcttcaagctattatcttccagcactgccatgatagcagcaacacccagaccattatcagctcccagcgttgtacctttagcttttacccaatcaccatcgatataggtttcaataggatcttttgtaaaatcgtgaacagtatcattgttcttctgaggcaccatatccatgtgtgcctgaagaatgacgcctttgcggttttccatacccggagtagctgccttacgaatgataacattgcctatttcatcgacaaatgattccaagcccaagccttttccaaagtttacaaggaactctgttattttctccatgtgtccggacggacggggaatttgagtcagcgaataaaaatgcttccacacattctgtggagctaattgcaaaattgtactcataacgtttaaaagttagttttcgcaaatatacatttttattcttaaaccatgcaataaatactgtacgaattaaatccatcaaaaagcatacttacattcaactttttattttttctttctgcaatgcctctttcaacattactttatccagcagtttcttctttgactggatcatgcgcaatgcacaccgcctcaccacattcgtaatagccccaccggacaactccgtttccgccgccatagttatcaactcttccgcatcctttcccaaccatttcccaggaagcatgttccgccataactcagcccgttgttcctccgtcggcatcggaaaataaactaccgactggaaacggcgggagaatgcctcgtctatgttcgagcgtaggtttgtcgccagaatgaccatgccgggaaaatcttcaatccgttgcaacaggtaagccacttcctggttagcatgtcggtcattggatgtattggtggatgtacgtttgccaaacaaagcatccgcttcatcaaaaaacagaatccagttccggttctcggcaaggtcgaatacctttgccaagttcttttccgtttcgccgatatacttggatacaatcatggacaagtctatccggtacacgtctatctcattcttcttgcccaaaagagtcgcagccaatgtttttcctgtacccggaggcccataaaacagcgaacggtatccagctttcagaatacgggacagtccccaatcctccatgacagtcttaccagaggaaatccatacattgatttcttccaattcggtagctacctgatagtccagtaccatatcttcccattccagctgcgtggtaatgcgtttggcgggaaagccgatgttataatcaggtttatattccttgtccagcaagacacggcttaagaattcttccgatacacgcaattgcccactgagaaagggttcaccttctccggcgccttccagacggaggatattctttgtgtagaaccagtgatccttctggaagaaccggatcacccctttccgtttttccgtatcttctccggcaaggataaaagaggcagtctcaccagttggcagaaaacctccatgtgacaagcctttccaaccaccgaattccgtatattgccggtcgaagttcttgttttgtacaaaaaagatgtccagtatctgcggacagacatgcggcatcaacgccaacatgaccaccatccgttcgtcaaatgtcaagtcgggaacgccagtcaccttttccaaccatccgtttacaggtggttttacttcttccagcgaggagtattcacactcctgttggaaataaagctggatagaaatagtcaaaacttgattgaaccatccgataaattcattcatagactattcttttacaagctattcgctctggcacccattacgtccgcctcatgttctaaatctatattatcgttgaccggcataccacccacttccgtagtaggttcaacacgtcctgccagctgttggactacatgccatgcctcatggggcagatgcatctcttggccgggtgccacatggatgtccgttccttgcgtataagctagtgcctggacagtggcaggctgtgaagaattataatgtacttttacatcatccattgaaaaccccgaaagactttcgaccccagctttcagattatcaggcaaaccggtattattcggtttctgttggcatacagtatccgatttcatttgcacgccctctgcatcatcttccacacgctgaacagtaggttcaaatttaccctgcaaggtatcttcttcctcgtcagactgtaactgggcagttttcatctgaaatccttcttcatcctctaagccaacacgttgcaaaagtgtgttcaccatacggttatcaacaaattgtaatgcaccgccgccatcctgcttttgctgtatggtacgtgctactttttcctgatgtactttctctgcttccatacgatttctttatttaatatttaatatcagaattcctgcttatcgtgccattttacttgtatgtatttcttcagccacggtaaacgtatttgccggaatccccagggaacggaatcgagtagaatgtcatgcgtcttgtcgtccacggtaagtagccatttttcgtcctgttcctccaagcgacctgtacgggtaacaaagctttgcagaaatcctttcagcgatgttccgttcatcttggaccaatgcgcttttactgccgacagtaagctatcagcgatttgtttttcctcggcagtcagttccagccgttttggcaacgggatatgcatcggcaacccaacaagcagacgattgaacaccaattctgtttcccggtattccttttcttcttgacaagtgaggtattgtaacaagaacatggcacgaattcttgatttcgtatctttgatatccttccttgcctcgttcagataatcgagcatactcagcaatcggagaaaccatgcagacagcagacagagacctgcattattaacaaagaatattttagaatcagacaccggttcgccggttagccaattcttgtcctctttcggcattaatttttcacttatcatattcactatgtctttaagttcattttctgttttttcttgcaggataggaagtgatttcacaaatgagcgaatattctcttccctgctattgtacgcccattcttccgaaggattttcaatgatataggttaccagagcagtctctaaatgttccttttgaaccggataacttatcaatatgtaatccataacttgctgcaacagttctgcttgcgaaagagacagacttgcaaccagccgcagccattctccggtactcatccattccaaccatttatctgtatgcaatgtattccgtaccacagactgacgaatgtaggccaacagttctttcggtcggaagaagatatggttgtagagcattctttttcgtacactttccggcagagtatcatcttcaatccactctatcggtaatcgggctacgtttttaccgaacaggcgggaaatgaaataatcttccatttgttccggcgtttgttttttccaatttgtttcccttacccataacagcaatattctggttatatctgaagcaaatacccgatcattagcgaatcggctgagccagcttgtcaactgcctgaaatcatcaggatattcaaatcctgcaacggcagacaaaaacagactcaattgttccagtatggttatatccgatacatcgacaatccgttttatcaaaaccagatcagcatccttctccagccatgccaaaaatttctccggatacttttccagaacggaaacaatatgatgactgaatatggtattgcttatattcttttgtaacaatacatcagcaaactcgtcctcccgtacatcttgccatgcctccatttccaagtcaacagccagattgaccgataaattcgtccattccgcatcgctttggaaatcagtcttcccggtatagacaaaatacaaatgagccaggaacttttttaccacctctttttccgttaaggatcttccacctaatgtatctctatcttgcataaagaacagcaatgcttctgaaagagccgttgaaaaaagcctgtcatttccagtaaggaatggaatcccatcagctttgcattgcagccattcaatcgtttccgacaataccgctgcttgacggaagtccgcttgtgccacgctttgcagaagaagaggcgctgacaaataggttgcaacaaatattacagccttgctttcttcgggttgcctacgtagtagccccacccattcatgtactttttcgacaaccattctctgtaacaactcacgcttatcatctgtaaagatggtagcgtcttccagccaatcggtaaagccatttccagcgttccagcggttttccaacagtatgggaaggatgtcggagtctttttgggtttgccgtacccattcctcaaaccttacttttgcaggattcccgttacctgcctcgatagtcatcagcaggtccagtactgcctccatatcatcatattcctcattcctggtttctgtctccctaatgcttccttgaaataccagtttaatgacaatcggtatattttccttgccaaacaatgtcataagaaataaataaagaatttctctcgcagtgccctccatcctcattgacgattgggaaacttttgccagccataaaatcatctgtaccttcagtccgaatgtcctatccttcaaatatgctgagagggcctgttcgttagttaccagccaatcaaacagggataacaattccgcaatatgagatataccgttcatccgcacaaccgaccgcctgataatttcttctaaaaccggctgacttattagagtaagtgtatactccaatacttcatgctcgtgtaacagccatatggcattctcttcattttctatggattgttccaagaacaatgccgtcattctacgttttacaagttccggtatactcttgtctgctaatatctgtcgaagtttcagaatgtcgacacgtattttaccatttcctgcatcttgcttccaaacatcttccgacaagtacaatttttcagataatattttgatagaaggctcattactaccacttgaaaactcctgatagaactgatgtagaagttgttcgatacgttccgactccgaaagaccgcagtgttccttttctatccaaagcaacactgctttgcaaaaaataaagttaaactgagtttcagaaatcccttttagacattctgttttcgatatatggttcagtagataggttcttacctggtcaaccacttccatcgccatgaaagaaacggaagaaagcagacggttgagaagatcagtatcaaccatattagctataacactaagtagagcgttgtctttggcagcctccgattgtaaccaatccgtcagtatttccggcttttcctttatcagtagcctaaataagcttcgtttgtccgccatatttttctgcgtatcatttagatattctgccaccatttccatatctgtaggatatgccgtttgcttccacccggaatccagattctctttcggactttctcccgccatcggcagacgaagtagagaaagttgtaaaaagatacgatacaattcccggtttaaatatccgtcatacacaggtgaaccgtctgcatagtgcggttggaggtcatagatagcatttaatacatccctataataatcaggtccgaaaacttcaagcaggaagttgactgtcagttccattttagagaggtagaaagagtagtttcgcttacggatgaatgtgagcaaccgatggtgcagatggcggataaaatctcctttccccccaaagatagcaatcccgttaaagggataataattgataagccattcatacaaataatgccagtatgggggcagatcgacttcggcatgttcttccgtttctgtttccattatccgacggacagacagcgtatcgagtagttccgccatattttgcagcctgttgtcatcattatcctcgtgaataaaacgcacgggtataccggggttcatctccagaagtattgcaaggaaacgacgtttctcgtacaagccaaacgatgacatggaaagtaagtcggtatagagtcggataagagtattgtcatcatttgtctgccatagcaaacgacacaaagcgtgatcttttctcatacagagagatactacaccctctgcatgaagcgcctgttgcaaaacggcccaatccaattcttccgtcaggttaaaagcactattgtcccattccaccttctgataaccatgttccagatagaacagtagattttccaggcgtgaagcatccgtctttttccgttcgctctccgtcggtatgctccatgaaggcaacactttcagcagttccgctttgaggcgccggggaaactcacggtagaagttttcctcggggatactccccaaatccaattccaacagttctatttcatgcaacaccttgtctttatccaaaggagaaaggcattcatccaccgttttttcaaaatagttacggcaaaagccatcccagtccgcatacaagtcgtgtacgaaccgttcgtccgcagcagcgaactcaaacgatatatgttcaattcgtatcatctaatatctgtatttccacggctttgcccagcaactcgtatatgacttccagcaattgggcgctgtaatccgccaagtcattgttggtcaaagccctcattaataatttgtaacaatgttcaaaaccttgcatacttatctcatccatccagtatatccggcctgccaggtgggcgggaataatagagcgcaataattccctgcacatctccctgaagcgcggcgagtggaaacgaagcgtccacataggaagcacaatcagtagccggaaaggttccgtttttctcaccaataccggttccaatacgtaaaccgtttcacactcccggttcaattccagtaaatatctccgcaggatgttcgccagcgtattcaacctctttttgttatcggtacgtccaagattggtccatccgcctttctccttattgtggaccaccaacagatactcaccctttttagcttctacaatccggtagttaccaagagaaatgccgtggcggaataagtcgccgcttatcctgttccggttgaatatcggcagttccgctcttaactggctatattctttacgctttccttcctcatccattgccagttgctcataagttacggccgtcacgtgctccggttccagcatacgttcatcaataagcagagcatccagtcggtccgccaggggacggtcgggtttcttctctatcagttgtagattatgcccgggaagaacattgcccacggtatgttcctcgttcccgttaatgcccaacaacctgcaaaaccactccttcactatgggagcgttatgctctccctccgacatcgtaatatcccgcgcctttgctctattttttatcagataggcaacatgacgcaagaatgacattcgccgtccaatcgtctcactctccatttcaccataacagtttgactcttccaaccattcgggctggctctctactccgtacaggtgatcaagaaaatccagataacaacttttcagtgcatagatattccgaaaggaagaatgacgccccatgtctttctcttcaatggaaagcacgttcggaagttctttcacttcctccaatccttgttgtattgtccgatcatacagtttcaagtatgcctcaaaggaagcatgagtttcctgtccgagtgagagacggtaacatgcggggaactctccggctatgggggaataggtgaaaatgttgcggtacgttcctaccatatttccccaaccaattccttttacgtcgctttcattcgtgctgatacgcttctgagcataataaaaggttttcagatatcttgtgaacttttccatatcgactcccataacagagcgcccctgacggatacgtactttcagttctttctccatacatggaattttcaagctgaacccttcggagaaatcggtctgtggctttccatccttcatcaggtaacaagtactgaacgaccggatgccttccacctgacaaagtttcttatataactcatattcggtattcttttgcataggaattaccacacgcacaatgccttccgccccctccaaccactcttcgggtgacaagccggaggtttccagctcttccggcgcacagatatacactccgccggaaagataatgcaagatggttccgtagagcctagccaacacaatagacgcatctttgcccggctctatctcaaattctgcatgaaattccagttctgcagacctcacgatgattaccttgtcgagatattcgcacaggttacggtggctgttgtaaatcttcgcaacctgctttaccaccgttttcccgttatcctcttcttcaaagggaggaagagcaatcttgacagtgtagccgccggttgccgcattacattccacccatacgttttccagttccggaatgcgggcgaagaacagtcttcgataatcctccggtgtaacaggggcagtggtatacaccttttcgggtggaaagagtccgaaacgtccaggttcgaagattccatcttccccggtcaggtaatccatcgtaccgaaaccgagcttgtagtccatttctgtcaacgcatagttggcgatatccaccagggtcaccccgggatcatgagcgttgaaatccgtccatacctttcctgagaggcggtgcacttcttcaagtgtctgcctttgcaggtatgagtacagattttcgttttccgccaactgcctgatatagtgtccattattaccttttcccatcagcttatcctttatacatttccaccactcggcaatgtatctcaccggatgggagttgctttttggtacgtatttgcaggtatatattcttttcccgcatctgccaacggaagcggacgctgcccgtccatccccaccagtgcttctggggtgattcaattcgctgttgcataaagttaagccaaagcgcggtagcacgtgtcagttggcaaagccccgtaccctgttcacgaaaagaggcatatacagagtatacacggcaaccgaaaccttcgcgcgacacatcgattggcaaatcatgccactgtttgtcggcagggacagtcagatagccttcaccgctgggtgtgattccccctccgcctgccgtctggtaagccgttgcggtaatttcgtcttccaccttcagactaccatacaatactatcgatttgtcttgcaacgcttccatcaccgcttctcccttcgcattccttacagtcagcttcttttcgggtgtgacagcgagagtccatgtgggtatatccacttctgtgagaggttcttccgtgtaaagcccgatatccaagtgaccggcttgtccagggaaaaacgcccatccactgggagttctcatcacctgcccatcctccacaatgttcgacacggaatctatcagttcagcaaactgttgttctgtgggtacatcacctttctgaaaatagcttttcagcacacttcggttccgcctgttattattcttttccataaaccactatcctattatgaagttactcccgatttcggctttctctatgccgtcgtggggagaaagaagttctatttttattaccggaagcaatacactccaagggtgcttgccttcgaaagtgaagtccacggtatcgacatctatacgcgacaaactcttaccgttcacttccaacgtgaccagccgcatcagatcctcatgattcaccattcgggcatgaagttccttgtaggagtaacgttgcctaagcattggaatttcttctttccgataccacggtgcgatatagttctgtgccaaaacaacaagttgccggactgccttgcctttatccggcacgctgtcccacaggattgctttgcagtgaacattcacacgttcgtaaacgggattaattacacgcaaagaagcaaacggagatgcatattgccggacaagctgctgtatttccgccagtttccatgccggagagaggaaataacggctgtcttccgcacggctgaataccactaggcatattttcgatgctcctttattctgcgggatgggaatgcactgtatcttatccacttcgggaaaaaattccagtacaagatgctcgtagtcctttatcatgagggcacggtgacggttactgatgcgtgaagtttgtcgcacagccaccctagttgctgtttcggcaggcttgcctccgaagccactcaatggctgggtgacactttcaatccgttcatccggttcctttataccttgtattgttccggcaggcaacggagtaccatctccattttgggaaatgagacgaatacaatttgtccggatacctcgtacagcaaggcaggaagacaaatcgcctgtcacggcggcacgtatccatgccctaccttgtttatccatatggctactgcttattttctccggcagcttgatttctataaatccgctttgcgtcagtcctaacgtttcttcggcaaagacggattctatggtaatgggatgccattcgtttccgctccaatattcccatgccaaagttacctgcctacccggttgcgggtcatagaatgggatcttttcctgaggcaataccatatcgaagtacaaccgcaggttctgctctcctagtgcatgaagtaaaccgaaatacaacagattttcagccgggacagaaggcagaaacggttgcttctctcctttagtaatggggaatggttcctgccgggatagtgccgtaatacgacttaatcgaatgaacgaacgttccatatcacttaaagtcgtctcttccgtagcgatataagaaagttctacatccgccatcacagggataaccggttcggaaggtaagtctttacgtttcttttccttacaaccactgttgtgtaccatcgtttcagaaaacaaggtgcggtaggcttttgtgccaaagccgatggaaggggactccaaggtgatacggaagaaaccgtctttgtcacgactgtattcgtaaggaacggcagtttcatcgttggaaatggattgtggctgcaccgtaaagctaaatactatctcgacagaattcagatctccgttttcattaaagctaaatagcttttgctcatcaccgcattttttccacctgccacctttctgatattcggtggaaactttgaatgcgttcgcatctgttccgtattccttatacatcttgttgaatccttcttcagtttcgggcaatttcttccatatgcctttcaaacggacttcctgcaagtttttcagactcatttcttcgttaccgaagagaaaacagacgccacactctgcctgtataccgaagggatggaagggctgcgtagtgtctacttcaccctgatcattatagaagctgaagttgcgaataccgttcacttccgtctttatttccacgctatcgaaaatgagttgttgtgcccacttgtaaggacagttcgcattatctgtcaagatacggatgacaggatattctgttgttgtgccatgtacttcttccatacaggatgcaggagcaactacattgtatggcaagctgaagctgaaacataactggccggattcgatatagcactcgctagtttgctccatccagccttccgctccgctcagttgtaggacaaaaccttttgtattgttgggtatagaactatcggctgtaagatggaaatagatactgatattccgttcgccttcgttcaacacaaacataggggactccacttgccagcctatgcgtaattcttcaccatgtgcgaacaaggtttgagcatcgattgtatcttggagttgtatagtttgtttatagagttccaaagctcctccacaagaaggattggaaaaaccgtacagtgcatccgcttccacacactgcatggggctgatatattcttttttttcagtccgataaataagttcttctcctgtggtattttgcccggcggggaatggctcatccttaggcaaggtaaaacctccgataccttctgtgggtgtgataatgacatagacgttgtcttgtaccgcatcctgtggtacggcatgcaggatgtccttacgatagagttcaggcaacgtagcaaggcggcggttgaaagcctcagcaatgctgccatagtttttcagatagacaatgagcagggacagtgccggattcatatcgccactgtcctttatttgattcagatagtaatcgacattctcctgaatagcggtcacggtgcgaagcatccggtaatagttattgtttccatctagttcatcggcagacaatgactgttccagacgatccttcaaccagcgggcggtttcagcggcagggctgctgttatttcctgcttgccaagtgttatgcagatagctgtccaaccgagctatccaccgattgatgtcctgtcgtagtttttgggtataggcagcccgtattgctgtaccttgtacattggcaaagctgttaccatagttcgacagcttcttgtgggcaatatcagcaagcacgatcagcacctggttttcaaagtggaggcacaatgtatcttcctctccgtcaccatagtatagaaaaacacctgccttgatcaaacgatataatagcctattccagtcgctttccagcaccagaaagtcatccagccgtgcacggcctatctcaaagtctgtacggagcgtacctttcagttcgtatgtcgttctttctattatcatctcaccctcttaaactatacagtaaaacctgatcagattggttcccattcactccaactcccattatcctatatatcatgtcactatcatcttcagtaactacttacctcccgcattatttacaactatacagataacctaattatctcccacctacgctcataatcgcatgaaaatgattgttcattaccacccacatgtaaactttcagacttttctttgttcaatcttcgcattcaatcgaatttgcaatccgacttatattgttatttttattacgttgtttcggattgaaaatctaccgaaacagaagaaaaatcaacttattgtaccatctgctttgaatctttttttcacatcttttcctgaagcgacttctgttccatcactatatgtatgttttttaggtgcgggtattgatgaccaatttccgtcaaatcctactttgtcaacgaataatttaccttcatcagctccagatccagttcttgcagtaccaagcgtcccttttacttcaaaattacctaatgttttatttttttgctgtgcatagttttttaattcttctacaaaaagactagcaaacgatttctttgaaagaaatccacttccaaagagccccttatattcaactgcagtattacatccacttaaagttattcttcctgcataattatcaggcaaataattgccatctataagtatacttgcaaattttttagggctatatcctccaaatattggttcactaaacagtccaccagcccctccatgtgacttaaaaacaatagtttcattaatatttccaatatcgggtcctttagaaggatttcctcgttgaaacaaacctcccaatctctctgtaacagttttatgaaattcgtccacatttttagttacaggcgcatatccatgctgcttatgatttacccgttctgctgctgcagataagaatgttgttttaggatttctaaacagacttaaatcttcaatgacataaactttaaccatttgcattatcgcttgatttgaaacaccggcatttttcctgtttttcgactggactgttgttatagttctttgaactttatctttttgctttgttatataatcactcataacacaataataatataagtaaatattaataatatttcgttcgtaatctaaattaagaagtgacaaacttcattctgattcaaaaatatcggagccacctacaatggattttttgtcaaatcgttaacggcattttccatttctaaaaacctgtcctgcaatatagtacacaaatagcacatcccttgctgcttgtagaatattatattccggaatagcatagtcctaagtttttaaatcatcattaaatccgtacattaggcatcatagacctgtcccttcattcaaatagaacggataaaccatattactccgattgttcgtcctaacaatggtatataccagttttatcagtaacactccttcctcctcctttttttcaaaagaaacttcctccaacgtgatacgcggttcaaaaagcataaccgcccttgtgatgtcattccgcatctgcgttaccatttccgtatccatcacctcaaaagcatacttacggagtggacaaccatagtcatagcggttcacccgttcgttgggcgacgtactcaacagaacatacaagctttgctggatatcctcctcataagacaccatctttacaccgttttctgtcagcataggcggaaagttccaaccttttcccagaaagccatcattgtccaatatattattcttttcgctcatactctcatcctcctatcatcactgttggacatccggcgactatcgtgccaccatgtgcggtgctgtcacccatacgagctgctggtttgccacctatcattacagtggatgaaccttttattattgtatccggcggtcccacgcaaacgcacatgtcacctacgacggctgctggtattttccctatcaaaacattctgcacacttgggccgactatcggtccgcccacatgcggtatcggcgagggaaacgccggggtctgcatggggcaggtgtgcatatcagttattcttgctgctggaggcataattttcaaattaaaagttataaattaaaaatccatttcctaattgtccattagtttatcatgaccattgcacctttaacagtagtttggcccgaagctaaaagttccgccttggcgttgcctttaacagttgcactcactttagcctccattttcacgttcagtccttccagattgacatcctgcttggcggtggcgttgatttttgaagtggcctctattgtgatggcgcctttcgctttcagtgtgatatcttttgccgacgagagggaaataccgctactgttcatcacaatttcgttcttattctggtcggtcaacttgatatgcttgtcatcatcgctgatttccaccgtgttttttccgggagtagaaatcgttatcaccttcttttcctcattgaattctattcgcatcttctcacgggtaacgatggctttcgtattattctttgcctcgtattcataaggcggtttgtgcttttcaccatacaccccgcccaatatgatgggatgcccggggtcttcattcataaagcccaccaccacttcatcatccggttcaggcaggaagaagttacctgacgcatttgtggcgtacatagtggagagccttgcccaaagcagcttgttctttccatccatccatggcaattctatctgaatacggtattctttcagcggatcgccgtccagtttccttaccactgccgcatgaagtccctgcaacccgggcagaaaaccggaagcggaaggcgataccacatccgtttcatcagtaatgttcagggatgaaacgcctgcacccgcttcggtcatccattcgttgttctcgatagtatgcgtcactgagccgacaaacagattgccgttgaatcgtttgcccaagcctttcagttcgatgatgcaaccgggcaccaccttggcggaaccgtaaaagctgcatgatccttgataacgtgccaatccagctttcaatgccatgccatccgcccattgcttcaacgctttctcgtctgtaggagcatcagtttgcaacaaaaagctatcgcctgtggcaatgttctttggctgcaagtccccttgcttattgagcgagggggaactagcggacactttcacagctttctgtgtagcgggatcccaagacatcgcttcatattgcgtaaactggtcatcagcggacagttcaaggtcaaaagcagtcaagtcgacaccataagttacagtcagtacaggcaacgcactcacatcgggcttcttcaccttaatcttactaccgtcagtaaagatgaacaggccgttggcatcggcacgcgaaagggcaaagtcccaatcggaacaataatactgtaccagcgtggggtgctgatagggtgtggagtctacttccacactaccgtaagccaacaatacttccttaatgatgtcacagtccttcttcttctcaaaaatacgattcttacgtccttgcgtcgcggaataggcataatcacgacactccaccaacatataggaacgaaaatccctatcggtgatgatgcgtaacccaataatcacaccatcgaatagcgtatcttccttgtcaatatcgcctgcatccagacggatagtattgcccggcttgaaaaggtcagcatcactctcgtcaaaagtctgcttgtccatatttccggcattaaacttcaatgttgctttgccaatgcggttcagttcctgatgcaccatagcggaaaccaaagcgtactcatctttcagtttgctcccgttacaataaacggaacaagctagtacgcgatctttgtgtacagaaggcgattcagccataattttaattatttttttaacatcggcaacaggatcttggtaccgctgggtacgttcctgtaaccgttcaggttattaaatcgggcaacttcgcccacaaggagcgggtcaccataaacttcattacatagggctgccagtgtttgcccttccttcagcgtgaccatccgagacacatcgggcgaacgtttcgggaatcttttattttcttctttctgactgcaatagcccgtcagtgtcactttcaattcagcgcggagaggtataccatccaagtcgaacaaagtatattccgtttcgagcgtcttgagttgcccgaaaaaaagaatgtcaccgtactgcaccttgacgaatgatggacgatgcccttcactattatagcaatagaggcgttgttccagatcgttcaccacatcgtggacgggtttcttctcacgatcatcatccaaggcattggtcatatcgagcaggcactcaaagtaaagggtttccggacggtaacgtgcatatacgttcgacccgttcaagctccctaactgcttgtcctccgcatattggatccctttcgtgaacttcaccttatcgggattgatgggaagttccagcgcagatttatattcgctactgaaattctcgtccgtataggctgtgatggtcatctgtcccatttcactttttctttatgcattactaacgctcatttttctttctctgccactgccgggaaccgggtcggatgctatcttctgcatccaacctgtcccttacgcgattttcaatctttcggataagctcttccgaaacttccacctccgtgacgattcgtttttctacaaccgtcctgatatgcatttcttttataacaacaggcataatttctacagtttacgttctaaccgattacaattcagagtgacagtttccattgcaagtccacttcttgcggcatccaatccactgagtgagcatcctatcggataacagtgcgaacacagccaagctgcaaccggaacattggcctgactttgtagtgtaatgaccatatccagggcaataatctgatctttggcatttttcatgttcaaactgttacaacagtcattcacccagatttcaaacggtgcagccaaaggcacaagcggtgatttcaaagttattttgccatatttgattgctttaggcaattcttgggcagtattctccgatcccgtctgtgtctgtttttcatagttccaccctaaaccgctgacttccgtaaacgaggcgtaaaacagtgagacaagtctctccataaaacacacccgaaagtaaaactcatagggtggcagaaatttccatgcaaggttctcaatcataatctataaaaatcattcactaatctgtattccttcgtgtgccagaatcaatgtttccatagctactgagttaccatcggccttgaagccttccaccgtaatcttcttcggccaggcatttgtcaacgaccaggtttttacggctgaatgtgactcatccagcaaactgatggttacgttttcgcgttggatgatattcatgttcacattaccaatccatttccatagttgggaatcagaaacgaatataccttttttcaaagtgatgtcactcactttcttcagcccgggcatcttcaattttgtgaaatcattgctgtcaccggcgcgataggtgatttcctcgaattcggtttcaagccccgacacttcactgaaagatatttcacccacacttcccaatgtcactttgaaatgaaaactcggtaacggccacatcttagtgtcctgactctgtgctgatccattatctgccataatattctaatttttaatttttaattgttaatttttaattattctcagctcttctgcgcctgctgttggaaagtgatttcgataaactctgccggacgagtaacagctaccaataccgtaatgcgcatagttccttccagtatatcatcatttgtcatggtatcacccagaccgacatgcacttcgtaagcttcttcaggtgttgaacccgcaagtccaccacgtttccacacactgcgcaggaaattctcaatcatgcacttcatgttgatccatgtattggcatcgttcggttcgaatacataggcacgagcggcattcttaaccgattgttccagaaaaatcatcgtgcggcgaacgttgatgtaacgccagtcttgcgaattgccgtccaatgtacgggcaccccataccttgataccttcgccggggaaagtgcggatggcattgatagcctttccgctcattggcatattcaatacttcctggtctttgtctgtaacagggacagcgggcttgttcacgtagctaacggatacattggcgggagctttccacacaccgcgtgtattatctatcatcgtatagacaccggccattacagccgagggaggcaacaggttcaaatagtctttcactttcttcgccagcaatttgtattgcggccaattctgcaacagggcattatgaagatctgtcttaacttgttgaatatcgcccgctttcaataccttaccggtagcatccttctctgtgcttatcatagtaaagcactttttgatatactcatccaccttcgaatcgccactaaaggtcattgaaatggtatctacattataggtccagaccagcacccttccatcaatgtcagtgtccgataataccgaagtttcgagccagggataataagctgccgcatattgcaggtttgtagtacctatgcctgctccaaacgagtctgaaatttcctctgtcttagcacccgctcccattggcacatccagcaaagcaaaatatttttgcttatcggccaattcctttaacaaatcagtatagacattcatacagttggctgagtttaccgcttccggcactaccaccattgtgatgtcctgttcttttttgatattggcaaacacagtgtccttattagccgaatacgactcataaaaatcagcgttatatccacccaatgaaactacatagcacgttccgccgccattggcgaaaaacagcaccatgtgataatacaaggtataaatatgttccggcgctttgcatttcaaagccattttcttttcattatcaggaaaacaaaacaaatatttatcctcatcatcatccttaatctcttcagaagaaagtatgaactgaggtgtgggtgcacctccgaaatacgtgttgtactccgtcattgatgaaatccgcaccggcttgttcagcagagacgaggttccatcctgagctgccccggtaaggccgataaagaccggaatagcggtttcaacttccactatggaattaccgaaggcattcttctctttgatgtaaacaccgggggtcttatattctcccatgattcttataatttaagttcaacaatcggttatcaactcttttgtgcctgctgctgaaatgtaatctcaatgaattcggcaggatgggtaacagccacgagaactgtaatacgcatgataccgtccaatatatcttcagcagtcatggtatcgcccaagcctatatgcacctcaaaggcatcttcaggagtcgcgcccgccagtccgccgcgtttccacacactacgcaggaaattttcaatcatgcacttcatgttaatccacgtaccggcatcattcggctcaaatacataagcgcgggcagcattctttattgattcttccaggaatagcagggtgcggcgtacattcacatacctccaatccaaggaatttccatccagtgtacgtgctccccatacctttataccctcgccacggaacgggcgtatcacattgacagcctttccatgagcaggggcattcaaatcggcctgctgatcgtcgtcgatgtcttctaccagactgtccacatagctcaacgttacgttggcaggggctttccatacaccgcgactattatctaccatagtgtaaattcctgccatagctgcagacgggggaagcaggttcaattttttcagcacaccttttatagcctgcttataaacagatgaaccgttgtacaacgcttgatggaaggcctgtttatctacattatttggaaatatccatattaccttcacactttttcctataacctcttcaccctcagcatccttaatgtcttttatactttctatccggcctatcgcttttgtttttttcgtgtccttgtcagcatagatatcacccacagcaacttcttctagtttgaaagtatgattattctttactacactactttctatttcaagctcctctgtctctttaaaaagagattccactatcttggcaaaatcatcatttatctgtgtcctgcaagtgtatacattattagtccatacaaacacatcgcccgtcaagtcccgatctcccactaccgaagtattcaaccaagggaaataggctgcgccataagacaaaaaattggaaccgatattagtacaaaagatagttacttggtcttctatgtttgtattttcatctgccttcggataaatatcaagcagcgcgaaacggtttttcattctgtcaccacaatgagaaagcatctgttgctgtatatccctaaactcttcattactattcagatttacagcttcaggtatgaccaccagcgtaatctcctgctcaagggtcaacttttccaatccagtgagcatagcatttttgttcaaagcatcctcataactgccaactgaaacaatgtagcaggtactaccaccattggcaaaaaacaacatcatgttgtagtataatgtataacagttttttccttcaatacagagtgagccatcctttatatctacctcgaacttcaagtcaggccccccaccgaaataccgtatatactccgtcatcgatgaaattttccacggcacattcttcaggtcattattcccgttcacggcctgcttggtatagccgataaaagccggaatagcggttggcgcttccaccactgagttcggaaaggcgttcttctctatgatataaacgccgggagttttcatgcttcccataattatcagttttaaaatttataattattgttctttaatatagcatacttctcttagggtatgcggagaatccgactggaatttccctatttgcggcggtgaaatgaaccggctttccaacatcctgccaatataaagttgcatcggcatgtcgtaccgctccttcgctttgatccgtcctgtagaaacaagtctccagacattggttcccaagcttgttttctcatacttttccggcgctccgaaagccactacattttcgcgagttcgcagtctgagatcctttccccgcatatcattctcatccttgaatacacacagatactcccaataatacgcacaggaacaaaatcggatagtaaatttcggacaacagatttcctgcaactgccttatttcttgttttatggctgcgaattgtacactgttttcttcccgtatctcttcttttcccaattgctctactttcatatagagcattcgcaacctctccgatgccatttctaccggtttcaaaacaatccggcaaaactcatttttcaacttctgcccgttcgtatcctttctccatacaaagtcggcattcacttccaccaatccgttttccgcattgaatttgtaaaaactgtcgggatcatatccgtcactctctatctgttgcagaaaacaagggtccttcacaatcatagataactccagtacatccttatctgcaaatcccgatgcatcatcggccatgatccattgccactcatttccacgactttgtctcaacatcactccccgctgtttcatcaactttttggtttcggacgtcggctctaatcccacaaagctgttttcgggcggattgtaataattgtgttcgatacgtatggcagctatggctatatattggctcatttgttttttctcctttctattttgttacgctgaccgatggttcacgggcaataccaccactgttgacggcttcctccgcatccaccgcaagcctgcgcagcttgcacatcaccgacggataatattgtccgcccagcgtggtccagatattattaatgtcctgtaccgaaagtgtgacgatctctaccgtatatttctgcccatccagttcaaaatagggatgcgactgaataaaaagtaacgattcgtacaatacggaaagcgactcggcgtatcgtttctcgtcatatacagcagcaagcatcaagtcgaggttcagcaataacggcgcaaacgtccgcatatagtccgaactgttacgactgaagcctgccgagatacctcctgccgtttcacgctcaatgttgacaagtgaaacaatcagtttgcaaggcttttcgcccgcaccactgccaatgaatcccacttccgctataccttcgggctgctggaacttgtggtgcaagtactcatccagagaggctgcataatatgtaagaattcgccttatcattattcttcgaaatagaggttattgatacggttgcaccaaccacgtctgtattcctgaagcccatacccagtctaccaaaatattggcaacagattggctttttatctgatcggctttccacttatcccaatacaagctcttcaagatatcgatccactcattattcgatagatgttt

SEQ ID NO: 6353 - DNA, 30047 bp, Unknown
  gut microbiota DNA sequence
aatctaataatcagtaaaatagaatctgtgtcaatctgtgtaatctgtggtgagtcttattcataaccgtatagaaaagcccccaattacatgttatcacaatggaaaatattcttcttatcttaaacaccgtatttgtcctcagcctgcccttgcttgctgcctggttgcttgatcgctggctgggagaccctgtttggttgcctcatcctgtagttgcatttggaaagatgatttcattctgcgaacatctgttgaataaaggttcaagacgaggactaaaaggtgctttcgtagctattgttcttgttcttaccgtttattttgcggcatactatctatttcactggatagcgtcattttctccgggactacttctggcactacagatacttaccatttttttctgtctggcgggtaccacacttatccgtgaagttcgtatggtattcgaagctgtagatcgttcgttggaagaaggcaggaagcaggtagctcgtatagtcggtcgtgatacttccggactttctgcacaggaagtacgtacggcagcacttgaaacgcttgcagagaatctgagtgatggagtaattgctcccctattttggtatatgctattaggtattcccggtatgcttgcctataagatggtgaatactctggattccatgattggctatcgtaacgagcgttaccgtgctttcggctgttttgccgctcgcctggatgatgtctccaattatattcctgcccgtttgacagcttttctcatgatacttgcttttcttcctcgaggccggtttggggctctgttgagattcgttggaatatatggcagtcaacatgccagcccgaattccggttatcccgaggctgctcttgccggtattctggattgccgtttcggaggtccgcacaattatttcggtgaagaagtctggaagccttacattggtagcaatgatcgtcttttaaccacggaagacatgaaagtagctgttcgtatcaatcgccgtgccgaaggaataatgatagtaattctgataataactactactttgatttcttttttcatttagtcattcacaatttttggcttcttgggaaatattgaatatatttgccagcgtatgcggtgaatggcagcacaaacaccacacagcacgaaacaaacaaacttcatgagaaacttactgaaatatctcgttctccatatagtatgctttggatgcgtttccccattatcagcaggggaggatagcctggcagaggtcgagcgtgctaccattcaagatgaagtgatatctgcttttcacaacagtatgggctttgattatctgacaaaggaagaaagctcggctatcaatctggatagtatcctcaattatctggaatctaccaagcaatataatacgtactttgaactggaacgtatacttataaaatcatatctttttcgtggagaaatacgcctggccattgattggagtgagcagatgtattcaaaagcaagtgcactctcgcatgctttgggaacagctcttgcactgaatgccattagtgaggtgtattcttataccggacgaaaccaggaagcaggaagtgctcatgtacaggcattagagatgttcgatcaaatgtccggtgagggaatacatgtccggatgttattgttggaattagtagagcacaatcttcgtattcgtaatttgacggaggcagcatatttcatgacccgcctgaatcgttttcccgcagatagtctttccgaacaggagcaagctgtccgacatattttcaatgcctattgtcaactgtttaagggttctgtgaagacagctcgccaacacttggatgaagtggagcatttgagggaaaaactgattccgggtattatgcaacatttcttgatagccgaggctatgtattgggaacgtatcggtgaatatgagaaatctctgacaacttatgatgcttttttacatacggactatgctgaaatcaacagtagcttgtacaaggaagtcctgcaagacaaggctgacctgcttgtgaaaatggggcgtaaggaagaagcatataagcaatacggtttggtcttttcatacattaaatcgtcttttgagaaaaattatcctaaagagatagatcagttgaccacccgcttccaagctgaccggctgacttatcagaacgagcgtgaccgcttgttttcctatcgtttttacttgggaggtattattgtttgcacgttggtcttatttcttttcctgtatctcagttggaagaagatattccgtctgcaggaatcgaagcattcgcaggaagtaatgatacggaaggcggaacgggctatccagaagaagaatatgttcctgtctaatatgagccatgaagtgcgtaccccgcttaatgccattgtcggcttctcggctgtattggcttcagatgatgactctttcgacgaagagtctcgtaaagagttttgtgaaatcattaaagttaactcttttcagcttttgaaactgattaatgatattcttgatttttctgattttgagaatgataatataacgttcaatatacgtccttatgatgccgtgaaactttgtagagaggcttcggaaacagtgtctgcttctcgtaaacttgaagtggaactacattatgataccgagctttctgaactaatgatagatacggatgatgcccgtcttcgccaggtcttgattaatctgttggtgaatgccactaaatttactaaaaaaggttctatcgtattgaagttggaattatccgatcctaatacggctttcttctctgtaaccgataccggttgcggtatcccgcttgagaaacagggcttgatttttgagcgttttgagaaactgaatgactttgcacagggtagtggtttggggctctctatatgtcaactgattgtgacctatatgaggggacgaatatgggtggacaacaactatacgcaaggtgcacgtttctgctttacacatccgttgaagtataaatcaaaaggggaggatgctgtatgatgagatatatcgtagtaatatggttttgtttgctgagtatgctatattcttgtgtgctgtatgcagaagatgccaatgcacagcaatatcaggatagtattctgaaaatagcacatgcgatgccgaatacacttgtcagacttacttatttacgtgatatggcttacaggcatcaatatcccccttataacaaaactttttctaccgctttgtacgaggaagcccgtgcccagaagaatgtgacgtatgaaaatcagggagcgtattatctagcttcctgctatgataaactacatgatccggacagcctgacttattgggtgaatgaactgaaaaagtatgctccggaagtaggcacttatgactattatctggagcagaaggccgctatcagtcgcgcattggcttccaagagacaggtagagaaggctgtatatatagctaaggaagcattaaaagaatctttggaacatcattgtaataatggagaaattgcatcgtacaatagtctggggtgtgcttatggaatatccagtagaggagatgaagccttgaagatcttccagaaagcttgtcagcgtttgaccccacagactaaggctgctttgcgtgtggatatcctttcacgcattatccgaatgtatagcaatgccgggcaggatagtctgaaacatatttatctcaaacagatggatgagactttgcaggaaatcatttcccgtgaacccgaagcccgtaagaattggacaaactttgaaatcgactgccaacttaaatatgtgttcctttttatggaacaggggaattttcctgtggcattggaacatatggataaggctaaagcattgctggacagtcatgtcgatatagcgttttggctgaatgttcagttagttcagttacagtattatactcgtacgaaggaatatgataagagtattgcgttgatagatgaggtgacttccgtggtgctgaatcatgatgcttccatattcgctactttcattaattataaagcatctacacagattgataagggtgatattgacggagctattgaaaccaggcgttacctgatacggactcaggattcattggataatgctttttctgcaaatcagttacgacaaatgaaggaaatctatcatattgatgatcttcttctggaaaagcagaaaataaaggataccaattatcagcgtggtttcctgtttcttattacattgttagtgttagtgcttttgttctatctttatactcgttatttgtcccggaagattgctgtggctgaaaaagtaacggcaaatgcggctatgcaggcagaagcggataatgttactaaagatcgcttgcaatctgaaatcagccatgacatacgtactccgttgaatgtggtggtagggtttgccgaacttttgacggagtcgaaagaactcactgcggaagcgaaggtggaatatggtaaaatgattcaggaaaatgcggaaaatctgttggagtatgtcaatagtatcctggaactttctcgtttggaatctggtaagacacagtatgtacaggaggagtgtgaagtgatggccttgtgtcggcaagaaatagccattgcagaacataccgataatgggcgagtgagtattcgtttgaagacggatatagaaagtatggcgataagtatagataaaaacaggttttcttccttgttgtccagtctgttgataccatcggagaatgatgagaatacatacaatattactattcggatcagacacgataaagaaaagaatatgttgttctttaaagtgacaggtacgcctttggccaaagcacgctttgaaaacaagacagcattgatccgtcatgaaatcaatgcgcacttcattcatgcctttaatggtacttataaggtgcaggaaggggcttcagaaggaccattggtcttgtttagtattcggatatctaatcaagtcttaactgaatgattcctccatagggagtcaaagcactgaatgcctcttcctgttttatagctcctgcataaagttgggcgcaaatcaatacgcctccatgtgcaaatatggctactttctcataattcttttctttcagttcatccaaaaaactggcgacacgttgatactgtatggcgaatgattcaccgtttgtagcaggtacgtttatgtagtcggcataccattctttcagtcttggatcacttatttcatcaaaactcttcatttcccaatccccgaagttcatttccataattcggttgtcacgttcggcatcaggatatccgcagtaggtagcaagacgtacacaacgggatagcggactagtatatacataatcgaaatctctccctttcggacggtaagattttaaatttccggatgtgacggcagcttcttgttcgaaactgtttcgcaaaggaacatctgtttgtccgtagcacactccgggagggacatctaccgaggtatgtctgataaaaataacttccatataattattattttaaataaacattaataaaattcgggttaccgtatttgatgtgtgcatacagcaagattaatgcacccaaatagaatgaaagctcacaaagcaggaatgtagctccgcagcaatctcctgtataaccttgaagacgacgtttcatcaaccgatacaatagggtgaatgtcaaaatggggcagatcataaccggccagaaatctatcggtaagaataatataataggtaaaaatccacagatgaatcccgtcagtaattcttgccaggtcatgcggtcatatacattttttgccttgctttcttcttctttccgtgcataaggcaaataattgatgatctgtgaagcacagaatttagaccagcagtcgccacaaattacgagtacacaaatcagtttcaaaggtagattttccagaagtaagaataatagcaagaaatagactattaatcctatgacaccataacttcctatctgggaatctttcataatggcaagtgtccgttctttggtggtgcctccaccaaagccatcaaaaaaatcagccagtccgtcttcgtgcagacagcctgtgataagcaatcgggagaggatggcaagtacccatgcgatggaaatgggaagtatctgagctgctatccacagtactccaaccgtaatactacccgtcagccatccggctaatggccagtatggaacaatacgtttgaagtatttagccgggacttctttgattctccaaaaaggaagccgggtgaagaagatgaatgctgctaggactttcatacgtttagaaatactttgttatagaagcatgcgcgaagttatccatttcattaatcatacgtatggcggactgcacaatgggatatgcacagatggcacctgtcccttcacccaaacgcagacctaaatttaaaagcggtctggctttcatgtgatcgagtagtagtttatgacctgtttcatctccacaatgtccgaaaatagcataatgcagtacttccggatataatttgctggcagctagaatacagtttgtcataatgaatccatctaccataataactattccaagttcggctgcttgaagcatagcacctattaccatcaccatttccaggcctccaaaataacggatgatatcatggggagaacgatctcctctgtagttatctaatgactgttttaatacttcatatttatgacggataccaacattatccagtccgcttcccgcacctacacattgctccagaggaatatttgtaaagcaagtcatccacagggatgaggaagatgtatttccaatacccatttccccaaaactgagtatattgctaccttctttatggcaattgcgtaccacttctgcaccgcgctccagacatagttccatttcctcttctgtcattgcagcttcatgcagataatttcgagtacttttccgtactttcatgtcgatgatacctgtatcataaggtaaattataatctacaccggcatctactattttcaaggtaaacccatgctgtcggcaaaggaaattcactccggcacctccatgtaagaaattactaatctgttgccaggtaacttctttgggcgaaaggctgacaccttcgtctacaatgccatgatcagcggcaaagattatattctgtggatgttgcagggtaggagacagagtttgttgtatccagcctatttgcaaggccagctcttcaagagtacctaatgaacctttgggtttagtcagattattaattttatcaatcaatgctggacggatattctcgtccggacgtattatcttaaatgttttcatatgcaatatttataactttgaatcttatcatcttaccattctatcatcttttcctctctctatttcacttttaccggaatccccgataccatcaaccatacttcattagcgtgttcggcgatgtactggttcatccagccttgcatgtctgtgaacttacgctgaatttcattttctgaagtagctcccatacctatttcattggtaacaaagatgaaggtagcatcttgcgctgtaaaacggtcgaattcttctttggcagctgtcagggcactatctgtatctgcatttacatcaaagaagaagttggtacaccataaagtaacacagtctatcaggacagtccttccgattaattgatgacggcttagctctttttcttcctctatatttgtccattccggtccgcgtctttgttgatggcggattacgcgttgtcggaattcttcatcccaaatacgtgcggtagcaaggtaaacaggagtaggagagagacttagcgccagtttttccgcatggctgcttttaccggagcgggcacctccggtaatgagtatgatccgtttcatatttttttcactttagtggctgtaaaagtacatttttatttttgaatataaaaaaacttcttttacctttgcaccgtctttttaagaaagcaatgcggcagtagctcagttggtagagcatcagcttcccaagctgagggtcgcgagttcgagcctcgtttgccgctcttgccgaaaaatggggaagttacagatttgtggcttcctcattttgtataatccgaaaaactttaaaaaacaaaataaaatggcagtagaattaaaagacctgaccaaacgcagcgagaattattcgcagtggtataatgaactggtggtaaaggccgacctggcagaacagtcagctgtgcgtggctgtatggtgattaaaccttacggatacgctatatgggagaaaatacagcgtcaactcgacgatatgtttaaggaaacagggcatgtgaatgcttatttcccattgttgattccgaaatctttcctcagccgtgaggcagaacatgtggaaggttttgcaaaggaatgtgcagtcgttactcatcatcgcctgaaaaatgctcctgacggtagcggagttattgtggacccggaagctaagttggaagaagaactgatcatccgtcctacttcagaaaccatcatttggaatacttataagaattggattaattcctatcgtgacctgcctatcttgtgtaaccaatgggccaatgtaatgcgttgggaaatgcgtactcgtcttttcctgcgtactgctgaatttttgtggcaggaagggcatactgcacatgctacccgtgaggaagctgaagaagaagctgtacgtatgctgaatgtatatgccgaatttgccgaaaaatacatggcagttcccgtagtgaaaggtgtaaaatcagctaatgagcgttttgccggtgcactggatacttataccattgaggctatgatgcaggatgggaaagccttgcaaagtggtacgtcgcacttccttggacagaatttcgccaaggcatttgacgtgcaattcgtgaataaggaaaacaaaatggaatatgtttgggctacttcatggggggtatctactcgtctgatgggtgcactgatcatgactcactctgatgataacggacttgtactgcctccgcatctggctccaatacaggtggttatcgtgcctatctataagaacgcagagatgctgcagaagattaacgagaaagtggcaggcattgttgctaaactgaagtctatgggtatttctgttaagtatgacaatgctgataacaaacgtccgggtttcaaatttgctgattatgaactgaaaggtgtgccagtacgtcttgttatgggtggtcgtgatttggagaacaatacaatggaagttatgcgtcgcgatacattggagaaagaaactctttcttgcgacggcatcgaagaatatgtaaagaacctgttagaagaaatccagactaatgtctatcagaaagcccttaactaccgtaactctcatatcacgaaagtggatagttatgatgaattcaaggagaagattgaagaaggtggatttattcttgctcactgggatggtactgttgaaacagaggagaagattaaagaagaaacaaaagcaactatccgttgtattcctttcgaaacgttcttggatgatgacaaagaaccgggtacctgtatggtgacaggcaaaccttctgcttgtcgtgctttattcgctcgttcttattaaatataggatatctaaagatctaaggtaaagggctgcacttcgcacaaagaagatgcagcccttgccatttttacatcattgtcatatcctatacatgtttccgtaacactgaatctccatctttgcatcgtaataaaaaagaaaggaaattctcttgaggtcatgtccgcgtgagcagacatgactttgtggttatgaaggttaaaagagttgtgtcttcagtccgaacgataagctaagataatctttgggcttcagatacttgttggtgaatgcacttactacatacagatcacaggtacttatttcataataaaaagtaacggctcttgctctcagacgccaacgtgggggaatattataagtcaggcgttgtcccaggaatacatgaatgcgtaccttggatgagaagccgtaataaccttttggataacgttcgggctcatgtgtccaaaattcattgccgaatactgtattgaaatacatgccgcatgcaagtggttcgacagcaaattcttttccaagagctatactccatggcatatagttctgtttcagagtcatggtgattttggtacgtttggagtcgtacttaggcagaataccgaaaaagatatccgtttcccactgattccgttttccatagtcccatcctgtacccagagatagcaatcccatgttaccggcaaattgcagctttgtatgtgttggtatcaggctttcccagtgtttacgatagcgatggacacgcttatcataacggctggaacgtttattactgatatcggcactgtctatttttactttttctttctccagccacacggtatcatgttttgtgatgataacggtatctctgaatacccggcgtggctctatggttattgtattggcttcttgcgcatagccggttgatgagcatacaagaaggaagcacgtcagtgctttaataatagaccacttcacgctcatatccatcaggggttacagtaaatatataatagttgcggtgtttcatacagtcgctcatgtaatacatcacgccatcttcaaaaaaatcttcttcgaatacgcgatgttcatgcgcagcagtacagaatagtaagccaggaaattgcttaatggtatattgaaacacttgagctacattattgttaaactccatgcaaaacggtcgtatatgcatggagaagatagtacggtcgtactcgtcgcggcgatcatctaactgggcattaatgaattcaaagtcagggatggggcgggagtagtcgaattcgatagcattggtgttcagacaaatgaatttgatgcgaccggctatgaaagaaaaattggggtcaccgaatacaatacgaaaagtttcttcgcctgtaccgaggcagtcatgattaccgatcagaccgacatagggaactttcagcttattcatgatatcacgttgccacaggaactcgtctgtaacaccgaagtcgctgtaatctccgccatgaatgacaaaatctatatcatcccgtttattaaggtgattgacaaagtccagggtctcatcataccaacgctgggagtcacccatagtgacaaaacgaatagttgccttatccttgcaattggcctctatcttttctatattacgattatttatatctgtctgaccactgatgcggacatcataaggatggtaatctatcatatcgcaaccgcccataaacaggccggtaagcggaatgaacaggagtttagatagtttcatgtgtatgatattaatattatataatctctttgattgaaaactgattgcaaagatagagttttcttttagataaatgattgtcttattttccttttttctgttccttcgtgctgtactaatttccataattgtccattttttagacggaggtgtctaattattagacactatttgtatacgtttaaaaagataaattgttgataatgaatgaatattaagttttggcatactttctgcatttatataaacagaatattatataagactttaataataaacatcatgattgaaattaatgacatcagcaaagtattccgtacaacggaagtagaaacagtagcattgaaccatgtgaatcttgaggtgaaagagggagaatttgtagccatcatgggaccgtcaggttgtggtaaatcaaccctgttgaatatcttgggattgctggataatccgacggaaggttcatataaacttctgggacaggaagtcggagacctaaaagaaaaagaacgtacccgtgtgcggaaaggtaaactaggtttcgtattccaaagctttaacttgatagacgaactgaatgtttatgaaaatgtggaattgcctttgacgtatctcggcattaaggcttccgaacgtcgtcggatggtggaggatatattgaaacgaatgaatatcagccatcgtgccaagcatttcccgcaacaattgtccggtggtcagcagcaacgtgtagctattgcccgtgctgtggtaactaatcctaaattaatacttgccgatgaaccgaccggtaatctggattctaagaatggtgcggaagtcatgaatctgttgacggaattgaatcgggagggaacgacgattattatggtaacacactctcagcatgacgcttcgtttgcacatcgtacgatacatttgtttgatggtagcgtggtggccagtattgcggcacagggagtataagtttataaagagattgaactatgaaacaactatattatgtcatacgtaccctgttgcgtgggcgcggttcgaatataatcaaagtcatttcccttggattgggattgacgatgagtattctgctgttttcacgtgtggcttttgaacaaagctatgatacttgctacaaggactatgatgatctttatcagatatactccatattttcggctgagggtgaacaatttgaaccgcaaaaacaaaactgtggtcctgtggcaggtgccattttggagaattttcccaaagaggtagaggcggctgccagcattgcgtattttgtttcttcaccactttacaatggcagtgtacgcatcgatgcccggaaaatattagccgattcactttttttcaagactatgggtattgaggtactgagtggcaatccggaaaaagatctgatgcagaacgatgtcatatttttgagtgacgatttggctcagaaaatatatggtggtgagaatcctattggaaaagtcattagttataataaggagttgcaactgacggtaaagggcacttatgtcgatttgcccgagaacgctactatgcgtccggaagctgttatttccatgcctacggcttggagccgtgactggggtaactattcctggcgcggaggcgacagctattacgaatatatccgtttccgtccgggagctgacaaggaagtggtgaatgcccgtctggatgccatgatacagaagtatcggccggaagaagataagaaagcatacggttacactgcttttgtgaaacctatccgtgatgtgtatcgtgacgaagatcaggtgaaacgcatggacagcattatgagtatcttagctctggctattctttttatcgcgtcactgaactacgtgctcatttctatttcttcgcttacgtatcgtgccaaagcggtgggtgtgcataagtgcagcggtgcaagtggaggtacggtgttctcaatgtttcttttggaaacgggaattattattgcgctggccttggtgttgatggggttgatattactcaattttcaggagttcatagaagatactaccgcagccaagttgagtgtactttttgcaccggaccgtatctgggtgccgcttgttgtggtgctggttctgttcattgtaggtggaattctgccaggcaggttgtttgcccgcatacctgtgtctcaggtgttccgccgctatacggaaggtaaaaaggggtggaagcgtccgttgctattcgttcagtttgcgggtgtggctttcatttgcggattgatgtatgtggtgatggcgcagtacaattatgtgaaagataaagatatgggttataatccgcagcgtgttgctatcggaaatgtttatttcggtggtgaagaagcgagtggccctgccttgcaattcttccgcgggctgccttatgtggaggaggtatcttctgctgtcagtaccccagtatggagctatagcggttcaatgattgaaggtgagggtggacaatcgctcttctcgacccgattcagttatgcacttgaagactactttaagatgatggggatgacgatgaaggaagggcgtccggcgcgtgcatcggacgaaatagtcgtgaatgaggcttttgcggaacggatgcgttggggagacaaagcgctgaatcatccgttgcgtgccgaaggtcgaaatttgaaagtagtaggtgtgctgaagaatttccatataggctctttctatcagccacaggatgtcattatgtttggctatacccgtacctttggtaatactgttcatatacgtctcaaggaaccctttgccgagaatttacgtcgtctgaacaaggacgtctctgaggcttatcctgacaagacggttgacttctatagtatggaagatcagattttgaacaagtataatccggttcgtgtcttcagtaacgccacgatattggcggcattgactatgttctttgtcatgctgatgggcctgattggttatactacagacgaagtgcgtcgtcgttccaaggaaatcgctattcgtaaggtgaatggggcagaatctttgggaatattggagttgctttcgaaagatgtcctttatgtagcggctccggctgttattatcggcattatatctgcagcatatatcaatggaatgtggatggatcagtttgccgaacaagtgccgctttcctggccggtatatatattgatagcattagttatcctgttacttatcctcgcttgcgtcatctggaagtcatggcggatagcgaacgaaaatccggtaaacagtattaagagcgagtaaaaaaagaaagatatgagacaactttattatacggttcagattttgcttcgtgggcggggcagtaatttcattaaactggtgtccctgacactagggctgctgataggcatcttgcttttttcgcaaatagtttatgaattgagttatgagaatttttataaagatccggaaaatgtagctttaatgcgttgccgtagggtgaaggagggaattcctgataaagactatgacgatagcacttttcgccctgccgccgctgatctttgggaggcattgccggatttgatagaatctgccagtctttccgttaatttctatcagcccgactgctatattgacgataagaaactggaagatatgcaggtcatgtttgcagatacgctttttttccagaccatcggcttggaaatattacgtggcgacccacacgaattggctacacctttgtctgtctttctctcacagagtaaagcacgcgaactttttggtgacgaggagccggttggaaagactttctccatgagtaaaatgctggatgtcactgtacgtggtatttatcaggatgttcccggcaatacggtatatccgcataacacagtcatttcactgcctactcttgaagaatatatttatggtcgcggcacatggaagtcgaatgatatttataacgttcttttccgcctgaaaagtcctgaaagcgtagaggcgatgaacaatcgtatacaaaaagccgtagagcgttataccgagactaaagaaggaacggatgtaatggaattcagcatcttgccattgccggatatctatcttagttctcctgacaatgtacgacgtctggtaatactgggtgtactgggcttttctatcttctttgtttctatcatgaattatgtgctggccgcagtggcttcgttcagccgtcgtgccaaagcagtgggagtacataagtgttgtggtgctgacggaacgcatgtgttgggtatgttcatgtgggaaacaggaatactcgttactacttctattatagcctgtctggtgttgatgtatattttccgtgaagggatagaggatatgttgcatgtccaccttgcagaactctttacctggcaaaatctgtgggttcccagtctgactgtacttctgttgttcttagtcgcaggtgttctaccgggtagaatgtttgctaatattcctgtaacacagattttccgtagatatactgacagtaagcgttcatggaaacgggggttgttgttcgtacagtttattggcgtatcttttatcctgggagtgttggttactacaatttggcagtatcatgatttgatgacacgaagtgttggttttcgcacagagcgattagcggtggggcagttgcgcaccacggaaaatctgagcggacaaggagtggaagatgacattcgcaggcaaccttatgtggagtctgtagcacgtaatagtaattcgctgctttcacattacagcactacagggctgacagatattcaaggtaatttcctttgtccgctacacttccagaacgttgcgaaagactttccgcaaacagtaggtatgcagttggtggaaggtgcctggcctgaacatatcggcgaagcattaataggtcgtaaagtggtggaaacgatgaaatggggagataaagccttgggacaacgcttaccagtcaatgcacaatgggtgggtcttgatagccaacctacggtggtgggtatcgtagaagatgtgcgtaatatgggcttttttatggaacagacttgtacggctttcatcctttcggataaacgtaacggttcttacaacgtccgcttaaaagaacctgtagatgaaaatcttgcgcgactgaatgagtttgtcaaagaagcatatccgaaagctgcattggagtttataacctatatggatatccaacgggaaaattacagcaatgtgtatcgtttccgtaatactgtatggatcacttctctttgcattttctttattgtactcatgggacttattggctatgtgaacgatgagactcaacgtcgttccaaagaaattgcaattcgtaaggtgaatggtgccgaagctccttctattcttagcttactggcaatggacatactaaaagtggctattggtgcggtgatcctcggcaccggctttgcctggtatgtttccggtgtctggctggaacagtttgccgatagtacactgccttcaccggtgtggtttgttctgctggcagtgggcttattggtgcttattgtacttctggtgattcttaaagcctggcgtattgccaatgaaaatccagtacagagcatcaagagcgaatagaggtaatttaatgctttaaccttgcctacagctatctgtaaagctgaataaaaagggtgtagcctttcagatcggatggctacaccctttgataaggatggtgtagccctttggtgcttagggctacaccttttttagttgaaggttataccttctgtttgagtggtacaaattacttacgcgatactctctttgtttttctttcgaatatacgtccataacactacaagtgctgttaggaaagcgaaaaagtcagccaccggcatgctggtccagataccatccaatcctataaagcgggggaagaagatcagaccgggaagtaaatataagagttgccgggtaagtgaaaggaaaatactgattttagcctttccgatactttggaagaagttaccgataacaatctgcgcacccaccaacgggaacatcagcacgcaaatgcgaacaccgcgtgaagcaatgtcaatcagttcctgatcgtttgtgaagatagcggacacagcatgcgggaaaagctcgcaaatgaggaaaccactgctcgtgatgcacacaccggtcaggatactcagcttcaaggtttgcttcacacggtcatgcttctgtgccccgaaattatatcccacaatgggctgcatacccatggttaatcctaatacaatcattatatagagagtgagcaggcgattgatgatgccgtaagctccgatggccatatcacctccgtggcgttgcagagagttgttgatgataatcacaatgacacaggcgcacacattcatcaagaaaggtgacattccgatcgaaaaaatactgctgatgatgcgcttctttagtttccagaagtccgggcggaagcgcacaaagctgtctttatcaaggaaatgtttcactacccacaccataccgataaactgcgaaataacggttgccgtggcagctccgcgaataccccagtcaaaatggaagataaagataggagcaaggatgatgttacaaaccacggttaccatggaagtcaacattgcctttttaggatatcccgtggcacgcatgatattgttcaatccgatcatcgtgtaagtaataggtgttcctgcaagaataatttgcatgaaatcccgggcatagggcagtgtatcctggctggcaccgaagaaccttaatatttcatccagaaataaaaaggcgagtccgccgaaaacaacagcattgatcagacaaaacatcagcgtatttcccaatacctcggtagctccatccaaatctttctgccccaaacggatggatgagattgtagatccacctgccgacaccaatgtacagaatgctaccacaagattcatcagcggaaaagtaatggccaatccggcaatacccattgcacccacaccgtgaccgatgaaaatgctgtcgatgatgttgtacagtgaagtaatcgtcataccgatgatggcgggtatagaatattgtagcagcagtttacctatacgttcggtacctaatatgtgagggttattatccataactattaatctaaagaaagtaatgaatccgcgttcgtccgctctggtccgtgccgtccgcgtatctgtatttgcagcaaagttactcatttatttgctctgttcaaggattattcagacctttgtatcgtaattgataaggtattaacattataaggtaaaaggaagtttatatgactgaaacaaaaaacatcgccgttcttttcgacttcgacggtgtcgttgtcgacacagagacgcagtatagcatcttctggcacaaaatgggagtagattacttgggtatggaagaccttgaaagccgcgtaaagggacaaactttggtgtatatctataacaccttctttcccggtatgattaaagaacaggaagaaattaccgccggcctcgaccgctttgagcaggaaatgacattcgaatttattcccggtgtagaatcttttattgccgatctccgtcgcaatggtgtaaagatggctgtggtcaccagttccaatgataaaaagatggaagctgtatatcgtgccaaacccgaaatcaaaactatgttcgaccgtattcttacggctgaaatgttcacagcttccaaacctgcaccggattgcttcttgcttggcatgaaagtatttggcaccacaccggaaacaacttacgttttcgaagactctttcaacggactgaaagcgggtatggcttccggagctacagtaataggtttggccactaccaattcacgcgaagaaatagttccgttgtgtcattatgttttagatgatttccaagggttcacttacgataaattaacagaattgcataagtaaagggaaaaagcattacctttgcggcgatttcaccacagattacactgatttacacagataatatgctgaggatgatattgctctgtgccaatctgtgtaatctgtggtgaaaaagcaatcaataactaaataattaaaattatggctggttatatttcagatgacactcgaaaagtgactactcatcgccttgtagagatgaagcagagaggcgaaaagatatctatgttgacgtcttatgactatactatggcacagattgtagacggtgcaggcatggatgtaatcctggtaggcgattctgccagtaatgtgatggcaggtaatgtgactacgcttccgattaccctcgaccagatgatatatcatgcaaaatccgtagttcgtggtgtgaaacgtgctatggtggtggtagatatgccttttggatcttaccaaggtaatgagatggaaggtcttgcttcggctatccgtatcatgaaagagagtcatgcagacgctctgaaactggagggtggtgaagaaattataggtacggtgaaacgtatcctcagtgccggtattcctattatgggacatctcggactgatgccgcaatctatcaataaatacggtacttatacggttcgtgcgaaagatgatacggaagcagaaaaactgatcagtgacgctcacatgctggaagaagccggttgttttgctatcgtactggagaaaatccctgccgctttagccgaacgtgtggcaagtgaactgaccattcctattatcggtatcggtgccggtggtggagtagatggccaggtgttggtgattcaggatatgctgggaatgaacaatggtttccgtcctcgtttcctgcgtcgttatgccgatctgcatactgtgatgactgatgctatcagccgttatgtatctgatgtcaagaacttagatttcccgaatgagaaagagcaatactgataatctttggtcactgggctttatgaggatatgctttgccaatttcctgctttttgcatccatctacatgcttttcccggtgcttccctcggtgatgatgtcccgattgggcatttccacagggcaggctggcagcatgtttctggtatttgcagcggcgatgttcttggtggggccgttccatgcatatctgggagatgagtataagcggaaacgtgtacttgtctattccatatttgtgattttgggaacgactttaggctatatctttgtcgatacttttccgaggttgctgatgcttgctgctgtgcagggtggagcattcggattggctgcgacggcaggcattacggtggccatcgatatcactactgcttcgcgccgtagtgccggaaatctgggctttgcactggcagcccgcttgggtatgctggtaggagtggcagcgggaatatggatgttccagttcaaaggttttagtatgacggcatatttttctatattatgcagtatattcagtattctatttgcattgcgggtatatgtagcttttcgtgcaccgataggagtggggcattgcaatcttgatcgtttcttgttgttgcggggttggcttcccgccctcaatttggtactgattgcttttattcccgggattgcattattgttaatcaaacaaggggattatgctgcactgttttttctcgttgttctggtagtgcttacgataccttttacgaagatatttgttaagctctcgcaacattgtcaacggggaacagcgaatacaacttgccatttggccacggaagctggtattctgattggtcttgcagtttgttgtttcctatcggatcatggagaaatgtattctgaatttgcagatgggaccggtattgcagatatttatctatatactgattttcagttgatttataaggtaatcggtattggaattctggtagctttggcttttttctttttgctgacgtatccttattataagaggaaaaaagtaagatgaaacttgtaaatccgccaatctatcggattcatgctaactcctctttcccctccctcttaacttaaatacgggagaaaaataataatcccgataattgccgccgcaacagcgcacaccagcactgctccggcggcaatgtcttttacctgccctgcaatggggtgacgctcgggagaaaccagatccaccaatttctcaatggctgtattaaacaattctgcggctattaccacgccaatacataagataatgactatccattccgtacgtgttatgccaaagaaaaaaccggcagctatcaccactgctgtagtaatgagatgaaaacttaagttctgttctttccctacacattgccggatacctttccaggcatatccgaaactgcggatctgtttttttaaactatatttcactttgtctctttttgttggtatctgttaactgttagactaacgtctagtctagggtaaactaaacgttagtctgcgggtagatgggtcttcagtccggggtaaactcttgtcactcgtagctaactcagcttcttgaaacttgtttcactcccttcaccgtcctcagctttttgagcagtgtctccagtcgtcctgtatcacctaccataatcgtcatcgttccggagaataaaccatcatgggagtcaataccgatagagcgcaatgagatatcattttctttggatatgatcgaagttatatttgtaacaatgcctatatcatcatgtcccacaacgcgcagcgtaatcggatactgcgtaccttgcgatttaccggcccagcgtgcttttacaatccggtatccgaatcgttcacgtaactgtgtggcgttagggcagtcactacgatgtatcttgatgccgccggtcacactaacaaaaccgaaaacatcatctccataaatcggactacagcagcgtgccagcttgaagtccagtcctttcagatcctgatcaattaccagtacatcctctttcgaacgggtgatttcgtcgttctgtgtctgttgcagattatatccctcggcactgcggtatgtgatgtcgtcatgcgtatcactttccctcctctgctgttccagatatttatcgatgatttcatttacatccagtgtttcatctgcgatgctttgataaaagtctgtcactgtcttgaagccgagacgtttgatcaggcgcatcattacggcttcatcatattctattttccggttcttgaatttacgctctatcgtttctttggcaaaggcatgctgacgggcaaccatctccttcaatgcctggcgtatcttggtacgtgccttggagctggttacaatattcaaccaatcctgtttgggtgtctgtgtattcgaggtcataatttccacttgatcaccactattcagcacttgccgcaattgggcattcttgccgtttactttcgcaccgatacacttacaccctaatttgctatggatgtggaaagcaaaatccagtaccgtggctcccttacctaacttaaatagatcgcctttcggagtgaatacgaagacctcatcctcgtataaatccagtttgaactggtccatagcttccaacccgttactatccgagttttctaatgcttcacggacagtagtcagccattcatccaatcccgtttctccctttacacctttgtaacgccagtgagcagcgagcccccgttcggcgatatcgtccatgcgttcggtacgtatctgtacttccacccatttgctttcgggacccattacagtaatgtgtaatgactcgtaaccgttactttttggtacagatagccagtcacgcaagcgcttcgggttaggttggtacatatctgttacaatggaatatgcttgccagcactcctgcttttctttatctacaggcgaatccaagataatacggatggcaaacaagtcatataccccttcgaacggacatttctgcttcttcatcttctgatagatggagtgaatggattttgtacgccctttgatgtggaaatgcaatccggcttcttccagtttcttctgcatcggagcgatgaaggcggcaatatacttgtcacgggacgcttttgtctcgttcagcttatccttgatatgatagtaaacctctttctccgtatatttcagcgaaaggtcttccagttccgatttcagcttatataaacccagtttgtgggcgaggggagcgtacaggtaggccgcttcatttgccacttgccgacgggcttcgtcatttttactgtctttgatttgccgcatgatgttcacacggtcggcaatcattatcaggatcacacgcatatcttccgcaaaagaaagcaacaggttgcggaagttttccgattcgatagtcgggcttttggagtaaagctcatttacacggatgagcccgcggatgatgcctgccacgtcttcaccgaaagcggcttgcacttcttcgggggtacaagctccgtttctcacgctttcgtgcagcatgatgcccagaatagacgcccgtttcattccgatttcttcggccacgataacggcagtctgcatatctttaaccagtggattcagtccgaaggtgtcacgctgaacgcggttatcctttatagagttgataagatgtgttttcagttttctacagtcacctttctgtaatgtctcaccggtcaactgcaataattttctgtagagagagaagagcaattccttctcttcagtagtgaaaaattcatctctttccataattgtccatttttgttgcccaaaggtagtttttttcttcctttctattataaggcttgtgctttttttgtatttttggcaatcaattaataaaaaatagatagtatgataacaccgcaagacaaagagttgcttaggcaaaaaggtatttcagaagagcagatagctgaacagctgacctgttttgagaaaggtttcccgtacttaaagctggctgctgctgcttcattggaaaaaggtattctggcacctgcagcagaagagcagaagctctatctcgatgcatgggatgcatatacgcggacagataaagtagtagtgaagtttgttcctgcttcaggtgcggcaagccgtatgttcaagaatttattcgaatttctcggggctgattatgatgtgcccgaaactaaattcgaaaaaacattctttgagcagattgaaaagtttgctttttataatgacttgaatgccgcctgtgagaaagcattcgagaagaacattcccgcattgatggatgagggtgattataaagctgtagtggctgcattgcttgaggcggcaggactgaattatggtgcgcttccgaaaggtttgttgaaattccacagatatgaagatggaagccgtactccattggaagaacatcttgtggaaggtgctctctatgctgctaacaagaatggaaaagtcaatgtgcattttaccgtttctcctgaacatcgccgcttgttcgaaaatctggtggcagacaaagcagctgtctatgccaagaaatacggtgtagattacaatgtaactttttctgaacaaaagccctgtacggacactattgctgccgatatgaataatcagcctttccgtgataacggcaagttgttattccgtccgggtggtcatggtgcgctgatcgagaatctgaatgatcttgatgcagatattatctttatcaagaatatcgacaatgtagtgcctgataaactgaaaggtgacaccgtgttatataagaagttgattgccggagtattagtggcgctgcaacaaaaagcatttgcttatttggaacttttggatagcggcagatatactcacgaacaagtgcttgaaattctgcaattcctgcaaaagaaattgttctgtaaaaatcctgagaccaagaatctggaagatgctgaactcgtactttatctgaaagagaaactgaatcgtccgatgcgtgtatgcggtatggtgaaaaatgtaggcgagccgggtggcggtccgttcctggcatataatagtgacggtactatttctctgcaaattcttgaaagttctcaaattgatatggacgatccggagaagaaagagatgttcgaaaagggtacgcactttaatcctgtagatttggtttgtgctgtgcgcgattataagggtcataagtttgatcttgttaatttcgtagataaagctaccggtttcatctcttataaatcaaagaatggcaaggatcttaaagcacttgaacttcccggtctgtggaacggtgccatgagcgattggaatacggtgtttgtagaagtttctctgagtacgttcaatccggtaaagacggtgaatgatttgctgagagaacaacatcaataaatgatatttcaataaaaagaaaagtgccatagttttattataatagccggaatgatttatttgaggtcattccggctttttactttttgtaggtcaataacaaaggcctgacattagaattctacggtaactccaatcgacggtaatatcgttccactttcctgtttcagatatttcatcttatatctttgttctcctacaggtgcagacgggttttcaataactcctgtactcataatcacatcctgctgcttcaacttacttcctgtgatattctgcaaatcgagataaaaacctaccatgcagcgatgaaaatagaaagatttatctacacgaatatcaagttgggcgaaattgggtagacgctccgtattgtactttgagtaatcataatacggacgcccctgtgcattccaggcttcaaccagtgaggatttttcttcatcgtaaggagtgtaaggggcaccacctatataacttaattttcctccgatactccaacggcgtggtaaattgtacgtaccacttacattcagaatgaaacgattgtcccaagcagaagcgatgctgttatattcactgcggaagacagtaagggaagatacaaagttgaagcgctccggtatctgccaacgcaacatggtttctacaccataagcacgccctcgtgcggtcggtatcaatgcctcattacctactgtgccgtaatcgtctcccttacatgccagagggatgtcgtcacggagagaaagaggcatacggctgtaacgcttaaagaaaccttctgccgaaatcatcaacctatcctgtaaatgccaatcaagtccgaggctggtctccatcacttgcatatactttaaattcttatttgcataaagaccgtcgttgttcttgaaacctaatgctgtataaggtggtagctggtaatatagacctgcatttccgcttattgcccattgctgggttagttcgtaagataaggagaggcggggagagagctgtttccataattctttcatctccttattgtagttgttaccatctgtacggatgcctgcggatgcggaaaaacgtttattggcggtggtataatctgttgagaagaaaccgccccaactgaatatattcaaatccgtccggtaatcagagagtgtagaggttataccgaatattcgctgattcgtttgattcgtatagttggaataattcatttctgcaccttccttcaatgtccattgccctaatctcgtttgattttcaaagcgcagagtggtcttttgctctactgaacgaagccggagtgtcagattgtcttcggaagattcatcattattcagatattttatattacgattgttcaggtagttatggcttaaggtgaccgattgtacgtgtttccctgcataatggcggtatgaagctcccactgtgaatgtctcctggtgaatggtaggcagataacttaatatgtattccgcgtcttctcctttctcgtctgtattcagtttcatcttatcaatgccgactaagccaagtaggatcagttcatcatgtgctgacagcttggtcttcaatttgaattgaccgtcaatgaagtttggcagaaaaggaagtcctaaagccttgaacagtagttgcagataagattgccgtatagaaaacagataggttgtcttatcgctcaaatgtccgttaccactgaaagaaacttcggatgctcccagggttgccttaaatgtctgtttgtccgggttgccatcgcgcagacgaaaatctaatactgaactcatggctccggaacgattggccggaaaagctccggtgtagaaactgatttcccgtatcaaatctgcattgactatactgaccggaccacccgatgctccctgtgtagcaaagtggttgatattaggtatttctattccatccatatagaagcgattctcagaaggtgatccaccccgtacaatcaagtcgtttctataaccgatgggagagaaagagacacccggataggctcgcacgatgcgtgagatatcgcggtttcctcccggacttttttctatttcctgcaagccgataatcctcatacttaccggactttccaccgtttttcggaaaggagagggggtgaccactattgctgatagcatattttcatcttcctctatctctatctcgatgaaaggcgtagaggcggaaaccaaatattcggaggtcactgcgcttttataacctatcagtgttgcttcgaagcgataaatgccagggggtatctgctctatacgaaatatgcctagagaatctgtcgatgctcctttaccgggaatacctgcaaccacaacgttggcataagccaccggttggcgtgattgtttatcaataacttttccgcgtacggagtagttgaccgcagcagcgtagatacaaacattgcacagtagcagtgaaagtgtcagtagaatatgtttgctcgttatcatatatgcaaatatagatattattgatatataataagtgaaacagggacataaaaaaaactgttcggaaatcatcccgaacagttttcatttctttgttaagttgtaagattaatatcttccaccgcgatctccgccgccatagccaccgccacgattgccgccgccgtagccaccgccacgattgccaccgccatagccaccaccacggttgccaccgccatagccaccaccacggttgccacctgcaggtctttctgttctggggcgagctacgctaatagcgatgttcttgccttcgaattctgtttcgttaagagcgtcaatagctttctgaccttcttcatcattcggcatttctacgaagccgaaaccgcgtgaacgtcccgtctctctgtcgttaataatgtaggctgaagttacttcgccatactgtgaaaataattcctgtaagctgtcactgtttgtgttccagcttaggtttgcaacataaatgttcatttctttttgtaagttaaaattgttatttattaatgattgagatccgcacggcgttcatacctcgcgtaccacgttcaatttcaaatgttacgttatccccttcggttatcccttcgggagcggaagtaacgtggaaaaaatatttctcaccacttcctaaatctttaataaaaccataacctctggacacattaaaatgttcaatacgtccgtttaatggcagaacttcttctgcttcgccttttttcggaattgatatttctatttcagaagcatctatttcttctttaggctttacaccttctggtgtggagtgaagaataccgttttcgtccacataagccagcatctcttcgaagctacggctaccgctgctcaagcgttcttcttttctcttttgtttttcttctcgcttactctgtttcgctttttctctgtctcttttacttgatgttactctttttactgccattctttaattattatatattatgcagtttatatactgcacttagtttttctgactaatggctgcacctaatccgttcaggatccatacaacaatttaatcttgtgatgaacaaaggagctgattatgaggtcattttgggatggaataatttgcggaataccgcaaaagcaaacatgcacaaagaagatttcagaataaaccctattgtttatgctacaaagatacagataaaaatgagctatccattcgttttttaaattatttaaagcggtagctacttatttttttatgtacatttgtacttcttaatataaacacatagcaaaaatgaagaagattttattgttaggttccggtgaactgggcaaagagtttgttatttctgcccaacgaaaaggtcaatatattattgcctgtgattcatatgccggagcacctgccatgcaggtggctgatgaatatgaggtatttagcatgcttgacggcgatgcattggaacgtgtagtacgcaaacaccagccggatatcattgttccggaaatcgaggccatccgtacagaacgcctttacgattttgagaaggaaggtattcaggtggtacccagtgcccgtgctgtaaactttactatgaaccgcaaggctattcgtgatttggccgcacaggagttgggactgaaaactgctaaatatttttatgcaaaaactctggatgagttgaaagctgcttctgaaaagatcggttttccttgcgtagtgaagccgctgatgtcttcttcgggcaa

SEQ ID NO: 6354 - DNA, 158440 bp, Unknown
  gut microbiota DNA sequence
cgcactaccccataccgcaaaatcagccaatacacaaagcatgcaggctttacgcaaaataaaaacctgataaataatagagtataaagaaagcgtcacggctacaacacaacatacaactgaaattatataaaaatcatcctgccggataagcgagaatagataaagaggcgcaaagtatagcagagataattcccctaaccctaaccctgctatacttgcccctttagagtgaaacacttcattgcaattcactatcttaccgatattacagaatcgctccatgaattccccgttcacccgctctttgtagaggatggcgacagatacgagtattccaagaaacaatacagataaatagaacataaaggcaagcgaccgactctgacaaaacgcagtctggagtcccaatatcaggacaaagagcaaagcaataataaatctataacgcaataaataaaatacgatatttctcattatataaaattgctcgttcggtgttgcttcagtaggttctcccaataagactgtacctgtccaatgctgtagaaacttgtctacctttacatgtcgtttaccaccctctccattgataaattctacgatgaaatcgtcctttttcgtcacaacacaaaaagattttttgtccacctcaagcattgtgataaaaggagtttccagttttaaaaagtaatcacgtgacaggagccgaaacacctcattctttatatgaagcgcatccagtgcatcactgataccgcgcataccacctcccaacggagtactaagcaggcgatgtacagtatctctacttacctttacagacaatgtccgcagataacaatagagtacgacactgatattatcagccccggtcatgattaccttcgtttatctatcaggatattataaagaaaaagtgccttctaaggaggttccgtcagaaataacctctattatatattctccactatcttctccgttcaaatcaatagaaaagtttgtaggactaagaagcgtctttgaacaaacagttttccctgtagtttcatttataacactgattgcaacagtagggaatactttttcaaaataaacagttatttctccattatccaagtaagcatacaccggttggagaacaacactacgagttttgggagcatcttccggactggtactactactttgtccactcatgtccctgtcatcacttttttgtgtaaacacaatctctttaaatccaaaatccaattgtgctttcactgagctacctaaaaccaaaaatagaaataaaatagataatactcttttcataatgcataactttttgtttgatgccgctaaactacaaaagtccatgcgaaaagagtgtgtcacaagtgtgccacccctatattttgcgcaagatttctttaaattcactgttttgttcaacgccaatccgttcacataaagcattctttttccgatagagtgttcttctggaagaatgcatcaaatatgctaaatgagcaaatggaaaatctgtcaaacttaaacatactaaatagagttcctctttggataattgatacttaacatgaaaacgtgaaatggcattattccactgggagtccatgctgacaattaattcctgccattcctgatcgcttatttctttatctgatgcatctttatccagatgatcttttataattgcctgcatttttgcataaagtggtgaatgtaggaaggcctctttcaccaaagcttttctccttaaaaccatttcatccagttctacccgtattttttccctttgctcttcatcaatccggcaagaagctaactctttccttagattttcaatttccaggtctcgttgggttatctcttcctgtagacaagcataatgttgactcaagtcttggtttactttctctaattgctgattattcttttgcagcaaatcattttttccccgatattgtttattttttctataaagaaagaaaacaatcatgataactataatcgttatcggtataaaaacacacaaatatatatttaagcgtcctttataatacaactgatggagcgttatctgggcgtcggtttccgcttcaacaatcttatcagttactacattcccacgggattgatataagctatccttatatgcagaactatatctttccagtttcatagacaagactgcattaccttgaatcattgctatatccgccaaacgcatataggcatccgatcttctcccgtaatccttacttatcagactcttgtttaaataaaaagttgcagaatcatatagcccaaccctatagtaagcatctcccaaaataagaaaagcttgataggctcgtgtagtatcctttcgcagggaaagattaagttttgcgtaaaagagagcctttttaccttgatccattttgctatatagacgacttaatgtagctgaaacatcagctttgatcgctttattttcaattctatctaccactgtaaaagcatccagtaacttttgttcagcagtaccaaaataatcattacctttcataaaggcaatagaaccctgcctggatagagcttctgcccaaagagtagtatcttttaattcttgagcaatgtcctccattaactgatatacagaatctgctttttccttgaaattctgtatataataaatatagccaatattattgtatatcaatcccaattgccgtttttccacagtttccttcgtcaaagatgcagctataagatattccctgagtgcctctgcctgacggttcatgtctctatacacacatccccaataatagtgtgcacttgcccgcatctttgcatcccccactttatcataatgtgcaacagcgtaacgtatcagcgaatcatctacctgtacaacataatttttatctcttgcctgtgtcagcaacagcgcataataggcactatcagccggtgaggcaaattcctgagtagagatattctgcaaaacagacaaggcactatccggcagcgaccgcataagggaatctgcccatatcaattgcttgttattgctttgccgggctgtacaggccaacagcaaaaaagcaactaaaaagagtataatagctttagtttttcccattctataagtcatctactgagtccttagttggacaaagataatgttttccggccaaaggtgtcagatgttagaagaaagaatagaccaaaatcagaaaaagtagccaatcttactttacattgcctcccactcacacccggttcgtacccggctcgtacccggttcgctatttgtacttctgtatagaagcgaaaaaggtacgaatcgagtacggagaaaaagagtttttaaccaaaaacggaacataatagtagtggattatctccgtgtgaaacgtcaactgcatacaagagtcagaaaaccgtttataaacaatacattatcaatacattaccacttttcagaaaaattcttgaacgcttatggcaaaaatggcaggtcgaaaagaaaactttcccatacctttgccaacgcaacgagaaccaaacatcgctgcatactgaacaacacgatgaagattgctgcagaagtctttttagcaagttcacaaagaaaactaatttatttacaacacaaaaaagaaaaaattatgggaacaattaaacaaggaatcctcggaggattctcaggaaaagtaggtacagtagtaggtagtacatggaaatcggtacattatatgcgtgcattggcggtaagtttcagtgatccacgcaccgagaaacagaagaatcaacgctctaaatttacagcagctgttaacttcacaaaggcaatgacaccctttctgcgttttggatacaaagaattttccggacagcaatcagcattcaatgctgcagtatcgtatattctgaaacatgcaatgaaaggtagcggaacaaatgtctcaattgactacaacaaagctttggtgacacgtggcagtctggtacccgcattggatgccacagtaaccgtaaacgaaagtaaagtaacttttgcctggaccgacaacagcggaatgggtgacgcaacagttacagatgccgccatgttactggcatacaacaaggacaaagggatggctgtttatgatatagcagcagccacacgctccgatgccaaggcagaactgaaacttcccgccaactggaaggacgatgcactggccatttacctcggtttctgcaacgaagacgttacaaacgtagccaacagcgtatgcttgcaagacactccggtaagtgaaggttcggaaggcgatggctctgaaggcggtggctcaggcgatggtggcctggatgagaacccactgggataaactgacggcaaacggccgggattgaaaaagaaaagggaagctgaacggaactaaattctccggcagcttccctttgtttatttctaactataatgataatttcttactttacctcttctccctttagtgttgctgaactagcttctgtaattttcaccattacaaaatcaccaatacggtgcgtaccacggtcgaacaccacgacacggttttgctccgtacgccctacaagctgttcacgcgaacgcttggaaactccttccaccagaacttcatatgtcttaccaatacagcgggcattagactcggcggaaaggcggttttgcagagcaataatctcattcaaccgacgtatctttacctcttcgggtacatcatccggcaaatgcttggaagcataagtacccggacgctcagaatacttaaacataaaagctgagtcgtaagcacatttctccatcagagaaagggaaagctgatgatcttcttccgtttcggaatggaagcctgagaagatatctgtggataagccacaatcgggaacaatgcgatggatagcatctacacggtccagataccattcacgggtatatttacgattcatcagtttcaagatacgagaacttccactctgtacaggcaggtggatatgtttacatacgttgggaacctgtgcaatgacttccagcgtttcgtcactcatatccttggggtgcgaagtagtgaaacggacacgtacacccggcgcagcctcagctacggtacggagcagcatagggaaagttacaacttctccgtccggtttctcaaaacggtaagagttgacattctgacccagcaaagtgacttctttataacctttcgccaccaagtcggacacttcattaagaatgctttccacatcacggctacgttcccgtccacgggtataaggaacaatgcagtaggtacagaaattgttacatccacgcataatggatacaaacccggaaatgtgattaccgcaaatacgcgaagggataacatcccgataagtctcagtggtagaaagctctacattgattgctttctcgcccgcctccacagcagcaaccaagtcaggaagagtaagataagcatcaggacctaccaccagatcaacatgatgattagtgatcaaatcatcctttacccgctcggccatacatcctaatactcccacaatcaaattgcgtttcttctttttgagcgaatagaaaaattccagacgattgagaattttctgctcggcattgtcacgaatggagcaagtgttcataaacactgcatccgcttcttccagcgtatcagccgttgaataccccgccatctgcatcacagaggcaataacttcactgtccgccacattcatctggcagccataggtttcaataaacaacttcttgttgtcatcagcagttgcagatttaaagtctgctcccgttactttttccataatttcctgtttttatgactcaccacggattacgcgaattaacacagactatcttccccaatgagaagtttacagaaaactcaaaaaacatctgtgtcaatctgtgtaatccgtggtgaaagaatttcagctgcaaagatacgccttcggcactaaattacagatgaaaaggcaaaaaataacactcaatagttagaaaataaggtatttctcataataaatgttaagtgaccaaacattttcgagactgttatttggcataaaggattttatttcacaaatttgcgtaatgaaagaaacattagattttttcatagttaaggtttaggttaaaaaaaataaggggagctgtgaagctgcccttttttcatgcctaaaaattggctgttattcagataaattagttacctttggcggtgaaaaacttaaatgagtatggatggtatcttacagtttctgttaatcgtaggcataattgttatcggagttgttaagcagttcaagaaagaagcaaagaagaacgctgagaacaggcctgctatgcctgtgccggaaaatgatattgacgaaagcgcattacccattcctgaagcctggggaaacacatatggcggatttattcccgaaggtcccgcccccaaaataccctccgttccgacagaaaaagaagaatatcaattctctgcttcaaaacatatttttggaggagattctacaaatacatctcccaagcataccacaactcatccgaaacagaaaatttctcctcctctgtccactccgcaaaaacctgaaaccgattccgaatactccattcattcggcagaagaagcgcggaaagccatcatctggtcggaaatactacaacggaagtattgaataagtggagagtggagaattgagagtggagagttaaaaaagcttttccagtaatttatgaattttcacataggaaaaataactaaatacattatggcattcaattacatctcggcagcggaagctgcaagcctgatcaaacatggctacaacatcggcttgagcggatttactcccgctggaacagccaaagccgttacggcagaattagcaaaaatagcggaagctgaacatgcaaaaggaaaccctttccagataggaatcttcacaggtgcctctacgggtgactcctgcgacggtatactatcacgcgccaaagcaatccgctatcgtgctccttacacaaccaattccgattttcgtaaagcagtaaacagcggagagattgcctataacgacatccacttgtctcagatggcacaggaagttcgttacggtttcatgggcaaagtaaacattgccattatcgaagcttgcgaagtaactcccgacggcaagatttatctgaccgcagccggtggtatcgctcccaccgtttgccgccttgccgaccagatcatcgtggaactgaatgctgctcacagcaaaaatgctatgggactgcacgatgtatacgaaccgcttgatccgccttaccgccgcgaaatacctatctataaaccaagtgatcgcatcggtcaaccgtatatccaggtagacccgaaaaagattgtaggcgttgtggaaaccaactggccggacgaagcacgcagttttgccgaagctgatccgttgactgacaagattggtcagaatgtagccgacttcctggctgcggacatgaagcgcggaatcattccgtcaaccttcctgccgttgcaatccggtgtaggcaatatcgctaacgctgtgctcggtgcattgggacgtgacaagaccatcccggcattcgaaatgtacacggaagttattcagaattccgtaatcggattgatccgtgacggtcgcgtgaaatttggtagcgcttgctcactcactgtaacaaacgactgtctgcaaggtatttatgatgatatggacttcttccgtgataaactggtgctccgcccgtcggaaatctccaatagtccggaagttgtacgccgtctgggagttatctccatcaacacggctatcgaagctgacctctacggaaacgttaactctacacatatcggcggcacgaaaatgatgaacggtattggcggaagcggtgacttcacacgcaacgcttatatttccatctttacttgtccgtccgtcgccaaggaaggtaagatcagcgccattgttccgatggtatctcaccacgaccatacagaacatgacgtaaacatcatcattactgaacaaggtgttgccgacttgcgtggtaagagcccgaaagaacgcgcacaggcaatcatcgaaaactgcgttcatccggattacaagaatatcctctgggattatttgaaaataactgatggtaaatctcagactccgcaagcagtccgcgctgcattggctatgcatgcagaattggcaaaaagcggagacatgaagaacgttgattgggcacagtataagtaagctacgagttacgggctacgagctacaagtgtaaatcagtacgagctataagaaacgagctacgagttctgcgatatcaacgcagccactcgtagctcgtagcttgtagctcgtaactattttattacttcatcacataccgcatcctgaaaagcgcgtgctttagctcctgaaagtacattctgattcatgatggcaaaagccacttcatgcccgtttgcggcacgcaaatagccggccaagcaattaatagctgtaaaggacccggttttggcatgtacattcttatgagagggagtcccgcgttgcatccggtattttaatgtcccatccacaccgccaatgggcaaagccttatacaacttctgaaaaacatccgtgcgcgaataagcaaacttcagaaaagaaaccagcagatcaggagagatataattataattggaaagtccacagccatcagccagtttatagttatccgcatctcctcccaaagcttttatctgcttacgaatggcagaaagcccgtcttcatccgaaattctttttttaccggtagcttgggcacccaaacgacaaagcaaagcctgggcattcagattatcactttctttcattatctgattgactacatcttgagtggaagtctcaaacaaagccatttgcactgaaagactatctttctgcaattcgttgaaagcataaccggcggggcattgaataccttttgctcgcaggcgttcaagaaaagtatacataaagaaatcctgggaggaatagatattcactgtacctatccgcttactttccacgtttcctttaataatcacattattgccattctgcaaccaatcccgggaaacaccgaaacgtccggcagaaggagtacgggactgggtttcattggtcacagtataataggaagaagcgggaacacattcgatatttgccatttctcctttctcacccggagaagcggttacggtaaccagacctttattcagcatcaacggtgagagatagggttggtatgaggcaggcgtatcatcccatgcccagccacttccccaatagatggagtctttcatagaaacatcaccgtatacgttgcctgctatcaccgaaaaggggaaacggctcaccgtattcaccagcgagtccaaagcttcatcatcaaattcaggatcatatccaccgacaacgtatatgtcacccttcaatgtatcccgttcaatcactccctgataccacacctccgttttaaaaggttcatccgcatcggggcgggcaagggcggtaatggtagtcagcaacttcatggtagaagccggacgggaaagtttatccgattgataggtatataaggatttccctgtagtcagatcgtatacggatataccaacattggaaccggcaggaagctgatattttatcagagtatccaggcgtgaagagaggctcttagcactcgtattctgcccccatagtactatgggaataaataagagagaaagagtaagcgacaaaagatattttttcatgtgcatttaattactgataagtactaatattaaattacctgttgagggaattagcaccttttgatatacttacggattatacttcagccgaatgaaattctgcaaccggcttttcaaactttcctccacaggcatggcagacatactcccaatgattatttcccggaggagtagccgccaacaaagaggcgatggccgacataacagcccgtagccgatgctctttcttcaacacaaacttaatgtcggacgaaccgcagaaagggcaatattttaattgctccgggatcatctcattctgttccagcaagcgaacggcagcttcataatcggcttcgtcgaccaaaacgtccactccggcaatatcattgatgtagccgcgcaacaacgtagacatattctcattgtgaagaagggaagaaatgccttcattctccaatgctccctgaatgatgtgtgcctgagcagcatcgctacaagtaatcagttttacagttttcatcgttctaatattttatatgagtcctgaaaaacgctaagaagcgattgtgattatcataatgcttccttaaagatttcagaaaccgtaggatgggggaaaatgattttcttccattccgtagtagtcagtttcaactcgatggccatacctgccaaagtgatgatttcggaagccggattgcccaatacatgtgcccccactatcgtttcatcatccgctatcagaagtttgcaaaccccattcacaccttcattttcagcaacgaaacgcccggagtaagccattggaagctttacaacccgatagttgataccttttagttgcagagcttcttccgtttgccccacaccggcaatctccggattggtatataccaccccgggaatagcccaatagctcatagcatccttttggccaagtatggtatgcacggctacttctgcctcacgcacggctgtatgtgccagcaaagagaaacccgtcagatcaccacatacatatatgcccgcaacagaggcctgcatacattcgttcacacagatatttccccgttcagtccttcgtaaatccaggttttcgagcccgaatccttttatcaccggacgacggcctacgctcatcaataatctatcagccaatacagcacctgcaccttccacattctcataactcacctgtacctgtggttccccatcatcggaagaagcctcagcaatagatatcacttttgtactaagcataaacttaattccacgtttggcatactctgcacgcagcatagcagaaagttccttatccatgccgcccagaatttcatcaagcatctctatcacagtgacctgtacacccagactattgaagaaagaagcaaactcgatgccaatcactccaccaccgataatggcaagtgatgcgggaagctccttattatccaaagcgtcgcgatgcgtccagaaaggtactgtatccacaccggaaataggcggaacgaaggtttccgaacccgtacaaagaatcaggttttcacattcataagtttcgccaccacactccacggtattcttgtcaatgatggtagcctctccctgcacgatatttacaccatgtgccgtcagtttgcctttaacgcccagcaccagcttgcgcactaccttctgtttgcgggcaataatcttcggcaagtcaaatgagacttcggagacatgcactgcatatttggaagcataacgcgcggcatcatacgtctttgccgaatacaacaaagtcttagtagggatacaaccttcattgaggcagactccacccaaattttgtttctcgaacaacactacactcaatccggcttttccggctgtttcggcagcagtatatccagcaggacctccaccgataatggcaacttggtatttcatagtcttatttattagtacacttgtaaactgcctgcaagttaataaaaacctctcttatctgcacaaaacaattatcctttctttgtctttttcaccgtacgcttcatctttaaggcatataaattcagctctatcgaagattcggtttctgttgtatcccctttctcttctacagacaataattcgtgaagtaactcactgctgcgttgagtcaatgttttctgtttaccttcatctgtttctgttgacaagatatttagattgcgggagagttctcttaaatgggcaaaagattctataatggcaagagtcgtagccgtagcccggggacttttcaaaacggtagcaagcatataaagccctttttcggtgaaagctttagggaccgcacgtactttggaagataaatttgtggtcgaaaatttcgaccgcaaatatcgtatctcactttcattcaattcaatgatataatccttagggaacttatccggattatttctcaccgcttcattcacccttttcgtttctactccgtacagtattgccacatctctatccaacaggactttttgccccctcagttctattaggcatgcttctatttcctgttccctgatgacttgtaatttgttttccatactttatatgtattttgttgatttaaagacctacaaggtacaactaatattctacaaaaagtatcaccccctatctttttcttgctaaaaaaacatacctttgtttgcagtattttccaataaaatacgtctataaacaaaagctatttaaactaacgaaactaaagatacatgaaacgaacgaacgtactccaagcgctaatattctccattgtcatccttttcggcggaacagcctgtgataatgcaaatgatgaacgtttctcttctacagaagaatttactgtcgaaggcgatgcaagctccatagagatcccgatgaccagaaccaactggattgtggcttccgttatgtatccggatggaggcatcatgacagatgagaatgggtatcccttaaaactggagggtatgggcaccgtacgcttccattggggcagcatcacccgcgacaaggcaaaatccctgactatacaactgaatgataactttgcaggggaagagcgcagattgattctcaaactgagtaccgaacaaggactttactcagaacaaatattcatccagcagaagatatgcaccaattactatcagatagaatccatcacttactccctggatgaatttgatggagtaagagaaaccggaacaaagccctggggaatcacctggatagacagaaccggtagcggagaagaaataaagaaaacttcctttttccccttctacaatgcttttactgaatattacttcgatacctataccggcgaatatcccaaggaatggatgaatcccgaaggagaaagccgctatgtggatatgccgggaaacattgtagacggacaaattatcttcgagcaagaaaagcagaaatacaccgacagaggaatgtacagaggtgaattaaaagatattagtttcgagatggacatggtcggcatggagcaaaacagatatcaggctgacatctattataaagccttgcaagttagttacactatgaccttgtcaaggcccggcagtgacacaaagaaaatcattacagggaaactgctaaagaattacccttataattgttctcctatacgccatgaggtcagcgacctgccaagtgatgaataacaaatatataggactgatttcattaaatagcaataaaaccgaattaacatgaataaagtgaacctaaaaaagtttttaacgacttcccaagttcactttaaattttaagttaccctatctcatatagaagacgtaaggctgaagagtatttcacttacactgatattttttcacttgtgaaatcctacgatcgtagagctaactaatctcatgctaaagttccttgcctgaagagagtttgtaagctcagggaagatgatacagtagtttatactcagactcctttttcgtcaacttagatgacgactacaaaaataaaaagaaattcggaagaaaaaggatatttcagatagctaagcatgtgttataaaagatctatgcgtgttacagccgttttacattattttcccataaaatggactttgctttaagagattatatttatttttgtagctctattcaaatctttgtactatgatacgagccaaacacactttgatcgctgttctcattctgatatggggagaaatacctgttcaggcacaacgccaagtgaacagtcagggcgcactctcatgcagccgaatcgtagaaatgaatcaagacgcttatggcttcgtatggatagccacggaaaacggattgaacagatttgacggatggaaatttatcaactacttccatgatgataaaaatccgacctccttgtctgggaatatggttcgcaaactcttgacagataaatccgggcgtctatggataggtaccaacaacggtttgcaatactattgtccttatgaagataattttcattccgtttcatttcctgataatgctcatcccagcatatcggacatggtggaaacctccaatgggaagatttgggtagtcacatcagggtacggtgcttttttcgttgacccggtcactttaaaagccacttatcagaaatggattaccgaattgtgtcatacgctgttcatcaactgcatatacgaggatcattctcatcggctgtggatagcctatctgggcaatcacctggcttgcatctctcctgaatcgaaaacaatggaagtatacaatctccctccagctccctctcccaaagtctatgacattgaagaggataaagagggacgtttgtttatctcaactcacgaccactttctttataaaactcccagcagttcacagtttatacctattccctataaaggacgcctttccgtagatgtccgaaacatgattaaaagcagaaatggcctgttactgatcaactccaacagtcatggtttactgtatctggataccgaaaagatggaattacagtctatcgaaaaccttcggggacacttggcaacaatggcaaaaggaagaattcatgcctttatagaagaccaaagcggcaatctatggatcaactcccggcacaaaggtctttctattatacctaaccgacctttcttattcaacttttggaacctctccacaataaacccaaagggaattgtatctgccctttacaatgacaaagcgggagacttgtgggtggggtatagcgactgcacgctttatcgaatggatgcggaaggtaacatcaaagactctctccatatgcccaaatatgtaaaatgcatgtttgaagatagtgaaggaacattttggataggtactcagcatgggggaatgtggcaattggacaagcgtacaaaccaatgtcttccttttccgctctttcgggatgaggcagtcagtcaaattatagagagtaaagacaaagtcatctatttcggacttgagggaacgggattcgctcactacgacctaaacacccatcagtcggaactaatcacttatcaaagccagttaagcaccaatgtacgattgggcactgattggatcaatgctctgttatatgactccaatggattagtttggataggtcatgctatgggcatcaattgttatgatcctgaaaagaatatctttttggaactggactgcgattccattctcaaaaatcacgtatgttatgccttacttgaagatgccgaatatcgcatctggattgccaccgacaacggtttgtatagctacgataaggtaaaacaaacgactttgcatctgagcaaggaagaaggtatgcccagtaacattatctgcggattaggtacagacagtaaagggaatatttggtgcagcacatacaaaggtttttgccggatcaaccacgaagactgtcgcatcttgaaattcttttccggaaatggattaacggatactgaatatactccgcgcatcttttaccaaagagagaagcaaagggcctattttggaggtatttacggggtgacatcgtttatgcctgattcggtttgtactccttatcagcttcatcaacctacgttaactcaactctatcggaataaccggacagtgagcgcccgaaatctgactcccgaacgttcagtaaaggcttccgccctaatggatttacatgaattgtatttctcatttgacaacacaaatctctcttttgagttttccacgttggagtttcacgactgcaccaatatctattttgaatatcgtattaaggagttgaatacccaatggaacaaaacagaactaggtgaaaacaaaatcacctataactatctcccgccgggaaactatacattggaggtgcgtgcctgcgagaatgaagtgtactctccagttaactgcataacctttcatattgcatctccatggtatcagaccacatgggcatggcttctttatatcctgttatgcctgcttctactgggcatagtctaccacatatggtacaaatggcgctgcagaaaacgccgagagacaatcaatgaagagaaactgcgttttttcatcaacattgcccatgagatacgttcgcctatcactttaatcctaagcccgttgacagagctaatcaaaaaagatcatgatgagactaccctaaaggctttgaaaaccatgcagcgtaatgccaaccgaattttgaatctaatcaatcagttactggacatccgcagaatagatcgcggaaagatggaaatcacttaccgtcatacagatttggtaggcttcgttgcagacattttcaatatgttcgattatcaggctactaaacgtaacatccttttctctttcctgcatgacctgactacccttccagtctacttggattgtaataatttcgacaaggtgctaatgaacttgttgatgaatgctttcaaatatacgcctgatggaggtgaaatcacaataaagcttactgagggtaccgatgagacagtaaataccccattgagacattatgctgaaattgccattcttgactccggtataggactgaatgagaaagaagtagagaaaatttttgaacggttctatcaagcaggttccaacacttcattaggatttggaatcggcctgaacctggcaaaattactggtggaactgcatcatggaacaattactgcaactaatcgcactgatattcaaggcagttgcttcacagtgcggattcctttggagcattcacacctctccgatactgaaatctcggaaacagctctccaatcacacacaactttggacttgatcttggacgaagaactgaaaccagaaaaggagattgctcgaaaaagtaaaacctataaccgggtattggtagtggacgatgatgatgaagtacgccaatatctgcaacatgaactaagtgaggtctataaagttcagacctttgataatggttccgatgccttactctacgctctacaacaacgggtcaacttgattatctcggacattgtgatgcccgaaatggatggatttgaattgctgaaaaagataaaaaataatgcaaatatcagtcacattcccgtcattctgttgacctcgcagactgaagcggaaaatcgtctgaaaggatgggaaacgaaagccgatgctttcatagctaagcctttcaatattactgaactgaaagcattatgcgacaacctgattactacccgttcgcacctaaaaggtaaatttggaaacggacagatactggaaggtaaaatcaagtctatcgaaataaagtcaaatgatgagctattaatggaacggttgatggacattgtaaaccgtaacttagcagattcttcgtttactgtcgaaaaactggcagaggaagtcggacttagccgagtatcacttcatcgcaaactgaaagaactggcaggagtgtctaccagcgaatttatccgtgatattcgtcttcgtcaagctgcaaagcttctaaaaaagcgggcaatcaatatctcgcaaataggctatgccgttggattttccagcatctatgcattctcagtagctttcaaaaagctgtatggttgttctcccaaagactattcagaacaggaacttccagaagaataatctacatgagaaatgaccatctaatcaggatatttggaatcacccgaaacttccggtgcatgagctgaattatcagaaactactcagcaatgcaatgtagcaatttgacagattgacaatcctaatacacaagaatgcttttttcagtctaccaaagggaagagaaatagaaatcgcaaggatagcgtctagcaaaaatacgtaataaatgatattttataaaaaacactctgattcttttattctcttttattttaaatagctttcatattcaatacagcaacagcaaaaagctatcaattaaataatagtccaatttctcattcaaataaaatagaataagccagttttagaggaagtctgcccccctttactccagatggttacacctaggcaaattacattcttattcagcaatatgataacaaaaaatatctttcaagatacaaacttataaatataagcgtttactacggaataccaagaagttattgcatctatatatcacccacatataaatctaaaagaatcagatgaaagggagatgtttaatacggaggttttagctcatgtaccgaaaatttcgggtggtccaatatttaacctgttcaagtatatcatttcttctgttgaagtgaagtactcgtttcgctcaactaagcattaccatagttaaaacaaagcattgtctttctttacacataattaataatcaacatcttaccacatttatgaaacattaattataaaaattggaacatcgtgtaacatcgtatataaatgatgaaacatattccgaatgaccttctgattttttatttcacatttgcaaatacaaaaattcactcatattttttatgtgcaattatgaataaacttaaaaacaaaccattcaagaacatgggacagatatttaaagacagcggttgaacacagctatggagtatctggtttaagcaggctccaatacagaattttgaaacctaagttataaaattattaaattgaagtcgttatgaaacacacaattattcatctaaaatccctatgcctgttttttatgttatgggttacatcagtagggacatttgcccaaaccatcaccatcaccggttctgtaaaagatgaatcaggcgaggggctcattggagtcagcgttttacaaaaaggaaccacaaacggtacagtcaccgatctgaacggaaattacagcatagcagtaaatcagcaaaataccgtactggtttattcttatatcggatatattactcaggaaataaaagtaggtacccaacattccattgcggttattttgaaagaagacacacagagtttggacgaagtagtggtcatcggttatggtacagccaagaaaagcgacctgacaggagcagtaacacgcgccaatatgggagcattggaaaaatcgcctaacgtcaacgtcctacaaggcttaaaaggcgttgttccaggtttgaacattggtgtcgctactaaagctggtgattctcccgctatctccattcgtgggagaaactctatttccggttccaccgaacctctggtagtattggatggcgtaatctaccgtggaaatattgtagacattaatccgagcgacatcgaatccattgatgtactaaaagatgcaagcagtacggccatttatggttcgcaagctgccaatggcgtattaatgattacaaccaaaacggccaaaaaagtttcaaaacctattttggaatataatggtacatttaccattcaaggattgattaatggagacatgaagcgtttggatagagaaggctttgccaatcaaattgctgatatttatttatcggaaagcagaatgggagatgacatgatgcagcgtaatcccaatttcgacccgacccttaaattcagaaatgagcgcgccattgccggttacaatgcgggagtcgatacagactggtgggatttgctgaccgaacctactccttatattcagaatcacaatctgagcatacgcggtaaaacagaaatgaacagttattttctctccttcggttttacagatcaacaaaacctggtgatcaacgacacctacaaaagatataacattcgcattaatctggattccaaaatcaccgactggttgaaaataggaaccgcctcttatttcaatctcagtgatttttctggtgtaaatacttctttcggcaacctttttagcattccgggatgtgttagtccttatcaagaggatggaaaaacttatgaaacgtatccctatctcactacacttaatccgatgttgagcattcataatccaaacaaggatatgcgttacaacctgtcaggtaatgtgtatgctgatgtctccattccttgggtgaagggtttgagctatcgaattaattatgccaataattggaccaactataagtattataactttgatccttatgccaatacgctgcaaggtggcgctgaaaagaaacatacgcttcaaaacgaatggacattagatcatatcgtaacctataaaaacacctttggcagacattctatcaacgccaccttcgtatatggagttgagaaacgttcttatgaaactacggatgccctttccagtaattttaccgacaaaactttaggatacaataatatggggatgggacaggctgatctaaacaaaatcacatcgggagcttgggaagaaagtagcctctacaacatgttccgtttggtctattcctacagagaccgctatatctttaccggaaccattcgccgtgatggtttctctggatttagtgcaggaaataagttcgggtattttccatccatagccgctgcttggcgaatcagcgaagaaagtttcttgaaagagcatgtgcaatggattgacaatctgaagttacgtctgtcttatggtagcagcggtaatcgcaccagcggacgttatgctacattggcacagatgcagagtcaaaacaatttcaacacgagtagtttaggttatgtttatggtgatggcggaacaggcgaattactccaagtcatgaagtctttacccaatccaaacttacaatgggaaactacccgttcggtgaatttcggaatagatttcagtgtattgaacaatcgtctgttcggtaactatgaattttacgtttcaaatacaagtgatttgctgtataatatctccattcctcacatgaatggtatggtgtccaatgaaatacctaccaacatcggcaaattgcagaatatcggtcatgagtttagcatcaccggtatccccatttctaccacagattttgaatggacagtaacagctaatttctctacaaacaaaaataaggtaaagactattttgggcattgatgctgatggtgatggaagagaggacgatttagtttctagtaatatatttatcggtaaacccctggatcccatatatgattataacatcatcggcatgtggcagctggaagattataataaaggcattatccctgaaggattcacttatggtacctataaaattgaagatattgacaaaagcggtgattacacggcagaaaaagaccggaagattatcggttacaaagatccgttgtatcgtttcagcatccagaacagttttaaatataaaaactttgaactaaatgtattcatcaactccgttcagggtggttccgatcactatctaggacagcctgctcgaaagatgcaaatccccgatcatttgaccaataacagtttcttgaaattcgattattggacacctgagaatccaaatgcaaaatatagacagttggggttctatacagcttcattgggagaaggtttttccccatatgtttcacgtagctttatccgattgcaggaattatcactaagctacaatattcctgctgattttttgaaaaagattcacgtcaatcgggcaagagtatttgtcagtgcatccaacctgttcactattacaaattgggatggatgggacccagaagccgatcaaggtttgacttatgacctcgatggtggttatcctacgatgaagagttatacattaggcttaaattttgaattttaaaaatatacttaccatgaaaaagataaaatatattcttgctgctgtagtattaggttgcttaaatacatcttgtaatgagagcagttggttgaaagaaaagccattagacttttatacagcagaaaattcttatcaaaccacttcccaatttaaaaagtcactgaattatctgtatgatgtagtacgcaatctccattggaagttgggtgaccagcacgtaatcatgtggtgtggtgatataggatatggtgcgaccgaccctaataataagtttaataacttcaagacttttcttaccccgtatacctatgtagccggttcattctgggatcctggcttcagtggtatagccaatgccaatattattctgaatcgtcttacgctaaccgatctggtgagtgaagaagataagaaaagtattcggggtgaagctttattcttccgggcttacttctataacttattggcaaacttatttggtggagtccctatcattttagaagaacctaccgattctcgtcgtgattatgtgcgtgcctctcgtgaagaagtgtacaaccaagtgcgccaagacttggaagatgccattttgtgtttaaaagatatcacagaaattaaagatggcgtcatcaatattcaggcagcccagcaccttcttgccgaggtttacatttccctcaaaaactatccggaagccattaaagctgcttcagcggtcatcaaccatcctgccatgggattgatgaaagaacggtttggttctagaaaagaccaagagggagacccctattgggatctgtttcaagcaaacaatcaaagtcgtggaagtggaaataccgaaacgatttgggctcttcagtatgaatataagaatgcaggttcttcatacagctatgaaatgccccgctggttattacccttttataccggtttgcaagtagaatctgccaagaacgatggcagcaaggttctggggtttcccgcatttaccgaagagaaaggtggacgtggcatcggctgcattcgtcctggagaacatttccttaatgacatttgggaaaaggacggagataaagattaccggaactcaccttatatgattatccgtgatttccgaattgataataaagaagccaaaggatttggtgaatgggtcattaaagatggttggctagaagccggacaagagcttcgtaacttttatccttttgtgatgaaattcagccgtgtaggcggacttcctgatgacaattatgccaaaaacaccgatggttcctatactatcacccctttgggcgaacatgcgcttgtttatgcatggggaagtcttagtgcaaacacatccatgaaagacgaatatatgtatcgtttggccggtacttatcttttgagggcagaggcttatttaggcaataatgaacctgacaaagcagtaatagatttgaatgaaatcagacttcgctcccacgccactcccattgaggagaccgatgtgaatttggattttatattggacgagcagctgcgcgaactttactttgaggatttccgtttaccaaccttgtgccgtttaaacaaagtggtggaacgatcaaagaaatacaatccttttgggcacaatgtaggtgaacatcaaaatctgttgcccataccttatagtgaaatagaaaagaatatttatcaaaaattagaacagaatcctggctacgaaggtttctgataaaaccttgttgaatatatgaaaaaagtaatcttgacatgtttatccctgatatgggttattagcttattggcccaaaaagaggtgcgtttgaaggaaaattttgattttgactggaatttctcattgagtgataatcagaagtatgctgaccgaacctataatgacgagagttgggaaaggatacaactcccccatgactggagtataaaattgagcttcgataaaaaaatgggaggctcggccgcccatcttcccggaggcataggctggtaccgaaaacagttcaaacttcctcgctcttataatggaaaagtcatttctatcttgttcgatgctatttgccatcaaagtgatgtgtatatcaacggccatcatttaggctttcgtccttatggcttttgtagcatagagtatgatctgactccctatttggactatgatggagaaaatgtaattgcagtgagggttaatcgctctggagtgaaggatgtggcacgatggtacactggctccggtatttatcgtcatgcatggcttcaagtgacaaatccggtacacgtagccacttatggtacctatgtcactactccttccgtcagtgaagataaggctgaaatcagaattatgaccactttggaaaatgaattgaaaaaggtgcaaacagttagcatttcacacttaattttagataatcagggaaagattgttgcaaaaagcggaacggaaaagactttatttgaggctggacaatctatcaagattacacaaaatctaacattgaactatccacgattgtggacattggaaaagccagaactatatacactggaaaccaccgtaaaagctaatggaaaagtaacagacctgtataaaacacctttcggaatacgtaccattgctttcgacagtgagaaaggtttcttgttgaatggtaaacaagttaaactgaaaggaatgtgtttacatcaagatgcgggaagcttaggtacagcagttctcgatcgttcctatgaacgtcggctggaaatcattaaggaatatgggtgtaatgccattcgttgtagccataaccagccttcccccgaattcttagacatgtgcgatcgtatggggtttgtagtgattgatgaagcttttgacaaatggaaatcaggatattatgagaaatatttcgacgaatggtggcaacgggatttagaaaatatgattcttcgcgaccgtaatcatcccagcattattctttggagtattggtaatgaagtgaccgaagcttgggaacaaggcaacgaaggcattaagcgagcagaaatgttgcgcgactttgttcataagttagaaccgtcccgtcccgtgacattggctgcgcaaaataatcatcgtggcgaattttccgctgtagccgatgttgtcggatataattatttagaagcccgattattaacagatagaaagaataatccaaaacaacgcttcttggtttctgaagaattaccctattatagcggagccgaaggaaatattcgcagctatacagtcaataatccttggaatgttgtcgctgcccatgattttatagctggtggctttatttggtcaggagtcgattatttaggtgaagcctcttggccaagtcatggatggcccaatggcttgtttgatatatgtatgtttgaaaagcccagagccgcctttcatcgcgccatgtggaatccggaaccaatggttggtattgccattatagatcaatcattggacattgaccatggacgtgatttatggcaatggcctaaaatggtttcacattggagcttcccccatcgatattttggcttgataatggaagtacgtacaacaactaattgtgagaaggtggaactatttatgaatgataaatcgatgggagtttataatacggtagactatcctaaccataccattatttggaatgtcccgtatactcctgggaaattagtggcaaaaggatataatggaaataaaatcgtagctactaaacagctgataacatcttataaaacaacagatatcctgttgaaacaagaccggacggaaatcaaagctgatggtcaggacctgtcccatgtagctgttcaattatgtgataaagatggaaatccagttcaggtagatgatcgtaagttaactgtcagcgttgaaggcgatggtactttccgcggattggataccggagatctccggcgtgagactcctttcggaagtaatgaactgaagacttatttcggacaggctctgattatagtacaatcaacccgcaaagctggtcagataaaggtcaacattcaagtggaaggaatcgaaaaagtctattctacgataattacaactcattcgtagaatgataattcataactttacgggctaaatcatcataaatgctggggctatgtcagtgtagtcactaacatagccccagctatcttctaacttcgcattgaagaacaatatcaatttaaagatttactaaaataacaaatgtacctatataagaagaaaaacaagaattgctcattctttatttactataacatctagcatcgtaatctcttctttactgatgtcgggtgatttcttttcatctagcttgcggcaaaccagtttcgccaccttcaaagcatcttcttctgatgtaaaagctgtcttctcacctatggcaggtatataaggctgataaatcagtgtatctgccccgtaaaccaccacatatccatatcccccttccacttgcatggaacggcaggataacttttctccggcggcattcgtacgcccggaacaataagaaaggcatactgccacaagggacagtacacctatcttcacaataaacatcagcttcataaatctttatatagaaaaagcactaatcaacatcttcctgctcataaggcaagagctcatagacatcatcaaaataactggttcccgaagatcccgacagtacaaaaccccgcttacctgtggagaaagacaccgcataagaacgtgatgaacctccggaactgacattatgcacattcgtcatcggcgtatagtcatcatcagaatcaccataccacaaatcttcttcaggatcatatacccaataatcactggtcaccccactacgggttcctgttgcgatatatcccctaccgtctatgacgaaagatacggtacctgcacgggtaatggcataatcgtcgtcataatcttcatcactatcattattggcaatgtcacgcaactgtttccaatcactaccgtcgaacttccataaatcgtctaccaaagtaccattgttatccccacaacaaatgtaagccacatcatctataacgaaagctgtaccgtactgacgtttatatccaccaaatccactcacgattgtccattgctgtccggtagcggcattagggtcgaaacgatagaagtccttcaagtagttgtcattataccccgtacccacatagccatatccaccgatagaaaaagccagcgcaccatagcgcgcacctccgccaaagtcatctttccgtgtccagctgtctgtattgggatcatactcccaagtatccgccagattcgtagactcatttttctggacaccggtggtaatgtagcctttcccatttagagcaaacgcggttgcactgtgacgaccttgcgcctcatcgggcatatcggcgcattgtgtccaataatcattgttgatgtcgtacacccaaaggtccttcaggtatgtcttgtttgtcccacggaaaccgcagcacagatagcctttattatcgatggtgaaactactggcttgtccccgtgcaaccccgtccaggtccgaccttctcatccatacaccctgggtgtattcatcgtcgtccgtacaactgccagccaggcatccaaccgccagcagcatcattccaaataatagtcgattcattttttcttcagaacttgttttaattactatatttttggtagcaaaagtaggcggcaagtacttcatcagcaaatataaccgacaaacagcactaatttttcggtaaatagctttaccgataaaacccgcccgatagccgattttaataggaagatatggaagatttcattttcctttgcgaaagaatttaagagttacgagctacaggctacaagctacgagtgcctttcggtatgatagcgcagccacttgtagctcgtagcctataacttgtagctcaaaaacactatgaacaatgaaaaagttattgtatagcctgattataatgatcgccgccatctgtgcctgccaggacgaaaactcagaactgggcaaaagcctggtcgacagttctttttacaatatatatgtagacacttgcaccgtggatatcagcaccattcttatggactccatagaaaccaggggagacagcatctgccagctgggacattacaaggatacgtcatggggcgaagcctctgccacctactatgccgaatactccacaaacagtttcactcccaacgagaactacagttacagcttcgactcactcgtactgcggatgacaccctccggccacttctggggcgatacgctgacacagcaacgcatctctgtataccggctgaaacagcctatttatctggatgatgacgaagatttatacaccaccaccgcgttgcccaccgagagtactcccctgctcagctttaccttcactccacgccccggacaaaaaagagaattggagatacgtctgcccgacgaactgggtaaagaactgctgacagacctcatagccgaaaaagactacttcgacagccaggataagttcaaggaaaaatttcccggactggccctcgtggccgaaagcaacggaggatgtatcataggattcctggtgaatgaatcatccatggccatcaccctgcattataaagagataaccagccagcgcacggaaaaagaactgatattcagcgtaaatacagattatgcctacacgggtattcgtcacgaccgaacagggacttcccttgccactctggaaagcggaatagaaaaccttatccactcctacgatctggacaagcatgcgtatatgcagggactaaccgggctctacaaccagatagagttcccctatctgaataatttacagaatgcgggagaaatcgtctccatagaaagcgccaccctctacctttatccgcaggccggaagctataacaagctgaaccagctaccggaagatatccgcctctacatcacggacgaaaacaatgtgttggaagactatgtatatggcagcgacggcgtaacggtacagactggcaatctgagtgtggacgagatgttcgggcgagatacctactactcttttaacgtgaccgaattcatccgcaacaacttcggcacatggggcatcaaacgacagaaactactgctgagtctgccggacaatgaaatgataacgaccttcaatcagataatctttgccaacgaccccgaccaggagagacaatgcagattagatatcagatttaaaatatacaacgaaaaatgaaacatcaccaccgaattccccttatgctgtgcagtttatgtgcaacaagcctttctatcgtagcccaaaacaccacaaacctgcccacttccatgtatggaataggtgaattaagtaccagcgacggcggacgctatgccggaatgggcaatatcggcatagccctgaacaagcccggcttccagaacactctgaacccggcagccatcacccgaatggacagcacctgctttatatttgatgtcggtgcatcggcttcgtatgcccgctattctttccagaacgatcacagttccagctttatgggcaatcccaaccgcttcagcataggcttccgtgtgttgccgcgctggtatgccatggtgggtgcatcgccttacagcagtgtaggatacgtcatccagaccgaagaagaggtggaaggaatgcccggaagctatacttattcgttatttgaaggatcgggaggcttataccgctgttatcttaccaatgcctttgcactgaccaaaaatctgtcggtaggtgtgaatctgggcatcatactgggaacagttactcaaagtgaaacacaggagagtgccattgtggaatatgaatcttccaaacgtgccttttacgccgacttcggagtacattatgaattcaatactaccggaaggcagaagtgggcggccgggttagtatttgctccctcccttcaaatcagccacgacaataatctgacttatagtaattcctctaccagcgacaaccttgacaagagttaccatagccggacgcaatacctgcccatgcacatcggcagcggagtgtccatgactaccgaacgttgggtggttaccgccgactacaattatctggactggagccgtaacacttcctcctacacttccatgaaatatgagaatcagcacaagatgaatatcgggggaatttataccacaaacccacgctatccccggtccactgaactaatgggaggggtaggtttcagcaattcttatataaatctgagaggtggaaaaatgaagtatctggagatcagtgccggggcgagttttcccattcgttactcttatctttcattgggcgccacctggcggaaacaaataaattcacgtagtagcctaatgcaggaaagtcgttttagcgtaaatctgaatcttacgttcggagaaagaatatcacgggcaaagctgaaataagggtaatgcaagaagcataacttcctgtgtgataaaacacttggtgttccactgagttcagtcgtagtgaaacacctgttcagtcgtagtgggaagtaccttcagtcgtaatgggaggtaccttcagtcgtagtgggaagtaccctcagtcgtagtgagaagataccccacctctgtaccgatgtgagctaattccggaaacaagcatcgcaacaggttaaagaacagaataatcagcaatataattcttcagcttcttccggtaaacctctccgataggaatacttctcttgtccaaagcaatcttgctgctttctatgatgcgtatgcagtctttgcgtataataaacgaacggtggacgcgtatgaactcatcggaaggcagtttctcttccatatacttcatcgtgcacaagctcagcacaggctttggctcgtccttgctataaatcttcacataatcacccaatccttcgatataggatatccgggatatatccaagcggaaaatccgattgtcggacttcacataaatcaccttgagcgtttccggttggcaagtttccgtctgagacttttcgggaagaacggtaagcggcattcccgtttcacctttcaagctgaaccaacgcgaagccttattcaccgcttcgaaaaaaaccggaaaactgacttcggatatcagatagtccaatgcgtccagccgaaagcactcggcggcataccggggagtatccgcaataaatatgacacgggtggacggagagagtagcttactgaattccatcccgttgatgccctccgtttcttcctgcccgattcctacaaagtaaaggtgtaccttattatcataataacccttcaaagcctcaataggattactgtactttccacacaaagcaagaaagggtgtcttggctatgaacgcttctagttgttcactcacctgtctgtcggcatgcaaaatagcacaagtcaaattcatcatcatttctcttatttttagaaattagacggacgactctcgggaaggctgcaacaggggaatagagaattagtatttcttcacttcatttaaacgattcgtaagggtttttatgaacatatcttccttcaccggaagcagcacggcacatttccccctcgttccgtacttcaccagcacatagcgcatcacggcgaaacgtcctattttcatggacgaggcccgctccacagagataatgtctttcagggatatttcctccgaacgggaaaagcgtccgtaaaaaaggaggagcctgtcgtctgtggtcagcgtatacgtagtatgaatgagtcgctcgatggcgatgacgagcaggagcatgaaaaggacggccatgacagcatgctgcatccacatggcataaataacgataatcgttgtcagcactaaaaacaaatattgccctatagcaatgcgggcatggaagatacgattcattttgttctgtttttgccgctaagataggtatttttgcggaacagcaggagttatccttccaatatctcccgcaatttatcacccaacagcttttcttcctccaatctcatcttccagcataccgacttacggaacatatacacctgctcggccggcaaacaaaacagttgctcaatctcatctaccgactgcccaacggcaatcagcatacagagcaattcctcatctttcgtagcaccgggaaccaacttctgcaccttctctataaagtctggataatgaaaaataaatatctcgcggaaaacggctccacgcgctccgcaaagcatatccttcgaagcatagggcgattcatcggaaatcatctctatcaaagccctactgatttctttcatacacaatcgtgacatcttttccaccttaatttattatttggttagtcttctatagactgcaaatttgcagaaactataagattaaaccataaataaccaatgtacaatccaatatacaaaaatgtatctctctcattatcaagctcaataaaacataaaaaaatagaggtagcacttatttcttttttaaaatggaattgtatctttgtccggcaaaccaaataaacctccaacttatgaagataaaaacatttatgttactcctcatgctgtcagccggagcctgtaccgtccccccacattcttcaggtaatcaggacacacagcaatggcagcagactatccaacaactgaacacattactgaaagagagaaagcatcaggcagccattgacgaaggcaaacaaaagatatccgaattgctggccgtagcagatcataccgagcctaaagatacaatggtcaaatatgcccggcagatggtcaacttcttctatttcagttatctgggcagcaagcaatttcgtcccggtatagaatatctggatagcctcaacgatgctccctttctgcaacaacattgcaaacacgaactgttatccgcgcgggcaggcttgcaccagatgtgcggagacaacgaggcagccatccggctggcagacgaatacttgcaattacccgaatacgatgatgccgaccgttacattccgcaagccgaaattgtcagcggagtttatatctattctggtaacgatattccccaagctatccgactcctggagaaagcgatggaatattaccatcagggagggaaattccacaatatgctccgcatcatatcccgactgggcatctattaccgcctgatcggtgaatacgaaaaagcggtagccactaatcaggaagctatcaacagctataatgatagcatagcccctcctaatatagtgatagcctatggcgaacaggccaacctctatgccgaactgggcatgtacgaccgtgccttagagctgaattccaaagcccaatactattcactcttgaaggacagcttcggactgggcgatctctatcgctatcgtgcagaaatattccgcagaatccaggataaagattccgtattctactatctggaccgagccgggaaaacttcagccgaacaggaaagctttaaaggtgtgtttgtcaacaaagtcctcacagtagatagctatctggactatccggactctgtacaaaaggcattacagcttgcagtaagcatttgtccggacagtacccgcatgcctcaatgggccaggtatgacctgaaccttcatttaggacgtgctctgctggagacaggtaaggcctcacaaggaatacctcttatagaaaaggcagcccgtggatttgcccggatggacatgatcggaaaagagaagaatgccaaccggatactgatggactactaccggaggatgagaatggacgatgccttcttccgttgctacgaccgagaccagctcttcgctgactccctgaatctggatgaaaagatacgtgccgttgccgccgccaatatccggtttgatgccgagcgtaaagagaaggaaaacaagttgctttccgcacaagtagagctgcaacaacatcagttgttcttcaatatatacatctccattgcactgttgttgttacttatcatttccattgcctattttatcactaagaggaaggcaaatcgcctgttattggaaaagcgtaaacaggaaatacaaaagttaatggcccgtcagcaagaactgaaccggcacaacgaactattgaccggacagatagagcaggcaatggccgccaacaacctgaacaccgtcagccaactgaccggacaaagtctgctcagtaaagaagacgaaaacaccttcagaaaatcatttgccgccatatatccgctttacttgcctaagttgcgggagaaatatccgcaactcacccgcaacgaggaactactggccatgctcatctgcatgaatcaaagtacggacgaaatagccttgataatgggcatcaaccggagtagcgtcaacatgatccgttcgcgtatgcgtaagaaaataaagcttacaaaagaggagtcactggatgaggttataaagcagtacttatcataaaatcgtgaattaatatacaggaaaagtacaagcaacccagttattttgtagctttgcagtacttaaacatacgaaatatgattaaagagttcgactttttagtaattggttccggtatagccggcatgagtttcgctctgaaagtggctcataaaggtaaggtagcactcatctgcaaaacggaactggaagaagccaataccttcttcgcccaagggggaattgcctcagtaaccaatacactggtagataacttcgacaagcacattgaagacaccatgattgcaggcgactggatcagtgaccgcgccgccgtggagaaagtggtgcgcgaggcccccggacaaatcaaagaactgatagactggggagtggacttcgacaagaatgataagggagacttcgacctccataaagaaggcggtcactccgaattccgcattctgcaccacaaagacaatacaggtgccgaaatacaggaaagccttatcagagccgtaaagacgcaccccaatatcgaaatatttaaccgccattttgccgtagaaatcatcacgcagcatcatatgggtatcatcgtaacccgccataccccgggcatcaagtgctacggagcgtatgtgctgaatgaagacacgggcgaagtggatactttcctttccaaagtgacgctgatggctacgggaggtgtaggtgctgtttaccgcaacaccaccaatccgctggttgctaccggagacggtattgccatggtctaccgtgccaaaggtttcgtacaggatatggagttcatccagttccaccccacagcgctttatcatccgggcgaccgtccctgtttcctgattacggaagcgatgcgcggatatggtgccgtattacgcaatatgggtggtgaagagtttatgcagaaatatgatccgcgtctttctcttgctccgcgtgatatcgtggcacgtgccatcgacagcgaaatgaagcaacgcggtgacgaccatgtatatctggacgtcacgcacaaagatccggaagaaaccaagaagcatttcccgaatatctacgaaaagtgcctcagcttaggtatcgatatcaccaaagactatatcccggtagctcctgccgcacactacctctgtggtggcatcaaggtaaacctaaacggagaatcttccatcaatcgcctgtatgccgtaggagaatgttcttgcacaggtcttcacggaggcaaccgtctagcttccaactctttgattgaagcggttgtctatgccgatgctgccgccaaacatgcgctaagcgtactcgaccgctatgagttcaaccacgaaataccggaatggaatgccgaaggaactgtgaccaacgaagagatggtgcttattactcagagcatgaaagaagtgaaccaaattatgggagcctatgtaggtatcgtacgaagcgacttgcgtctgaaacgtgcctgggtacgtttggatatgatatatgaggaaacggaagacctctttaaacgtagcaaggcatccagggcaatttgcgaactgcgcaacatggtcaatgtcggatatctgattacccgccaggctatagaacgcaaggaaagccggggattacactatacgattgattatccgcacgcaaaaaaataggataaggacacccccgttggcggaatgaattcatcccggaaaagaaaagaacaaaagtgattagtgattagcgccattcggtatattattttttagacgcggatgacgcggataacgcggatttaaaaggctgcgctataagaggtataaaaaaaatccgcgtcatccgcgttatccgcgtctaaaagattatttatcatttagttcataaccgaaaagaaagaaagtaattccgccaacgggttaaggagttatctcctttattaatgccgaacgcccggatgtttcttcaagcgaaacacccgggcgttctttatcatagaaataagaatttcttaatagttttctttcttcacttcgaagtaagcctgcggatgcaaacatgccgggcaaacttcaggagcttctttacctgtgaagatgaaaccgcaattacggcattgccatactacttcaccttctttagcgaatactgtagcattctcgatattgtttacgaaagccaggtatctttcttcatgacccttctcggcaattgaaatgttgcggtacatagcagcgatttcgtagaaaccttctttttccgctacgtcagcaaagtggggatagtccaaagaccattcttcgtgttcaccggcagcagcttctttcaggttatccagtgtggtgcttataacaccggcaggatagcttgctgtaatttctaccataccaccttccagatacttgaacatacgtttagcgtgttctttctcctgatcagccgtttcagtaaagatagcagcaatttgttcgtaaccttccttcttagctacacttgcaaaataagtgtaacgcattcttgcttgtgattctcctgcaaatgaggtcagcagattcttttctgtctgagttcccttaacacttttagccatagttctttttcttatttagttagtaaattacgtatcaattgtcgttagtcattcttattaacaacacaaaagtaaggattttgtttgatatttacacactttttattcatcggatttatctatacagacatagataacatctatttccgatacaatctattcaagcaataatgaactaaagccttaactgtccgctatctgataaacttccaacagtcgaagttaaatagctcatcttcgccgcctctaaagatgaagtaaacatcgtgcacgccttttactttatcaacctgagcctggaaagtcttccaactttccggaccacctgtattgccaataacgcaggtgccgatcagcgtaccttctttgtcatccaaacgaatttctatttgcccaccggaagaagacgatgcagcaactgcttcaaatgacttcgcccctttcttgaaatcgacattgcgcacacgaatataatccccgtcgtgaatagccgtaacatacatacctgcctcgctcttttctgtcttcaaaccctcactccaggctattgtctcggcttcaacgcgacggtaaggatcgagcttgcccaccggatctacgccttttgccgtccagaacggcagttgctgaattgtgccatccggattaaaggtcagtttctccacacaaatagagcgtcgttcatagtgctgggaaatcttggaaaaatggatatcataattgaagccaaagacatacgtattccctttatagtcaataatacccggatgattgccatttgatcttctgtcaccttccataatcatacctttatatacccagggaccagttggagagtcactcatcgaatatcccatgccttcgggacagcaggtggacgcgaacgccatgtaatacttattctttctcttgtaagcccacggcccttcttcatataaagtggggcgtttctgattccccttccgttcgccaaaagcctcatgtgtcatctgctcatgcactacttcaccatcacaggaaatcatatcttcattcaacttcacataatataaatccggatttccccaatacatataagcctgcccatcatcatcaatcagcaccgtaggatctatatcagcataactgtttttcactaatggctttccaatgggatctataaacggcccataaggactatcggcaaccagcacaccgatgcctatcccaccgggcatcggacaatacatatagaatttcccgttgcgttcaatacactgcggtgcccaggcaccattgtcataaggaacccatttgaagtctttcagcgaggcaaccactccgtgatctgtccaattcaccatatcagtcgaagtataaagtaaccattcgcgcataacaaagcctttcgcattgtcatcgtcgtgacttgaataaaggaatacagtatcattgtgcaccattggtgccggatcggctgtatatttagtctgaataatcggattgttagtctgtactttcaactttttcgagatcctgtacaaccctgcgccgtgataattgatgacaggtgagaactccgttcctgagaaattgccaagatcctgattcctccagatatcacgtactttggcagctccgccaaatcctaattctttcagatctacagtcactttccgattggcaggatgtgactcccggggttctttctgatctacatagaacagtgccagatatttatctccatttctgggatcatcagctgtccaggctataacgccatctttattataccattgcttgttgtttacagagttccgatgtacatagagcacttcttcattcgttatcagcgaattggtgaatttatcattatcaggtaagtgcccaccgaacatcagcggcgacttgaacatagcaaacaacgtcataaccatatattgttcatcccgcgtaaacttactcatacgggcgttacctcgaagatcaatatgccccaacggcaacatatcggcatcgggccatgcgccacgacctatataaggcgcccatttgggacatacttcaaactgatggtaaagatgcggccaattgtcccagaaatcatctaccgtacgccacatattagcatgccctacagcgtgatccgccttattcacatcggtttctcccggtgacatgctcaatacaatcggccgtccggtacggtcaatcgccttacgtatcatctctatttccgcctgatgataagggcgggaaagatcatcaatcttaacaaaatccactccccatgaagcatacagatcgaagattgaattataatattcctgcgctcccggtttgtcggctacaatcgtgtagttatctcccaaccaggggcatttccagtcggtagaataaatatcagcagccgttactccaccggcatctttcaccggcaatttcttctctacggcaagtgtgggtacaccgcgcatcagatggataccaaacttcaatcccttactgtggacatagtcagcaagaggcttaaatccatttccgttgccagctgatggaaaacggttcacggcaggcatataacggccgtattcatcgagcacatatttaggatctttgaagttatagtaaccggtagtctgattttccacaaaccagcggatatccacaacaatatactcccaaccgtagtctttcaggtgctccgccatataatcggcattagctttcacttccgcctcagtaacattagccccaaagcaatcccaactattccaacccataggcggtgtttctgcccatttatggaaatcagcgttccgattttgattattgttctgcgattgtaccccacaaaccgttaaaagggtaatgagaaataaagttattctcttgttcatgatatataatattacttgctcaatttacattcaatccgctattacttctttttctaccacaacttctttttcgtcagtgtatggatttacaatctcagctacttcggcggcagtcttcggcttcacagtaataccttctttggtctgctcaacatacgccatacgtccgtcgggtagataataaagatagtcaacgcacacgcttcggcgccctgtggcacccgattttccatctatggtaagtattgcattatgatagaacagatagctttgtcccttgaattcaatgattcccggatgtatggtaaagctattttctgccattcctgtcaagactccacgataggtccatggaccttccatacttggtgccgtggcataactaatggtttcacgccccttacccatcgatgcatacgtcagatagtaaagattttcacgcttatgaatccatggcccttccacaaatttcggcattttaagaatctctatgtttccgtccagttctgtcatattgggtttaagtttcactaagaagcaggtaccgttaccccagctcatccatggtgtgccgtcatcatccacaaaaacggtcggatcgatatcgttccaccatccacgaggaccgttaggagtcatatcatctgtaataagcggtgtaccccgagcatcgatgaaagggcctgtcggactatccgacactgcaacacccaccgttttactattatatggagcgcctgcttgtaccgttgtataataatagaactttccatctttctctataacctgagaagcccatgcttctccaactccccacgagaaatcggtaggcttcagcacacttccatgatcggtccatgttttcatatcttttgttgaataacacagccattcggttatgttaaagtcctgtccttcttcagcctcatcgtgacccacatagaggtacagtctaccattatgcaccataggtgccggatcagcggtaaacttatccgtcactatcggattactttccgaaataaacttcacttcattacttttctcgccgcaagcggataagatcagatataaactagcaataaaaagagtgtttctcatgataaaaacaattaagtaagtaattctatttttttatatcttcattgaaccggtgtaaatttataaagaagtaccccatgggccggaacattgatagacaatggcttccgtcctgtatccaaggtttttatatccttttgtctccaaaggtcacgcacagtttgtttacccgtaatattcagtttatcaaaatcacggaaagagatatcagccttttcccggtcgaaattacagaaaccaaccgccttactgccatcttctagttctttcacataaatacgtaattcccctattgaatatacacatgtggcttgtttacccaaaggatcctgattaacagctatcacctcattgttagtcagcaggctcagggtaaaatcatccattttctccaagtcacaacctatcagaagcggtgcagagaataagctccaaagactgaaatggagatactgttcatcaggtttaagcttggtttggtgaggatttccccaacctacaatacctagaaccagcatgtccggatcattccagttaccgggtttcgcccatgcagctgcacggtcctgagaaagagcgatgccttttacactttcccaagtatcagtgatatcgttagtcgtacgccagcactggcctccaacagcatctccccatttccagacatcccccatgccatactgacacaggttataaacaatgtccctgggctgctgacgcaaataatcccccataatcttaaatggctttctaccggcaattgaatcccctcccccttgaaacgccaaggaagacacactgtaaggatccttatctaaatcacggtcaagaactcccccgtaactgcaccagtcatatttcaaataatcaagcccccatttaccatacatatcagcatcttgcttttcataaccataactgcctacgcaacctccgcaagtccacggaccgggtgaagaataaatacccactttcagtccaagtgaatgtatgtagtccgttaaccctttcatatcagggaattgggcattaggtataatattaccctgatcgtcacgcaaccgtccacctctggtccggtcgttgggatctctgtgatgttgccatgaatcatctatattgatataagtccagccataattcactaaaccactttcaatcatagctcttgccgcttgtttcactttctcagctgagacttcgtgtccgaagcagttccaactgttccatcccatcggcggagtaagagcaattctgtcaccacactcaatacgaagttttctttctgccgttcctttcacatttttcgcctgtaaaaccacttcaaatgtaccagccttggttagcttacccgtaatcagacccgtttccgggtgaatctccaatcctgccggtaatccctccgctgcaaatctcatcggacgatctcctgtagccgctatctgatattggaatggcgaaccgggacgcactccaaacacagaggccccattaattctcggcgtcgcgagagcgggtggagtcagtatataaggttccgtagcaataaatttaagtgtaggaaaactcttctttccttttgatattatctttgcatccgcccagtcggcatggtcatagtaaggcccgtcaccaccatcagcaactatcagctcaagccttttgactccatccaatgaaaccgaacataatttaggcgcatctcctgcctttacaatcccactggaccaaagcctggctccatctcctattacaataaattcggcagacgttttatgctcgatgatctcatcatccagccctacctgagccgtaaatgatacggctttgccatccaattgaattgctatctcactgactgaatgagtacctactccacgttcaaacgtttgtcctccgattgtcaaggttttgccatcaaccgatttatttttcatagctactccattaccttgagtcatagctgtcagatccaaatcatcaagccacacagtatgggattgaccacatcctgtagtaatggacgctattacaaaccctacgagggccaaaaacgacttcatattattcttcatattttaagatatttccaaatcattgcctcaagaaacactacagtgatatcaccattgactttccctcatagacaatgctcttattcacttttgactgataaattccagtgcctgactccggcgttacaattacaatattgaagtccattctttccttcattcctgcaaacgaaccttttctgtcactgatagtaagtgtcttatccgaatcattccacttcagatcaaacgtgcagaactgacctttctcataattgtaattgattccttcgtcttcataaacagaataagaaccatcagctcccggataaatacggatttcccacggttgttccgtctcctccgatgcatattgcttctgaggtcccaacggcaatatagaacccgctttcacaaataaaggagtcttcataagatccacatttacatctgtgaatatacctcccttatgaggtgtgccattccagaaatctacccagccggccgaacattccggaagataaaccttcatccggttaacaccactttctaccaccggagccaccaatatagaaggtccgaacatgaactgatagttttgttccagtgcaaaacggtcttcagggaaatccatcaccaacggacgcatcaaagtagaaccattgaatgaaaccgcagcattttgtgaatagatataaggaagaagcctataacgtaaatccagatatcgggcaatgatatgttccaccttttctccatatcgccacggctcggtattactcatataaccatgcacacgcatcagtgggaaaaatgttcctgcctgtatccagcggatcaactgttcatggtatccggtatttgtatactggtcgcccggacggaaaaaaccacctgcatcataagtccaccaaggcagccctgtcgccatctgccccaatccccccacgatttgccgacgtaaggtttcccagtcatgtcctacgtctcccgaccatgtggcggccgcataacgttgcattcctgaaaatccactgcgagtaaaaatcatagctcgcctgtcaggatcatcctgacgtaaaccttcatagattgtcttgctgacatacatcggatatacattccggtacacctctcccggagtttgttcacgattaatgcgacggttctgcaaatcatcattctccggttcagtagcatcctgccaccaagcatcaataccatatttcaataatccggtacggaaattctgccaatagaaagccgccgcgtccggattgaaaaagtcaatccagtcactgcccggtatgtaatatcccttttccttggcttgttttcccacttcggactgagcatcgattttagaccatacagagatcatcagacgcacatccatctcatgaagttccttcatcatacttcccggatcaggatatctgtcttcatcaaacttcatggcattccagccatattttccccaatattgccagtcctgtacaatcatatcgataggcaatttccgttccctgaattcacgggcattctccagcaattctgcttgagtattataacgctcccgacaatgtatatatcccagactccacaaaggcatcatgggggcaggtccggtcagttcccgatagctggcgatcacttcatctccgttaccagcgaaaaccgtataatctaacatttgggcaaccggagaacggaatacagtctcttctgaaacaggacgccaatataacacaggcttatcattacgttcaccttgtacttctatatcgtgcttaccggctgtcagctccacaatggcagaagtagtgggaggcaaccataaattattgacatccacaatcttttgtccgtcaataaccagataatatttccgtgccattcgctgtcccacatccagcaacaaagaataactaccggagcgaggtacatccaccgaagctgtaaacgaataggtttgtctggtttcccttacatttccactcgtaccggtggtatttaccgtaacagcctctccacttgcattggcgggagtcaactccacaaattgatctgccggattgaaatccgtcaatccatagttgttccacagcaacccatagcctttacttgaaagaataaaaggaatagaaatctgtgtattcacctgcgtcaagcgccgtgtcaacccccggatatttagataaccatcctgaaactgccctgtaccatatatgtattcatctttcggagaaacaaaacgctgttccacttgataggtaggttcattctgtacagaagaaaccttcataaaacgtccgccaactttctcttgaagaatgatacgcttattcgcatctttaaaagtcaagacttccgtacctttgtcgaattccactgaaattccatccagagataaaaccagcgattgcttatcttctgtaacttcatattcaggaacaggaagtttttctgtatagataagctcttccataggcgccgaacccggttgggaaaactgtacccggacagcattctgatttaatggtatcagcgaaagtaatccctgtttcagttcaagaacgactttctctttttgctttgaaacacatgccgtattcaacaaagcaacacagaacaacaggatgattcctgttgttctgatatacttccttttattcctcatagtatttagtacaagttatttagaaaacatccaataatcaaaatacataagattggtagcaggccgcccctttactacaaaatacaaatcatgtactcctgtcacttttgtaatgtcaatagtccgtaagtcccaacgatcacttcctcctgtacgcggtaccttcattgtccctatcagttgcccatcaacaccatccagacggatttccagatttacgggatcattatgtgtagttcctattctggcactgaacttcgttgcaccggttgccttgaaatctacaccgcgaacacaagtataactgccattcttcattgccgtaacaaaaacacccacctgatcatttttgaaagacttgaacccttcagaaaaagcaatagtctccgcttccgtttttacatacggattcagtgtcgtaatcccttttgtaatgccctctgtcatcttcagttgaggaatagatccgtctttgttgaatttaagctcttccacacataccgaacggttgaatccaccacctccgggcaactgtccgttatgatagaaaaagtaagttttacccttgaaatcaataactcccgggtgaatggtaaacgctccgccaccggcaggcatcactactccaccgtatttccacggacctgtaggagtatcgctggttgagtatccgatatgctcgggcagcggacctcccggccagaataaataatacttcttatcccgcttataaagccagggaccttcttcatacagagtggctctctgggcatcgccttcgcgtttaccaaacgattccgttaccaaaggtacacgtacaatatccccactataagaaatcatatcttcattcaacttcacataatacaggttggggtttccccaatacaaataagcctgtccgtcatcatcaataaaaacagtcggatcaatgtctccccattcactctggaccagtggtttcccaagcggatcataaaagggcccgtaaggactgtcagctaccgccacaccgattgcacctctgttgtttatattcgaaatcatgggtacgtacatataaaacttaccatctctctcaatgcattgtggagcccatgcatccccttttgcccaactaaaatcagtatatgataacacagcgccatgatccgtccagttcaccatatcactggtcgtatacaagcgccagtcgttcatcgtaaaccaggtagaattatcctcatcatgggtagtataaagatatactttatcattatataccattggggccggatcagccgtataatttgtctgaatgattggattttgtgctaatcccgaagtactcaccaccaccaatagcgatgaaaggaataaagatttcattttatccatattgcttttttagtttgattattctacaattaatattccaccattgcaaggaattgccaattgtaactcctgtttcttatttacctttatctgttttacatttccttgcaattcttcattatcagtaaataccctcacttgatcaccaggcataaacatcggtaaagcaatcttcaactttacggtctctttctgcgcattaactcctgcaacataccatttatctccatgcctgcgtgccataactacatatttaccgggatagccatcaataaagcgtacttcatcccacgtagtggggacttctttcatgaagcctatcgcccattccggagcatctgtcagattgttcggagccaaggcaaaatgttgtaccggactttggaacaatactgcagtagctaaagcaaacacatcagaagtcatacgccggcttccgcgtggagcattatccgcattataatatttattcagtgcactgccgccaaagtccatgctacccaccgtattacgaataaatggatgcagacaggcattgaaagcttcattgtcacaacttccctgagagaaatgcaggttctcactggccaatacagcttcactcgacgcaaagttaggatacatacgttcccaaccgcgaggcaaagtacacccgtggaaaatcaccagtaacccatattcattggcatcagcaagaatatcttcatacagctgcatggtgacttgcttatcaccaccaaagaagtcaacctttataccacgtattccaatgctttgcatccatttcatctccttgcgtcgggctatcgcattgtccatgataccacgcggtgattgtggggcatcattccaatatccattagaattataccacagataaagccccactcctttttccgcaccatacttagccagcttttcaactttgtcatagcctatttgcgtatcccacaatgcatctaccaatacagactggtatcccattgccgcagagaaatcaatataacgtaattgctcttcatacttcgtacttccatccataccaataatccagctccaggaacctctgccgtattcatattttccggatgcttcatacagtggctttacaacatcaaaggaaactgtcgtttcaacaatcggagccaaagtttcacccaaagtgatcgttctccaaggcgtttctcccggcagggcaagtccaggtgcagttgtaccatttccattcatttcaccctcctgagggaaaccgattgtatacaagccattttcatgtcccagtaagcgacttccacaatatttgctatctacacccgtttccgaaataagtatccatcccttatcactattacggaacagacaaggaaaagtataaccttcaccccatccatttttgcccatagcatcatctgctttatacggtgtctcataactgggagaagtacgggcaaatcctcccataggtttgctttgcggacacaaaaaagtcgtactcccatcaggaagcacaaaacttgtcgcctcctctttcacaatgcaggataaagtattcttttgaggatacattttatacttgaaagcaacatcccggtcgcttacacgaaatataacatcgtaaatcatcttaccttgctgactaaaccggtatacaccctctgtggctacatagtgcacattactctgctttatattaggcaatgtataggtctcgtcaattctatttgactgaacatcgtgttccaaagacatttcccgggaaaaatcacctatattcgtaataagccccaaagaagaagaattgataaaaggagtatccttataattgatgcgataggaaggttgtccattcttatcagagatggttactactattttcccatccggacttgctatctgtttttcctccgcttttattgtgaagcaaatcaataatgccgttataactaaaaaatatttcatgaatatcaagatattatttattaatagtcaccctatcattagccctctcgtagtcaaagtaatcaacgtcgacataacctcccaacgattttgttgcatagttaaagatggcaaacttacttcccataaacagttttgtataatcaaaacgcattttgaaatccgttccaatcttcttccattccttattgtccaggctgtaatagaaagtagcaatatcccgctttggagtaaaatcaccttctatacgcaaataaatgatattctgattaagttctacctgttccttttcctctacatccacacttgcgatagctttatttggagtattatcaaagttgactacattggtagacattacaagtcgttttgcatctccctccttcaccacagacaaaagtccggaatgtccattgaatgcactaaaacctgccacatcaccatccttcatattcgaaatatcaagcgagacagtagccttacatttcggtccctccatacgctgcgtaattgtattcggagcaagatacagattatcaaccacccggctggtttctaaacgtaaatatcccggccgttctgtgagcgaccacttatcatccaccgggttgtgattccattgccaatagagtgaaagtttctctccgttgaaatcatcacttccaagtattcctttggtattttcagtcggatatatctctttttccatcgtcaaaggcacatgtccattttcatctcccagcatcggccatccgtctacccaacggcagggcataagagtaggtacacggcctattcctccgcggtcttgaaaaataaccccataccagtctccttcttccgagtcaataatacaaccttgacctactcctccataaccatcaaaatcatgctccaggataaccttcttctcataaggccctgttatcttgtctgcacgataacatacttccctgcgtacccgaccggggatactccaatccatggaaatcatcaacaaataatactttccgttatgtttcacaacctggcttccttccagcaagccctgttcatcagcatcccgttcaaaaatcttcatactgactccatcgggtttcacatccgacaagtcactcttcaactccttcagctcaccggttccatagaatacatatactcggccgtcatcatcaaaaaacaaagaggcatcatgaaaatgctgtgttcttgataataactcccacttccctgccggatcttccgccgtgaatatatacgaccgatagggtacatcgtttggcgagaacaatacatagaatttcccattatgatagcgtatggaagatgcccattgtccgcgtccataaacagttccaccaatcaagtcatactttgagttatcagtcagcttatcgaagacatagctcactgtttcccaattcaccaagtcttttgatctcataacaggtccaccgggcattaaatgcatagtggtacttatcatataatagtactctcctgcacgcgtaacagacatatccggtacatcagcataaattacaggattacgatacgtccccttcaccgacgtttccgaaccggaacaccccatcagtaatgaagcaacagtcagccatgttaacatcatctttttcatgatactcttagtctttaaaatctatatttccaaataacactagaatttcacactaactcttttccctttgtagtcaacaactttccgagttccgtcttgaagtacgattgtgaactttctattatttaacattcccttgtatgcaccttttcgagcccctatgatcaattggcgtgatgcatcattccatacgacaggaatctctgtatatgctccctgctcataattataattatcaaattcatcctcataaagaacaaaggaaccattggcaccggcatataccctcaattcaagattatcccacggtttctccgttgcatactgcactttaggccccattggaataatactaccagctttgacatacaaaggaatgacatcaatagtcgtttccttttctatttcttgtccaccgtcatacttctcattcgtccagaaatcataccaggtagcacccgccggtaaatatacctttgcagacttagcctgcataaagtctaccggagctttattctcaaacttctgaacgttattcttatcccaaccatcattttcttttagttttaccagcttctcctgagtatattgcgcattaactatcggtgctaccaaaatggatttaccgaacatatactggtcttttatatcccatactttcttgtcagcagcaaagtccatcaccaacgcacgcataaagctcgactgtcgctcggtcacttcccatgaagtggaatagatgtagggcaacaatgcatagcgcagatgaatcattttttcaatagcatcatatattgattcgccttttttcccgaattgataaatctccctcggtgtatcagccccatgtgaacgcatcatcggcgtaaacgtaccgaattgcagccaacgcacatacagttcctgatacatcggattcttgggggcacttccgtcattccaactcttattatagtttccggcaaagaagccaccaatatctgaattgaagttaggatttccggtaagagtaaaattcaagcctgccggaatctgattgcgcagtgattcccaagaagaaccgatatctcccgaccatacattggctccgtaacgttgctgtccggcaaaaacagaacgtgtaagaataaagacgcgtttatctgaagttacggcacgctgattatcataaacgccacccaccgtcaacagcggataagcattacgcaccttgcggaacgaccccagataggtcttcgtatcaaaatcctccggcttccaatcgaaatggtcaggttctgtagaatccatccaccagccgtccatacccaacttgaagataccttcattcaggtatttccaatagatatcacgggctttcggattataggcatcgtatacgcgtactccggaaggatattccatattgggcggccaagtatcgagtcccgactggggccatgtagaaaagttaaacagcataccattcttgtccaattccctgtaaggcttggtcatcggtccaaacgaagaccagatagaaatcaacatatgcgcattcattccatgcacatcatcaatcatctttttaggatcgctgaacgaagggttcttaaagtccatagcattccacaaatagttgtgtccccagtattgccaatcctgaatgattccatcaagaggcacacctaactcacggtatttccgtaccactcccaccgtctcttcttggctcttatagcgttccttactttggaaataaccgtaagtccagagggggaacatgggaacctgtccggtcagtgcacgcatctgtgcaactacgccatcggcatctccaccatacatgaaataatagtcgatgcaatctcccacttcagactggaaagaggttccttccggtttatcggcaaaattggttggtgaatagttatcccagaaaagaccgtatcctttcacggactgcacaaatggaaccacgtcttccacattgccctgtacaagacgtttagtctgattacgttgcgacatctttccattctggagaatgcccaacccataaagaggctcatccttatctaaaagaaacgtttgcttaacagtgaacgtttttgtgcctgcatcattaaaatcggtaaactccggctttccattttcactgagcaacggctctcctttcgcattaaagaaagacacaacaccagattccaaattaagagcaacccccatttcactacttttcaggcttacaatattgccttcctgagtaacggcagtcttcaccttctgaggagtttctattacagaaagactctcctttgtatacttccacccattaggagattttagtattcttacaattgacggagtatagaattgtaattctacatctacagaattaatggtcgccttaattccctcaggaacttgctgataatcttgccctgtaagcgggatacaacaacacagcgccattaatataaatacacttttaattggtttcatggtacttattacatttaatgattaaaactcgcattccataactttgcacgatacaaaaatagctgcatatcttttacacctttttcaatattagatatttgactttcaatattagataaataaatggctatcaatcagaatattccatcaaataaccataataataagcttgattgccatcaattgtatattcatccaatgttcttgccccccaagaatcagcacctcctacgccatgaatattcaaatcaatattcacattcacataatcgcgtacgggtagttcataagcatgcctgttcttttccaaatcttcctcaccatacggccacacacgaaagcagagcggttgcaaacctgtcacttttatcgttcggccctccttatcattcagtgaaaaccaacggacatcacatctgtttgcattatcctgtggaaaagcataatccgtgacaaaactattgagatccgttgcatagcaaccgactaaagcagccgttttcctatccggatagttctcaaattcaccacgaccataccatttgacataatccatgaaagaaggtaaacgcatcctcattccaaacttaggcattaatggaatcttttctttttccggtttatagaaagcttcaacttgtatctttccgctcccatttacagtatagcgcaattgataagcggcacctaccacaggcaacgacatactaacctccactacagccagcccattcttcacagaataatccacaccttcgactacacgttcaccagcagcgtttctccatattcctaaacggttattataaccattattcatctgattactgttcgccggtttccagaaataaggttccaaaggagcatatagaatttccgttccatcatttttccaacttgtcaaagcaccggatttcacatctacaatgaaacaattcaatccagccattatctcaatagcaaccggtgacgcattcacttcaacacttcccccttccgaaacaatagactccggtttggccatattcaccaaaaattgctccttactaataacaaagcctttttcagcccagcatgtactctgtttcagcttggcaaatacattcaggaaaagctcacccgatcccgtgaaagcgggaatatccaaatgatctccggctacaagcggtacttctcccgactttacaagttcaccattctgcaaccattcatacccataatcgaactcatccaaagccgtaaattcatacttattggtgagacgtaccttattcggcccttcaagtgaaaaaccaatattctgatacactttctgaacctgataatagtgtgggtgaggaacacggtcagccccaattaaaccattaaaacagaaatccccattattaggaaaatcaccgaaatctcctccataagcccagaattcaccttccttcaatagcaaagaacctgaattctccactcctttcttatatcccggatttatcttctttgcaattccctgatcgacccaatcccaaatagccgcacctgaaacgtggtcattagcctcaatgacatcccaatactcctgcaaattgcctactgaatttcccatggcatgagcatactcacgcataaagataggtttatcacgtttttcccgggcatattccttaaactttccgggagtataataagaaggatcattaaaagccgatacagaaagatcggtatcgctaaaaataatacgtgaagcatctatggcctgtattgtatctgccatagcctgcatattgcgtccggcacctccttcattacccaaagaccaaaagaccacacaagggtgattcttatctcgttgtaccaatgcaagtgccctgtctacatgcgctaacgtccattccgggttatcaccaagtattttattacctaaaccataatcatgactttcctgattagcctcatccatcacatagaaaccatatctgtcacacaattcataaaacaacggggaattaggatagtgtgcagtacggatcatattaatattggcttgtttcatcagtctcaaatccttttccatagtctccctgtccacaagtcggccggtgcgtggatgatgttcatggcgattcactcccttcaatttaacaggctgtccattaaacttaaatacatttccatcaatctcgcatttccatattcctatatgtgattgaaactcctcaaccaccttcttaccatcgtaaagcctaatttcaacatcatacaagtttggcttttccgccgaccatagcttcggattttccacaacagatgacaaagtatagcagcctgcggatgttgccggcaaattctttacaggagtgattaaccgtttcacaaatctctcctcattccgattcttcccttttaacagaacctcaagactcagttttcccgatttactgtccaacaagtttcttaaccaaacttttgccttaaaaccggcagacgaaaaatcatctgccagatcggtagtcagcgaatagtcttttatatggattttagggcgtacccataactctaccgggcgataaatcccactaaaacgccacatatcctgatcttccagatagctgccatccgaccaacggtatacctctaccgccagacggttttgcccctcatttacatatccggtaatatcaaactccgccggagccatagaattctggctatatcctacttttttcccgttaatccatacatacatagccgacttaactccttcgaagtgcagatacaattgcttatctttcatatcctccgaaacatcaaaagttgtcacataagaccccaccggattgcgattctcataactaaaaaaatgcttgggaggttctcctgtcacttttggctggtctttcttaaaaggatatgtccaattggtataaataggttttccatagccttgtaactgccatgtccccggtacagaaatgttatcccagccactcacatcaaaattatttttataaaagtccgacggccgactttgcggatcgggagaccagtaaaacttccacctcccgttcaaagacacaatctcttcacacgaggatttcccggacggcaacgtcaatgtactgtgatactcctctttattgatacctactacgcgaggattttcccaatcaggcacttgctgtgcacgcatctgaaaggtaaaacaaacagttaacagaaatatataaattctcatactcatcattttataacagctacaaatcctccacgcggcaaacattttatttccaaattcatttcgtcttctgacaaaggaagattttcttcaatagcaaagcttctgtcatctgtaccgtcctcaaataaagttatcttcttaccggcaacggaaaggtctttcagcgaaaaacaaagggttctcggttcattggttccattaatccctgcaatataccatacatcccctttgcgccgtgccataacaacctccatacccggatagccggtcaaaagcttcgtatcatcccaggctgccggcaaatccgataataacttctttacaggttccggcatatcatagtaaaccgaaggcctgtctggcatatgctgcaaggccgactcaaaaattaccggtaatgccaattcatgaccgtaagaggtgatatgcggatgctgagaatcagagaaagtgcccggagtataatccattggacctacaacatttctcgtaaagggtaaggtagcattgtgttccgcagcccgattcgtcaaaaccggagtgttattgtaccattccgccccatatactccctccaccgacatcatgtgaggatacgtacgttgccatccgcgaggaatagtggcaccatgaaagttaagcatcaatttatacttcacggcatcttcaagcagatctatataataattcattgtagaaacactatcacccgagaagaagtcaactttaatgccggcaactcccatatcgcttaaccatttatattccttttccctgtctgcctttttattcagacgaaagagaggaccgggacctatccaattcgtgctcgaattataccagaccaaaggtttaacaccttgactcaaagcatatttcacggcatcttggatatttcccccatttctcattacatcccattcccaatcgatcaaatcataaggccacttcatcttgactgccaggtcaatgtattccttcacgatttgataatcttgagaaccatggttgtatgcccaataaatccatgacaccattccgggttttatccattccgtatcctccaccttagaagggtcagacacatccgtcaccagtgtagactcagtaatatcagctaaagaaccagcaataagcaatcgccatggagactcccacacaccgctaaaagcaagttttttatcgcccaatcgcacctgataattatcgcgattatccccattatacagaaaagagccacaatgcccccgtctgatatttgcctccgtaatcagcacaaacacagaatcccgtggctctataagcgccggatatccccaaaggtcaacctccgggcgattggcaagcttaccatcagtagacagcgggaaaaacttttcataacccggatcatattgttgtatccatcttttactcccttgtggcaaggcgtacgccgtatattcattaatgatatgttcttcatccgaaatagccttaagcccatacttaaatgcaatcccatcgttgtacaccctaaacgttacctccaaagtttgcccttcatcgttttccagagaataaactcgttcggaagcctcattcacacaatggctccgttttcccgtaatcatcctataatcatcaatcacggatttcggttccgaaactgatttcagtcttaagttaccggcaaacttttgcgcatctgtttccaatcccagttcggaacgaaaaagaatactatctcccttgtaatgcacaacgaaagcggcttttccataatcgccatcctttgttgtcactacaccaacctttaaggttccgtcaggagaaatagtatcaaatgttgctgagtggcacgaactgattataacagctattacaatcccccatgtttttctaagtaagttcataaacatacatatttagttagtacaacgacccttattttgttaacccaacaaaagtagggaaatacctctgtacatatttgcaattttagataatccatttgtgattttagataatatcgtccttctatcccactgtaaagcaagaaaagcccgaagcatatttctatcgcttcgagcttttcaatcatttgttattcctttcccaaaaactatttaccattaaattcctatcaaaataaatgcaaaatttaacctctaactttatctaacttaattttttcctaccactaattcactgcattttgaaatacagcgatattatatcctctgatgtcatgcgaccatttatttatccattaccattgattcgggaaccaacaatcgtactgcaaaaatccctcctgctgtagtatccggcttactctggaacctaaccgtaattttatctttcgatttcagcaaagtggccggaatattatattccacattacagaacaagtctttcttccatttcccgacaatattttccgtagcgatagtttgaccgtcaaccagaatatcaaagctcctgctaccagactcagctccccaataacggaccatcaatgagagattctcattccctttcgtggtcagtgtatattcgaaatatcccccattacgggcatcacgccaagcctcaccggcatgtactccacgatgtgaatcctgagttttcattgcatgatccgactcaggctgttgctcacccgatgataccatatccacagtacgcttgtcgagtatcattctcccacgttcttcagcttccacagcttgtttatattccctgaatgcgggctcggacattgataaccaatacatcatatagcggctatcatgaattccatagaatggttcaagtatcagattcttatatttttcctgagtaaacaaaccgggaacagtaaaactaaaagattttccttcgacaggcctcatactattcaatttattcagaatatcacttctttcccctataatataaggtgcgtcaaaaagtgaaaccagcgatccgtgcgcaatatgctcccaacgcccgtctccggcaattaatccgggcatattttccgttcccgtcctcgcacctaacaaaatagggccacgcatgatcgagatagcgttaggtacattgggcagttcttcaattctcacggtcatcggagtctttacttctaccacatctccttttgaccattggcgatcaatggctatataagagcccggctgcgcactttttgcataatcaaccccgttgcagaccacctgcatttttccctgctccacccacgatggataacgtatcagcagtttaaactgtgttgctttggaaggattaacagtcagcgtagtcccctcttcattcggaaagtccgtttcttgtgcaatcttaatcttcttctctttccagttcaattcagaaggtataaaaagattcacatacagagcattatccgccgtatcatgggtataaataaactgcccgtatttaccatgattctccataccggtacccacacaacaccacattgcttttcccggtgccgaataaacacgataatgcgaggggcaagcaggtgtgaaatatacatatcccccatgttcaggatgctgggtagaaaggatatgattatacatggcacgttcataaaaatcggcatattccactttgggatgcatgcggaacaaaccctcggtaagtttcagcatattgttagtattacacgactccggtccctgacgttcgtgcatataatcggaacattttcctgattcgggaaaatgctcaccccgactgtttccgcctaatgacaaagagcgatgagaaactacagtctcccagaaaaattcagcagcagtcataaaatcattgtaatccggagcgattttcgaattaagttcagccacacgctgatatcccacggctttaggcacttgcgtattggcatgcttgttatccagattatcaatgcgccttgccatactgtcgaaaatctgcttatgtgagaagcgtttcgccgtatcgaggtatttgggattgccggtcatttgccaggcatccgcatatacttcattcataccgccgaattcattatccagcatacgctccatttgccggtcgtctaaattagaaataacgtcaacgccccagtcacaaaacttcaggaagatctttttcgctttttcatttttaccgtaaagccaggcatcccgcagtccggcataggttttatgcatattataccaggcaacccaatagttccatacaatgcctacattcccttttcttatttcttctgcaaacttcttactgtttggaaaaccgcaaatagagccgtcaccattagcctgctgtacacgtgtaaattcagaaaccatataatccatgcgttttttgcattccagattacctgtagcggcataatgaatggctaaagcagtcagatagtgcccaccgatatgcccgtcaagaccgtctttttcccagttaccatacgtttccgctttcttaggtaatcctgcttcacgcaggaaaggagccagcagacgatcggtatcatactgaagcagcaccttaacgttcaaatcacaggcatgcttaaaaggacctgcggttattctcacatctcccagaggaaaagtgttcggataaagcgcgtcctgcgcagtaaggcttgtaaaactaatcgttatcagtaacaatagaatccattttttcttcatttcctaatccttgatttatttccacttataatcatactttcatatgatctgacacaatgcaaaaataggcctattatgttatagtcattgtcaatttcagacatttgattttagatttcagataaaacttctttcgtagcctcaccgcaactctaccgtacttactccgtacatttttcaaaagatgtaacatcatgaaagaaacgtgtaacatgattattgggctgagaaaacagaatgccgtatgtttgcgacataaaattcagaaccatgaaaaacattgcaatcatcttagtatgcgcattggcgtattgcttcggggtacaggcacaaagtagtatcccccactcccaggccggtttcgacgtagaaaaaacaggaatagcccaagggaaaatagaaacggtggcttataactctaaaactgtcggtacgaagcggaaagcattggtttatacccctcccggcttcagcaaaagcaagaaataccccgtactttatcttctgcatggtatcggtggcgatgaacaggagtggttcaataatggcaaaccacaagtcattctcgataacctgtatgccgaaggcaaactaacgccgatgatcgtagtactccccaacggaagggccataaaagatgaccgcgctacgggcaatatcatggctccggataaagtagaaggcttcgccatttttgaaaaagatctgttgaacgacctgattccctttattgaaaagacatatcctgtaatcaagaatcgagagagcagagccatcgcaggcctgtcaatgggtggcgggcaatctctaaactttggtctgggaaatctagataaattcgcctgggtaggaggattctcatccgctcccaacaccaaagcacccgaagtgcttgtcccgaatccggaagctaccaaacagcaactgaaactgttgtggatatcctgcggagataatgacaacctaatgtccttcagcgagcgtactcacctctacctgcaacagcatcggattccccacatcttctatgtggagcccggaggccacgacttcaatgtatggaaaaacgacctctacctgttctctcaattgctattcaagcctgtagatacatcaagcttcgataaatacggccttcacgggacacgcgcggaatccaacgtacggaattccaaatatccgcaactgacagcagaccaccgcgctatttttcgcataaaagccccggatgcacagaaagtacagatagacctaggacggaaatatgatatggtcagacaggaagggggcatctgggaaacggtaaccgattctttgggtgaaggtttccattactattcactattgattgacggagtggcggtagccgatcccggaagtgaaactttctatggcatgggacgcatggcaagcggcattgaagttcctttcaaaggtggagaatattatgcactgaaggatgtgccgcacggtgatatccgcatgaaacgttactactcggaagtaagccgttcgtggagacgcttctttgtatatacgcctgccggatatgacacccacacgactgaaaaatatcctgttttatatctgctgcatggtggtggagaagatgaacgcggctgggctacgcaaggtaaaacggacctgataatggacaacctgatcgctgagggaaaggctaaaccgatgttgataataatgctagacggcaatatggcttctgccggattcaatgccggtgccttgaaagcattcgaagccgagctgatgcaggctatcattccatttgtagaaaagaactatcgcgtcagaaaagaaccggacagccgcgcacttgcaggcctctctatgggaggcatacagacactttatgccggcctataccatacagatatgttcgctcatctcggtgtattcagttccggatggctacctttctaccagaaaatcgcagatgaccaatacgagtttatcagcaagaataaagcagcgatagactctcaactcagattactctggattgccatgggaggtaaagaagatatagcctatcagaactgtcagaatatgcttaaagagtttgatacgctaaaactgaagtatacatattccgaatacccgggtggacacacctggccggtatggaggaataatctgtatcattttgcacaattgttattcaacaaatgacaaaagacacattagaaaacaatctatcttcttactcaatacttacaaggattatcacaaatatatctgattttgaaattcaaatatctaatatcaaaagccactcatccttcgatagcttacttttgtcgcatggtgtcttattgaacaaataataacataaatatttacgtataaaaaagattagattggttatgaaaagaattcaagtcgttttattattgtttgctattgtccctatgtttgcaataacaaaagcaatagccggtaataataatcagcccaaaacgtccaagtttgtttatcatggagccggtaatccgtatctaccgttatgggaacatttgccggacggagaaccccgtgtttttgaagatcccgacaatccgggaaaatttcgcgcttacatcatcggttcgcacgatgtccgcttcggcagttattgcgggccggacatcagaatgtggtcggcacctgtagaagatttatcaagttggcgtgacgaagggcctatctttacctatcaggtagaaggacaatgggatgtgatgtacgctcccgaccttgttgaagtgaaaaggaaggacggcacaaaagaatattatctgtacccgcatagccgcggtagagacagagaagcgatggttgccaaaggaagccgccccgacgggccttttacccccatcaacctgactgctgatggtacaaaaactctgcccggaagtattctgggattcgacccatcggtatatatcgaatatattacggatccgaacgatccggattatgaaatcggattcagagcctatggatactggggattccaacgttcattagccgctcaactggaccaaaacaccatgtattccgtacgcccgggaacagaggttattccttatttcatgccggcaggcgttcgcagaggtaacaatcgcggtccgaagaatatttcatatccgcatatctttcccggagaggacctcgaagcattcaacttctttgaagcttcatccatacgtaagatcggaaacaaatacgtgaccatctatagcggacattcaggtcccgactatggattgggcagttccaactccactttgcgttacgcttatggtgattctccactgggtccatggaaaagcggcggcgttctggtcgattcgcgtgccccggtgttaaatcaggatggttcacacctgcaaacaactaatgcaggacacaatacacacggaagtatagaactcattaacggacaatggtatgtattctatcaccgtccgccacggggattcggcaacgcacgccagtcaatggtagccccaatccatgtagaatgggataagaaaccggtgtcggaaggcggtaaagtttccatcagagcctacgatccgtatgcaaaaaataaaatctggacagccaaagacagccaaggaaatgaatacaaaggagcagaagtaacctcggaaggattccatatattcggccttgatccctatcagtattattccgcgggatttgcatgttatctctccgacggacgtatccagcaggattcatgggacatctgggataatcatgcccccatcacaaacgtgaaaaacggcaatataataggatataaatacttcggcttcggcggattgaataaagacaaactgggtttgaaagctttcgaaggaaccaaaaagggaaaccaaacagccttcaacctcttccttacacccaaaacatcaaaaacgtttaaagtgaacgtttggttagatggtccgtgggataacgaaacctggaaagggacgaagataggcgaaattgttgttcctgccaactcggcgcagaaaacggaacagtttacaattgacgtatcgaagtttgttgaccacctggacaagaaacatgcaatctatctcgttgctgaaagcgaagaaacggacaatcttttcgatttaaccggcttgggattcagttcaaacaagaagaagatcactcgccctattgtccccaaagtaaatatagaggtcaatggaaaagcaatcgaagtaccggcaactcctgtacgctctactgaaagcaatggtattaccggctatgacatctatgaagctgtttacaaacttccggccggaactaccggaacccctactgtatcggcatcagcaactgataagaatgtgaaagtagaaattatccaggcaacatcggtttccggaactgctattgtgaaattcgattataaaggggtagttaaaacatataaggttgtgtttactcctcttgcataagaatatcagaatgtaaccatgaaaaaaacatttactatcctattatttatatgtgcagccacagggataaatgcacaagataaattgtattccaacgagtttccgctctcacaaataacactcctcgaagggccgttgaaacatgcccgggacttgaatatcgagacattgctcaagtacgactgtgaccgtttgatggctccctatcgaaaagaagcagggctgacacccaaagctaaatgttatcccaactgggacggattagacggacacgtcggaggacattacctcacagctatggccatcaatgcagccaccggcaatgaagaatgtcgtaagcgtatggagtacattatcagtgaaattgccgaatgtgccgaagccaattgcaagaatcatccccaatggggtgttggctacatgggcggaatgcctaacagccagaatatttggaatggctttaaagacggagacttccgcgtatacagtggctcatgggcaccgttctacaatttgcataagatgtatgccggcttacgcgacgcatggctatattgcggcaatgaacaggcaaagagtctttttctacagttttgcaattgggcaatccacatcacatcaggattgtcggacgaacagatggaacggatgcttggcaacgagcatggcggcatgaacgaagtgcttgctgatgcgtatgccattactcatgagcaaaagtaccttgactgcgcaaagcgtttctcccacaaacggttatttactcctatgtcgcagcggcaagactgcctcgacaatatgcacgccaatacgcaagtacccaaagttatcggctttgagcgtatatcagagctgtcgggaaatgaggattatcatgtggcaagttcattcttctgggatatcgtaaccggcgagcgcagccttgcatttggcggaaacagccgtcgtgagcatttccctgccaaggatgcttgtatggatttcatcaacgacattgacggtcctgagagctgtaacaccaacaatatgttgaaacttacagaagacctccaccgtcgtaatccggaagcgcggtatgccgactactacgagcttgccacattcaaccacatactctccacccagcacccggaacatggaggctacgtctatttcacgcctgcccgtccccgccactatcgcaactactccgctcctaatgaagcaatgtggtgttgtgtcggcaccggtatggagaaccatggcaagtacggacagttcatctacacccatgcaggcgatgccctttttgtgaatctatatgcggcttcacagctcgactggaaggaacgcggcatcacgttacgtcaggagacggctttcccttattctgaaaacagtactattactattgcggaaggtaaaggcacattcaatctcatggtgcgttatccgggatgggtacatccgggcgaattcaaggtcagtgtaaacggaaagcctgccgacatcattacaggcccgtcatcctacgtcagcatcaatcgcaaatggaaaaaaggcgatgtagtaaacatcaatttcccaatgcactcatccctgcgctatctacccaacgaaccgcagtacgttgctctcatgcatggacctatccttctcggaatgaaaaccggtacagagtcgatggcttcacttatagcggatgatagccgcttcgggcagtatgcaggtggtccaaagcagcctattgataaagctccaatcctcatcaacaatgacattaccagtatcccgtcacagctcactcctgtgtctggcaaaccgctgcacttcacactcagcacccgcacggagaacaagattgaaggagaattgcaaccattcttcgaaattcatgactctcgttacatgatatattggcttgccctcaccgaaggtagctacaagcagtatatcgataacattgccaagcaggaacaggagcgtcaggcactcgaagcaagcactgtcgacaaagtgcaaccaggcgaacagcaaccggagaccgaccaccagatggagaccgacgagtcatacaccggtaacacaaataatgtcttctatcgcgatgcccgcaacggacattattttagctacctcatgcaaaccgatggtctgactaacctcaagctgcgactcaagtattggggagtaggcgaatggaaaagccatgaattcgatatctatattgatgatgtgcttctccgttccatcaacaacaccggcaaatatcgcatatcagagttcaaggcagaaacctatgacattccggctactcttttgcaggataagaaacaagtacgcgtcaagtttgtggcaaaacccaacaagcaaataggtgaaatatatgaagtaagattaataaaacagtagctggatagctactgttttatttcttttccaatacggatacaagctccgccacccggcgctaactttatattcagaacttcattccgcgttactttctttttcgaaaccttaatcgtttctctgttactcaaataatgggcattctccccatcttctacaatttccgcttcatagtctcctttacctaagaaagacagtggcacacgtaaagttctactttcttcgttagttgcagctcctaccaagaatgctccatcttccgcttgacgcatcattacgatatattcccctattttgccatccaaagtctcactttccagccaaggcatcttctgtgcagacaaaaagcggagtaaagcagggtatttacgataatattcaggaatatccggaataatcgttgcgccggagaaagtgattaatgttcgtgcagcttccgataccaccgttgaaggtacctcctgattattatccgaacgcgtcgttttcccctgtcgcaagtcaaacataccattattcatatcaatcgggccggctatcatattcacaaataccgaagtaacaaaggtcttgggatagaaaatctcatggccgtccaattgagccttgcaatattcacgcgtcacagcattgggccacgtccgcatctgcccatagggatgcaccggataatcatgaaaatctaccaataatttataccgtgcacacatttcagttatactcttcgttctggtattcttctcttcgccatctccagccataaaaccatacttcaccccggcagctccccatgcgccatattgcttcaaggtttcctccaacggataattacgtcctcctacatcattcagatacagccaaatgcctactcctttctgttttccatattgaatcagctttcgtacatccctggccttatctccctttacaggatctgagccttgctcaaactcaggtccataccagttggcatcaagaaccagataggcaaaaccctgttcggcggcaaaatcaaccattctttcccaagaaggataagacattgtataatgaaatccttcccattgagcaccattgatacgccagtcccacaatgcaactcccggctttacccatgaaaaatcataatctccggaaggttccggattcaataattccaagagatgagaatctaccagatcgcccggacgattgccgcaaagaaccacacgccatgccgattgataccccgcatgaagcaaatgcggctttacagacacagaaaacaaacattgccctttttccgactttagtttcaaaggttccccttcatccagacaagcttcatggacagccagatataaatcatccgcagccttcaccgtcatcacaggcaagcgctcaccatcagtttccgtcaatcgttccggaccgatattatgcctttcaccattataaaaccatgcagtataatcgcctgcaaaattaaaagtagtaagttccaatgcagaacctgcatcttgaggcgacacatagcgaaaagccacaccttcattataagcccgtgccactacctccaaagcatccgatgatttcgcttcattcacaaaagacagcttcatctcattgtatttatcgggtaccacggcacgctttccccacagaggcttccaaacagaattcactttgttacgagtaacctttcccattttccatccccggaaaggaaaagtcagcccatcttccgttttaaaccccaatgcagaagcatcaatcacttgtttacgcttcacagataattgataagtcagctcaccggcatccgtttgaataatcgctaactgtatctttccgtcaggcgaatcaaccgtatattttctttcaccggcataacaataggttcctatcaataagaacaacaaacacaattttctcataatccgattttatcacatcaataaactttattaaataccggcttcattataaaactgaattcataattaccgtacggcaagcggtattgcggataagcgatagctccccaactattttcacaagccagccccaattgagccttgtctatgcaaagattcgtataatccaccgggattacttccggcgaatgacgctgatctttattcaatccgtcgtccaaagattcaatcgtataattcagagccgatgccgagaacggtgcttccgcaacaaattgcaacccggaccccgcttcattcagttgtctccaccaacgtatatcagtcttagtacccgtttcttgcggacggatatatggatagaattgttcagccaccgtctggcgataaattcccaaatccgttgcatgattacggtccgaatagttttccacaggacctctgccataatagttgattctatagaactcgtcaggcatctgcatctgcatgccgaagcggaacatatcgggcactttctctgcttcaccagcaaccattttctgggtaacttttatctcacctgtattatttatcacataagtcagatataatttagcagatacatcaggcatttcatatccggcctcaactacaatcattccattttcctgcttattggtaaatgaagttcttttcagttttggattcaaccatactctgtatttatgctgcaacctggcaccataatcgttgtcagtaggcgcacgccagaaattaggcacgagttgtccgccatcattcattaattctttgcctgcaaccttatatctgctcaggaaaccattgtttttcgcaaactcgataatgaaatcctcaccttcaatgatcagataattgccatcattattattcacagaaggagcaaccgattctatattcgctttcttcacattcactaatgccatatcgggtaccttatagggagtgacggacatttgagcttttgcaacagtaaatccgggagataataaggtttcagcctttttaagtttataagacacattcagtaatagttctttatctttatacgaatttacatcggagatgtccagttttagtttcgccttttgttgaggagcaacattcagattgctaacagtgccggcttctaccaattcaccatctgccaataactgccaatccagataataagcggaaagatcacggaagaaattctcattaaagatttctatttctccattttgcaggttgacgggatgtgtccaaatggactgataaaagtaacccacttcgtacatgtgcggattcggtaccctgtcagggcttatcagaccattatcacagaaattattgtcagaaccatcgtacttattaaaatctccgccatacgcatatatttcaataccgtctttatttttccaacgcacagactggtcaacaaagtcccaaataaacccaccctggaatttcggatatttacgtatcaggtcccaatattctttgaatccacccatagaattacccatagcatgcgcatattcacactgtataagcggcttagtagcattactcttggcataatcctcacacgcactgtaccacaaatacatcgggcagaaaatatcggtataataatcatgaccggcctgttcatactgcacggggcgtgtcgcatcttccgcttttatccaacggtagcaagcctcaaagttagggccgggaccagtttcgttgcccaatgaccaaataataaccgaaggatgattgtaactgcgctgcacattacgctggttacgttccagatgtgctttggcaaaagaagtatgtttagaaagctgattattagtatataacattccgtgcgcctctacattagcctcagctacgacatacaaaccatactcatcgcacaattcataccaaagattatcgtcaggataatgacacgtacgcacagcattaatattgaattgtttcataatccgaatgtcctgcaacatacgctcccgtgaaacaacatatccataatcgggatccatttcatggcggttggcacctttaataagtacaggctgtccgttcacaagcagctgagcatccttaatctccactttacggaaccccacttttaccggaataacttctaaaatatcattgccattctttaaagtagcggtcaggcaataaagattgggcatttccgcactccatttaagaggattcttaacctccataacagtcgaaagactgcccgaaccattcaaccgggtgtttgcaaccacattgcctttcgcatccgacagttccaactctacggtaccccgtcctttcacctggagagcaatgtccagtgatccgttggtatattgctgatccaaatcgggagtaacccttatgtcctgtatacaagtcttgttgcgagcatataaatagcaatcacgtcccacacccgaaaagcggaagaaatcctgatcttcaagatatgacccgtcacaccaacggaacacctgaaatgcaatcagattttttcccggtttgagataacccgacaaatcaaactccgcttccagtttgctgtcttcactatacccaacatacttaccatttacccacaaatagatattagaagtgacagaaccaaaatgcacaaagatttgcttattcttccattccgccggtatgacaatctcttttcgataggatcctacatgattgttggctacaggtattttcggaggatcagttctgaattggttcttccatgggtaccctacattgacataaataggatcaccataaccatttaactcccatacagcaggtactttcagttcatcccacgcactatcattataacccaactgataaaaatcatccggacgctggtcagcattccttacccaattaaatttccacatcccattcagagacagaaaattatcagattcttccttaacacctgtacgggcagcatcgtatgattcataagcaaaataattagcgtgcatcggagcacgattcacagcatttacctccggatctctccactcattcttttgggataaagcaaccgtttgcaatccaatagccaacgcaaataggctgaatagtctcttcttcatatcattattatttgaaattatcctataggatacaaatgtagagcttaacctgcccacagactttcaaaattaaatatatgatttttaaaattagatatatctcagactccttcctcctatttatagcttttaataatatatcttcttgcctctcttattggagaaggaaagataatcttttacctttacatcatagtatgactttgcaattccatcatcattggaaggcaatttgtctttttcatgcggcaactcaagaatatcaattacctctacactctttttcagtttagggaaaagcagactgacatagatatatttggagttaaaaccttccacagtcaataatcgatcttggggagctcctccgtcatatcctctcacatggtattcatcacccgtttttctgtctattatcacaaaaccgggactgtaatacaaccattgccaatcaaagtaaataggttgaagaaacgttactttcgtgtcttttgctcttctttcaatggaatataataaaggttttgttcctgttgctctgttatagggtctgtcagcaacctcaatgctatctttaggaagcgcataggctgcatcatatatttcctgatcccgatttcttgtttgatccactacctccgtactcctgccaatttccggatgcaattcctttcccatatccatctgtagcctattaaccaacagcggcatggcttcgcgcataatccccattgccaactctttataccgctcgcccaaaggagattcaaattcagacacattcatctttgccacagacagagtatacgatagaacctcatcaatagaagccgacgcgccggtaacttccatcaactttttcaaagatacttcgtactcattcgtcttatcaggctgctgcgcagaaaccggcagaatgaaagtcgacaatatgattatacacaccgctactctaaaaatagttttgtttctcatgatatcatttttaaatagttcattatatttattgcatagatagtgtttttatatgagaaaaactaattaaaagcggaaatcacatactgtcgagtttacatcaatctttcctacatcctacaccaactatcattttcatttgattatcaaacagataggcggtgtaggaagtggtgtaggaaagtgtagaaaagttccatcctacacccaaagacagataaaaaagatgttttttaagtttttaatacactagttttcaaagtcttaatacgtacaatacaaactttaccaagattcatacatatacctcctttttagcctgaattattcatcgaaagagttaaaagagatcacttcgttagaaattaaagaattaaactacataatcccatcatcatagaaagctgaattacagaggagaaacttgatatgctacttcctttttactataaagtattaaagataatgtcattatgctataagcaaaatcttgtttttcagttgtgggctgtgtagcccgcaattgcgggatgaacagcccacaattggaaaacgtagagccctcaactgtaggacgaaattttgctacaagcaaaagaacaaaaacaataaagcaaagtgtagttttcatactaccttctacctattctgctcattgttcctaagtattctgttgcctaacatcatgaaaaggatcagaagtttttttgaaaaaataatgcaaagatctcctctatttcttatttaagtttcacatataacctgaaaggcttttattctatagcatagggcatcgccctacgctatagaataaaagccttacgattccaaacgtcgtcgttatcatcactcaataaacatgctttcttcaggaggctctcatgattgtgttctgcaacagaaaagataaaatattcacacatcagatatattaggtatttaatcagaatttaccctaaaagtgttatatttgccttcgcatactgtttaaaaatctatcaaaatgaatattgaagaatttagagaatattgcctgtcattaaaaggtgttcgtgagaaaatgccgtttctgaatgttcctgataaatacagtcgtgatgttctatgtttttatgtagcggataaatggttctgctttgtaaatatcgaagtctttgacttttgctgtatcaaatgcaatccggaagaatcaggagagttacaaaccacgtatataggaataaagcccggatggcacatgaataaaaaatactggatcagtgtttactttaatcaggatgtacctgacgagaaaattaaagaactcgtaagcaagtcttatgacattgttgtcaaaagcctgacaaagaaagaacgggaaatgctactatcaagtgatgaataacactctcacctatttaatttaagttttataaatcacaatgactattatacaacgtaagacattattctacataataaataaatattttatttcaacgggaattaccgaatattagtacttactctctagaaagtgaattttaggataagctctaattatacatcattatgtaaatcaatacattaatcaaaaatataaagttaatacagtagcaccgcaaacagaaaaaaaagaatactctattccataataaaaaggtcataaatttcattgtttaatcaagtaaaataattatgtttgtgacagaaacacatttatttttcaaacagacaatgtatatgcaacactcggactgcatatcattcatcgcataacaatattatgaaaaagatattatttctaatactactcttcattcccatagctatgctgggacaagctggaaaacttttcactgctgatagccaactttcgagcagtctcatcaacaaagtataccaagatgctaacggcatgatctggatagctaccgaagatggcctgaatcgttacgatggtgccaagttcacaacataccggcatgaagatggcaatcctcactcactcagccacaattatgtacgcaccattttcagtgatagccacggtcgaatatttataggcacttatagtggtttgcagatgtatgatattgcagcagactgtttttcggaacctgccacttggcccgatggaaaaacctatcaggctaatgtcatagatatgacggaacgacataacggcgaaatttgggtatcaggaggtctactagtaacattacacattgacaacaatcgactcacagtacagactccctcaattcctattcctacttcactcaccgattatattttggaagatagaactggaaatatctgggtgactcgtggtgaaaacggtatttatcgtataggacccaacaaccaaattcaccattatttggaacaggaaaagggtacccccgtaactgatctggctgaagactcacaaggtaatatctatgctgcctgtatgggtaaagggctctaccaatacaataccgctgatgactcattccaacttatcccttatcaggggaaaaataatctgtccatcaaggcactctttataggaaaacaagatgaggtatatatctgtactgacggacaaggagtgaaaatttatcagcaaggaagcaataccgtaactgactatcagtttgaaaacagcttctacaacctgtccgacagcaaggtccattctctcttaaaagacaataatgataacttctggatggctctctaccagaaaggggtgatgtttcttccttcacaacccaacggattcaagtacatcggtagcaaatcggccaatcgtaacctgataggtaagaactgtgtcactgccctttgccaggatacacaaaattccttttggatcggcacggataatggaggtctatatcgtctttcagccgatgccactcgaagtatccattaccccacactcgacaaaggtggaacagctcccgcaacaatattaaatctgtacgaagattcggaaggaactttgtggtttggctctttcatcaacggtatgggacagataaacaaacagaatggagtttgcagttacgaacaaaatctaaaagataaaggcgggaaccacatacaacgagtatatgcctttgctgaagatcataataaacgactatggatagccaccatgggtgccggcctcttctaccgtgaccttaaaaacggacaaacattctatcctgaaattatcaatacgaaaataaatagttggataagctgtatgctctacacacccgaccatctgctctatattggtacctacgatggactgagttgtattgatttgaacaatgaagaaatgatacatacagaaagtatattgaatgggcatataatcaatgcagtgtgccaagacacaacaggaatgatatggataggtacttcggacgggctttcatcatggaatcgcattaacggagaagtcaaaacctataccgcaaagcaaggattacccagtaacacagtgtatgccctcattaccgacaacgatggctatctgtggataagcaccaatgccggtatcgcacgttttcatctgcagaaccaccacttcatcaattattatgtaagtgatggcctacaaggcaacgaatttgctaagaatacctcctacaaggatccagaaggcaatatatggctgggaggtgtgaacggcatcacttacttcaatcccaaagacattactagtccggagcagaagtggaccgtacgcatcacagattttttagtatacgataaaccggtgaggaaaggtatgaaatcgggaaaccacgagattatcgaccgtccggtattcgaagcaacagagttctatctatcgcacacggacaatacattcagcatcgaatttgccacccgggagttcaataaccccgaacgaatcaactacctttataccatgaacagtagccattggataagcctgccacaaggagtaaaccgtatctccttcagcaagttgcaacctgggaattattgtttccgcgtaaaagccatggattacactctcgattccgacattcgtgaaatacacatctacattgctccaccttggtggaacacctggtggtgtcacctcatctatatactactagccttaggagccatcctctacattgtgcagcaagtacgtcatcgctaccgcaccaaacaagaaatcatgcaacacatccatgccgaagaaatcaatgaagccaaactgcagttctttatcaatatttcccacgagatacgcacacctatgtcgttaattataagtccactacacaaactaataacccgtgacaaggacgaagagagacaagccatatatcacctcatagaccgcaatgccaaccgcattcttcggctgataaaccagttgatggacctgcgcaaaatagataaagggcaaatgtcgttcctcttcaaagaaaccaatatagtagaagcaatcaccgatatctgtaacagctttcaacaaatggctgaagctaaacacatcagcctgcgatttcatcacggtgaccagcagaaactgaatgtatgggtagatccagacaacttcgacaaaatcattatcaacatcctctctaatgccttcaaatttactcctgaaaaggggaaaatagaagtactcctaagtcagggtgaggatactcaagccacttccaccctccgccactatgtcgaaatcacgattactgatagtggtatcggcatagatgaacaagagcgtgaacatatcttcgatcgcttctatcagatacgcaacagtcaaaacaattctaacgtaggtacaggaataggcctgcacctcactcgctcacttataaccatgcatcatggtagtatcagggtgagcaataaccaggacggacaacccggtagttgcttcattgtacgcttacccttagggtgtggacatctgaaagctgaagagatggctacggaaaaagagagtgcaagtaatgcaaagactgcagaaatcgatctagttgaagctatggaaacaaattgggaagaaccgaaaaaaccacggactaaataccgcatcatggtggtggaagacgacgaggaaattcgcaaatacgtctgccacgaactgaaagaaagatactacgtacagcagtgcacaaatggcaaagaagccctgaagatgctcttcgaaaaagcgccgcacttagtaatcagcgatgtcatgatgcctcaaatggatggcttcactctctgcagcaagataaagcagaacatcaacctcaatcatattcccgtgatattactcacagcaaagattcgcgaagaagataatatcgaaggtctggaaatgggggcagatgcctacatcaccaaacctttcaacatcgaactactcaagagaaccgtagaaaatctgatacgtagccacgaacgcttgcgtaatacttttagcggtcagcagattcaagaggacaagttgaataagatagaaattgagtcacccgatgataagctaatgaagcgcatcatgaaggtgatcaatgacaacttgagcaaccccgaactctcaatagatatcatcaccgccgaagtgggcatcagccggacacacctgcaccgcaaactgaaagaacttaccaaccagactactacacagttcgtgcggaacatccgtttgaaacaagctgcgatcctattagccgaaaagcgccataatatcaacgaaatagccacgctcacaggattctctgactccaactatttctccacctcatttaaagaagcatatggtatgacgcctcgagagtatatagaaaagcaccaacaggcttaatctacagtctacggacaactatctccttcacaaacaactcagctccctccgattgcaactgcaatcgacccgaggtgagcggatatgagacgccattagttctacggcaaataccttgattaaccaataccgtatccccattgaccacatgcacagccttttgccctatacaaatcaattccaatgtattccactcgcccaaagatttctcggcattatgtgttttgcgaatcatccgccgatgaaaacgttgtccgaaatcaacaaactgagcagaagaattatacacaaactgattatgaagagaatcaactcgagtactacattccacactgtctaccatcaagaaagtatcacctagattatcgtgcatcatctggcactccaccgatgccatccaagttccaaaagctgtgcctaatggaccataactgtgataaagtaagccactattccgttcaagagtaacctgctcaccccatcggtataccacccgcaaatgatagttttcaaatgattctttagttaccagcgaaccatgcatttcacccgaaatgcgtatcaccggaatttcatcgagcatcactatcgaaaacacattttctttagtagctgttttttccaattcctcatgaccaggaaatgctgggcccaaatagcgctcccaattatccagattctttccattaaaaagagattgccagaccgctactccatctgcctgatgtacatcccgaatgtccatccaccataccatgcctccccaaactgtaaagaccgcgataaataaacaactaaatagtttcattatatcagtctattatttcagttcctcaattaaaatatccttataccacacttcagaggcttttccctcgtgaatttgcagagcaatgtagccttcttgagcaatggttccaataccttcgaaaggtgaatcagtataaggctctatgtagtcagtggtcttcacgccattcagccaaatgcggacacgaggaccttcacagcggatgatgtattcattccaggcatcagctttatagttctcgacacggcccaattgcataccaaggaaatcccaacggcgttgctcatcataaagagcaccctttttccacgaaataatatctgcttggtaacctaccatttcaaatgaccgtccagaaatggtagatggtatgctacggaactgaatccctccgttgtaactctcatccatagcttttactttatatttcagccgaagctcaaagttcttgtattgtttcaccgtgcgcacaaactgattgtgattcaaatcttccgtcatgcatccacccacaatagcgcgtttctctatacggaaatgcttcatactgctttcaccatcgttaccttcccaccctgcaaaactctttccatcaaagagtggaactcctttaaactgactcaaaatatttgtctgctgcgaagtagctgccagtgaagtggggactaattctatatagtgcacatcgggtagcgcctcatcagctttcagttttccttctttatcacgcttaataccattctgaataccacgcagagtgatagttacttccccacctctcacaatcttcagtatccctacttcagaggtatgataatcataccaagtaaaagagggttcgaaaatagctgccagttcttgaccatcggcctccagggtcatagcactagaagcatagggttgagcataacgaataaacacctgataattaccgggtttaagttgtgtattccacgaaatccgctgatctggactgttccatccatgaacggtagcttcctccttattctttccttccagacgcatatcggccgaaaactgtgccgcagaagcattcagccggatgggtgtacccatctgtgctttctgtcgctgctcctcaataatcttcccgcaaagacgattgatgtagttcacactctcaataagatagggcatagggttatcgaaatcatgctcatactccatcatcatcagaggcttcacttcccggtcagctaacaattgaaagagttcggacatccgtccctgtccagcgcccagaggtacatccaatccatgtggtcctatctcgctgacatcacgcagatgaaaatgatacatcttgccgatatccatatagcggcgagcgatatcacaagcatcaaatccgccacgcatgtagtggccaaaatccactgaagcacctatgagctcagagtaagattcagtatcttctaccgtgaaatcggggttccagtacgaagcagccttaggatggttggtgaagaccatccgcacgccatacttcttaaggatctcttcataaaaagaaaccggttttcctcccttatcggcacggcgcgggtcggtcactatcatccatcccatctccttgcaaaacttcaccacctcttcaaaaccattcccgctaccatccatccaatagtaaatagattggcacttcactccactttcagccagcttcctcttgatacgctccatccattcacgcggcataccggcataaattgcttgatcgctttcgttcgagatacgtgcaccaatggtggcttcaatgtagtgaagccctaaggcacgtgtcagatcgataccctcaaagaaggtgtacttatgcaaagtgtagaactgcacacccactttcaggccaagcttctctgcattgggacaaccgtcggccaagcgaccatagcaattataaggaggttgtaccactttattcaaattcaaattctcagctgcttgcgcataggtcttgcccgaaaagccgagtaaacaggcaaatacccccaacaataaccaattaaatcttttcattatatgtttcttttttctgttatcaactaatactttatgttttttcagtcattacataagaccacacttggacgattctttacctcataactgaacttatccacatcaacatatccatcgtcgcgctgattattataggtataaatgcctatcatatcaccgcgaaagttagcagtttccatttgatattcatcaccaaaggggaaaaaacttgtaccatcagtactataaagaaaatgctgtgcctcagtggtgtactgtcgggcatcatcgcgcggttgaaatccagatacggaacgaatatagattgtagtgactgtaacatcgagccgcattccccgtgtcagctttccattctgctcataaacgacatattttccgtcagtcgcatgcatcagtccacaagtggcatagctcacaccaccgttgaagtggaccaagccagcccgctgcccttcggaggttcccccgatatccatcttgacggtaatcaccacactgtctgaactcatataacgttgttctatcgtgttggcggcacgaaaaaaatcatccttaccattagcagtagaagcagcatgcagacgcagatagcccggacgctcagtgagagaccatcgtgtagtatcggattgatgattccacgcccatcgcccatcgagcacggtcgacgaaaaatcatcgctgccatgaggcagggcaatagcgagcgaagttattggtttgggtaggcgccaagccatcttaccatacccaccctcgacatccgtacctatcacgggccagtcgtctacccaactgaccggtaacaagcaaggtgtacgcccgtccgaaccgtagcggttaaactgtgctatccaataccagcgcccgtcgggtgtatctacaaaaccaccctgtcccggaagctcctgccggtagggaacactataagcatcgatgcggcgcatttcatactcacccatatcgccaggacgaccgggacttccatcaggcttcgtgccatagatatttcgcgaacgataaatgtaagtgcctgccccattgcctccatcaagaaactcgatatgcacaatgtaataataaccattacgcttatagagtttgttaccttcggtagaatgattaggactataaagtgtacctccacgaggatactgataaacgatgtcacgaatcttcatatgctccacatcagcatcaagtaatcgcaagccatcggaactcatttcaaagagataaccataccagttcttcatgggattactactcgtaaggtaagccttgccatcgtcatcccacagcggacaaggatcagtccatcctgaaaggagtaacggacggccattcttatcaagcaatgggcacacctcccactcaccgaaaggattagaggtgcgtcctacaaacataccatcagtgaagagattcacataaacatagaacatgccatcatgatagcggatagagggagcatatactccctcgttatagcgcttcatctcccgagaggagaaagcaggactcacttctgtcaaattggaaaacacgcttccggcaatagtccagttcaccaaatccttggaatgcaacacggtgacccccggagacgtttcgaaagtagaagtcaccatgaaataatcgtcacctacccgcacagggtcgggatcactaaagtcagaagctatcactggattgcgaaatgttccatctcccatatccccccaataaccgttctgtcgttgctcatcaagcaaacgttcatcacgcgtctgcgccacaccatctgcaactctgcccaccatcagacaaaccgcaagcaacaatatcacagttcttttatttttgttgttcataattaaaataatcaacgtccacatatcctccctcgctctgcgtagcatagttgaaaatggcaaagcgactgcccataaaaaggcgacgatagtcgtaactcatcttgaaatccgtgcctattttccgccattcctttccatcaaggctatagaagcaagatgcaaggtcgtggttcagacggaagtctccctcgatacgcagatagatcacctgttgccgttgcttcaatgccactatctctttcacctcacatttcacaccagttacaagtttctccttgttcgtaagacttaccgattcagtgctcattatcaattgcttcttgccgtccgccatcttcaccgaaagcagtgccgcatcaccattgaaagctgagagtccagctacatccccttctttcatccgactgatatccatagccaccataccgctgcatcgcggtcctgtcatgcgctgactgatggtatttggggcagtgaatatgttctcacacttacgacttgtcttcaagcgcagataaccaggacgttcgctaagcgaccaagcatcgttcactgggttatgattccattgccagcctaacttcagcttactaccgctaaagtcatcactggtcactatattcttcgcttcacaactttgaataggtttctccattatttcgggtatacggccttgggcatcacccaacataggccaaccatcaacccaccgacaaggcataagggtaagtacacgtcccacagcaccacgatcctggaaaataacaccataccaattgccactggcatcatccacaagagtaccctgtcccacataagggaatccggcaaaattgtcctccaaaattacctttttttcatagggaccagtaattttatcggcccgatagcatacctgacggcgtttaccaccattaggccatgaaatcatgagcagataatacctgccattgtgcttgataaagcgacttccttcaagtaatcccgtctcgctggcatcacgcttaaaaagtgtaacgtccactcctcccggttgtacaccggtaaggtcaggtttcagttcacgcagttgcccggtaccgtagaaaatgtaggccttatcatcatcgtcaaaaaatagtgaagcgtcatggaagtgagggatacgtgccactaattcccatttctctgcagggtcggtagtagcgtatacatagccacggtaaggctcatcattgggtgaaaagtagacgtaatacttgccattgtgatagcgcagggaagtggcccactgtcctcggccatacactgtcccctccttcatgtcatacttgggcacgtcgtgcagcgagtcgaacacatagctcacaatctcccaatttactagatccttggagtgcatcaccggtgcaccaggcattaaatgcatggtagtactcatcaaatagaaatcatcacccacacgaatcacatccggatcgggtacatcgctccatatcaccggattagtaaaggtaccatcaccattatcgcttgtttgccccaaaagggaagtcacggaaagtaacgccaacaacgttgccattcctaattttttcaatttcattatattcttcatttaatgtttttatatggttattagtttagattctttcagaacgtatagctgataagatgtcctctgctactcacaccttctatcgtaatacggtaatcggtggacgcatcagctgaataaaattcaaaacgtaccaccccgtcagcatcagccaccgcattgggtttccagtagagagtggaacgcaagtcagcacctaaattcacccgagcagcatccgtatcatatcggggagaatagaaagaaacctgctgctgataaccgagcggtttgattacagtcatattcttgctcaattcatgtcgcaagccaaagtcgccccgcttggtattgattacaatggcaccgttcgctccacgtggtccgaggaaagccacggcagaaggcggtgaaaaaaacagatcgcccacatctgcaatgtccaaatttgtaaggtcataatcctcgtaaggcatatcgtcaataatagtgagcggagtgcctccgtgatagcttatgctctgtcccgtcacgcgcagcccgttaaagcctcgcaaggcatcgaacacagtatgatattggtgacgagtaatatcctcctcggtaactacccggctagaagataccgaatgataaagcgacgaagtacccactttagtcttgcggttggcagtacccactatctctacttcagtcaaattcacctcccgtataccgttatgctgaacataacggcgttcctcattgtccacataactaccgtgtagcgtatccgtagcattccaaacgcaggcaataggagtcagcgtaacagctgaataactttccactgaatcgagccggatataagcatgctgtccaccccgcttattcagtgcctgaataatgtaccatgttttgtcggggtactccactccgtggaattggaaccgcccatccgcactaatcgcggtcgtggttgccgcctcgatagttccgcgcgtcaccaagctcacttctcccccattgaggttggaaaataatccttctactctgcccgaaacgaggcgttccgattctaccggatactccgtcggacgtgtaagatgcccctttagtagcgaaggtacatcataacgtcgccatccctgtgtgagaagtaacgcatcaagcgcattctgcaagtggcgattatcagtcacaaagtaatcagccggctgttctatgtacccccgcagctcagaggtgagtaggaaagcagaaacaagggtacaggtggtatcagtgcgaaccagattacgatccaccacagacaccgacacgttgccatgaagcggattccccagctgatcagtcagttgaaaggaataactgttcaacgagcggggttcgcgatgttggggtagctgcaaaggctgcactcgcgcaaaagtagcttcctgatgtgaaaagaccaaccgttcactcaacacattgcgcatcccgtccaccagcaaaaggtgcactacccctgcgggaaagaatccgcgctcgaaagttagcgactgtcgagaagcatcccactcctcatcataaagcaccaccccgcgcacttgagccactaacctcataccttccggtagcgccgtgtctgcagctttgcagacagcaatacgaaaatactttttatcagtgagcacccgaagtgcaagggttccttctacggctttaggcaaatcaaacctcaaggatttattgcccgaagtggtacatactgcgtgatagctatgcccaggacggtaaaacatcataaaggtacccataccacggtgtacggaagcgaaagtggcacaaacatttccctcttcatcatagacggtaccatatacctcccgccccaaaccatcaaagccaatggccttaaacgccatgcgcacactagcaccaagaggcgcctgcccgccttcggggaaaaaggccacatcgaaatcaatttccgaagctttcgcatgctttctcttcatcttctctccagactttgtttcaaggcttccaaattgtatatcggaacccattcccttttggatgggattcaccacattcaacgcccgtcgaaagaagtattcctcacccatattccgcatgaaacgggtgtaagcacgaagcgtgtagcacccttgtgctaatccgtcagtcaacggcaagtacccgtagaagcaccccaacgaatcaggtcgaatcatcacgcggtcaataaacttaccagctttgtctatcatctccacatacacataacggctggcattggcctgcttcaataatgtagcttccaccaagtgaatccgcatccataccgtgtcaccagccacatagtccagcttatcggtatggatataggctttctcctgtggatagaccgaaagctgctgccagaaaagctgtccgatagtgactgaatcactcactatagaaggtaatttcatcgctacgcaggtaagtgaagaaataaaaagaaaggacaacaagaaaaaaaaattacgcatacacaatttatatcataatacctattttatacttcttatgtccttgcaaacagataatcacatccagcttcagtcattacatcatattcgtagactctgggcaataccggccattggagatgaacttctgccgacaccaacggctcacgaataacggcggccgcaaaaagaggattgggacagtctccctgtgcaggcttcaagtgatcgcctttcaagggaatgtaagagcggatgcgcagcattccaccaacgcgtgaatgaaccctagcttgtactaactgcgctccttcccactccatatcgaccacaaaaccaccacgagccacaagaccttgtacactgccacaatcccattcatcgggtagggcaggaagcaaatgtaccgctccgtcatgactttgaagcaacatttcagctactccggcagtgaagccaaagttcccatcaatctgaaaaggtgggtgagcatcaaataaattgggataagtacgcccaccaggatactccttctgttctgcatcgctgggaagcagggtaagcatgttgcgaataatgcggaaagcatgattaccatcaagcatacgcgcccagaagtttattttccaaccaatactccatccggtagccatatcgccacgctgcagcagtgtgttgcgagctgcctgaaagagttttggatgtccgtagggtgatatctgattactaggataaagtccataaagatgagaaatgtgccgatgatcatcggtaggactatccacatcttcgagccactcctgcagttgattatgtctgcctatctgcataggtggcaagcgtttaatcatatcacgaagtttattctgaaaaacctcgttatcacccaccaattgagcagcggcaagagtgttacacagagcgtcggccacaatctgattgtccatggtacaaccggccgtaatgggaccgtgctcgggtgaaaccgagggcgatacaaccatccacttattacgtgggtcttccaccaagaagtcaagatagaattgcgccgagcccttcagcacgggataataccgctgcaagaaatttctatcagcagtaaaaagatagtgctgccagatgtgttgcgccaaccaggccccaccactgggccacataccagcagcggcgaaatctaccacaccggcaatgcgccaaaggtctgtattgtgatgtgccatccagccactacaaccatacatatcgcgagcggtctgtgctccagtgaccgacaaatcactgagcatattgaaaagaggttcatgacattcactaagattagttacctcagccggccaatagttcatctcggtattgatgttaatggtatacttactatcccacggagcatggatgctattgttccagataccttgcaggttggcaggctgtccaccgggttgcgaggaagagatgagcaaataacgaccatattggaaaagtagggcagccatggcctgatcggctccattgcgaaaagcagctatgcgcaggggcgtttcgagcttcgattgtttggaagcgggaagttgcagcttaactctatcaaactgtcgttgataggcagtcacatgccgatttagggcttcttcataagataacttcattgctgcctttaaagaagtgacagcacgcttagaggcattaccgctcacgtcattgtaggatacataattggtagccgccgacagataaagggtagccgtagtagcaccactcactgcaaggctattaccctgctttcttatttctccatcggtttttatccttacccggcattcggcccgaagggcagcaggaatactttcctgttcgcgccccagacaactgataacataagtgtcgccttgcacagtagctatggattgaagcggagcagcatgccccaacgaaaaacagagctttcccttctccgaaacttccatacgcatcataatcacgtcatcagccatcgaagcaaaagtggtacgaatatgggtcactccaccaacctgatagcgaatagtactgacagcacggtttatgtccagttcacgtgtataatgtgtaacctgcccatgctcagggaagtcaagataaaggctccccatagtgaggtaactcatgccgtgttgaccggtaaggaaattagtatccacccattgctgtgcttccccattcttaccttcgaatataaggtggcgcaccttgtttaatacttctttagcttttacgctgttattattatagggtccgccagcccagaaggtttcttcgttgagttgtaactcttcacgtactgtgcctccgtatatcatggcccccaaatgcgaattgcctatcggaagggcttccgtccagttttgtgccggacggctataccacaactttaactcttctgccttcacgcagagacatgaaagcagaagagtgagagaaaacaagatagttgatcttttcatatttacttttatcatccgtatattcaatcaatcgtattttcgatgttcatccatccagtcattgatgatacgttgctcatcgtcagtctttcgctctttatagagaaatccacgacaggtcttggtaacaccattctcttcgaacttataccacaattcgtacactttcatatcaggatgatatacgccctcgtaaccgagaatcttgaatttatcccaagtggagagactaacggtattatcatcgtttaccgtaatgttgaaacaatagtttggacggtaatcagtggcgcctttactccattcgttctgcatatgatacatacgcacagtgcgaccatcacgcacggcttgcaagttacgcgaagttttataggtcaccgaatcgcttggattagccacgtccttaatgatggcatccatgtaataaagccctgaatattcattcactatattgaacttcatcagtaccaccgtgtcagtcttggtaagagcaaagtcgctggtagactttaacttcagcgcaatcatatagagtgaatcgacatgtaatgtggcgggttctatatagatgggcaatgtgccatagggttcacccgccggcactgttacagctggatcgggaatggagtaaatatcggcaggtaggttctgataaagcacatcgtttgtgcccaactcacggtcgttgtaccgcaagatggcttcgggtatctgctctacttcagctatcacatttttttcagtgggtaacgtaccgctcacggccaccgaagcatataccgtatcctggtcatagcctaaattgagttcacgggtgatgatcttatccttggcacctaccaaatatacagtctccggatagagtgaacgttccataggtgcttcatcgtcacaggctgtgagcaacatagcccccagcaaaagcgacataaatatcttatttttcatattcttcattcgtttttaatgatattacacaggtatagattaattccatccggggttctgcaccaacttaccgttcttctgcagcacattgcggtcaataggccaaaagtacatcttgttagagaacatacgcttcatatagacttcagtgttccacacacggatagtgtaaaattgttcacgctgcgacattttagcactcacatccaatccgcgtatgggcttgttgtaagcatcataagcatctttccagcggcgcagatcccaataacggcggttttcgaaagcaaactcaatctgccattcgtgcttcaccaacttcttcatagtttcataatcagaagcctcagcgatagtgatacctggctgtccggcacgatagcgcacttgattgaagtatttcaccatctcatcaggattgcgctgaataatattccccttctcatcagtgaaactttcgctatccatctcattcatagcttctgcataacccagtaacacttcagcataacgtgccaaagggaatactttgctctttttggtggagttccagtgccctatgtcttcctggtgaatatatttgcggcaagtatatccggtacggttacgataattattgttactggcatccttggcattgccatcttcataataagtcacttcacgatttttcaaattctcagtaccacgatacgaagtacctggccaaatacaatagttaaaacctatagtagcatagtaacggggctcacgattgtcatcgcgacaggctcgattgctcgaaagctgatattccaacgcaaaagtgctgctactacccaccgccttataagatttttcagcctcagtagcttcgctgaaagcgcgtccgtcggccatacggtactcgtcaatcatatcttgggtaacgctaaatgtagcatttccgccaatgcctgaagggaaataaagacggtcgtctccatcactacgtcggcaataatagatatactccttcacactatagggctgataggtaccatcgaacactgaacggtaggacttgtaagggtcaatgtcaccggcaccatcgggaaaatcggcagatgacacagtagttggcagagtcagtgtaccggttcccttatcgttcactatcttggcgacggtatgcagttcgtacttacccatatcgataatacgcttataggtagcggcagcagcagcccacttactcttgtcctcagtttgcgaaataaagtgctcacctttggaattcacccaatcggcatagtaagtattaccattgaacaaaggactggcagcatagagctgcatacgagctttgaaggcaagtgcggcaccccgagtaggcatatactgttccgcctctatccggtcgagtggcaacatggaggcagcctgctcaaaatcagtacaaatcttctctacgcattcatcgtaggtggaacgctcatacgaagcatcagctatatccatgtcggtggcaaagggttcatcgggcaagaccggtacaggtccatagagtctcaccaaatagaaatagaagtaagcgcgcagaaagtaggcgcgccccataaagtctcgcttctccatctcggtgagttctatgtttcgatgaatattggccaatacaatgttggctttgcggatgcctttgtagcaggtagaccaaggattgattttggtattactctcagtgatttcatcataaaggatgctattactgtttaacataaaaggaataatggcttcatcagcaccggcaccgcaaggtaacgaagtaccgccaccccagtctgtacccgtttgcagcgactcatcatagagcagctcagcggctccgttaatatactgctctgtacgtgcttttgagagaaaaatggagtccatcgtagtctggtcatacacatatttattgatgtcgaggtagtcctcacatgaattgaagaataacattacaaggaaagccacgaccggcatcaatctccaatgtttcttcggatgaataaagaatgatattttgttcataacttaaatttatttattgtatattgaacgaataaaatgtatcctgaaaacgtctttttacgcactaacctatttctgtaattctttaaaaagccaaattcaactgtacggtatatacacgctgaatggggtatttcgttccattgtactgtgcttggctggggtcaagcatatcttcctttgaccatacagccaaattctcaccgataagactaatttgcgcactttgcaggccgaacttgcgcaagaactcgttcttcatcatgtaagaaatctgcacattctttaggcgaaggtaactgccgtcttgcaaccagaaggtggagttaaggcagttgttccagctaccaccatagctcaggcgaggatatttggcatttgggttctctgtggccaccgtacccgaaatctctcgtgaaatccagcggttagcaggattggcgtaatcggtaatcacattacctgtttctttgcccgcaaatggattatacatatttccaccacggaaatatttcatgcgagccgttccctcaaaaaggatactgacattaaagttcttccagttgaattccgtagcaagaccatactgaatttgtggagtagacgaatattccaaaggcacattatcgtctgaatttaccagtccgtcgccatttacatctttatacttaatgtcgcccggcagataactgccgaactcctgacgcggactattggcaatatcggcctcgtcttcgaaaagtcctagagcaatgagaccgcgattgataccatacatatagcctacggccgattgataaggatatttcttaagatcctcttcaaaattcaacacttcattacgcgattgggtataattggctctcaacactacatacttactgcggtcgttaggatcgagttgttgggtataagaaatgtgcccatcaataccccaactcttcatcttacccacattagcccaaggcagggtaacaagtcccatttcttcaggcacgctctgacgctgttgataaattcccgaacgaatatctttaaagaaatctaccgacgcttcgaatttctcgtcaaacatgcgggtatcgataccgaaattatatttcgacgctttctcccaacgcagattactcgatcctacttgtgtttcggtgataccactgccattgttccaggtccccgaaccagtaccaccaatcaaagtcagataaggaaaacgaaccgaatcgtcccaagtgagacggtcattgcccacaataccatacgatgccctaaatttcaagtaattgagaaaaggtagtttctcttgaaagaacttatattgtgaaggtgcccagcccaacgagaaagccgggaaagtaccaaatttctttccttcttcgaaagcttccgaacccgtgtaacccaaattgaactccgccatataagtatcggcatacgaataagaaagacgagtagcataactgttgtatcgcttggggatagcggtaagcaactgattgtatttagacgattcataatcactccaataggcatgaagcaatccacccacacgatgcacacggttgaacacacgttcgtaattcacacgagcttcatagtaaaacttgcgatcactctgagtattattccaatagccaggttcttgatattccgatttcttaactagattgaggtcacccttgcggttacgtccatcagcatagtagatagcaggtgttttggtacgagcctgccacatatggctttcactatcaagattcactaatgccatcaccgaaagaccttcggtaatcatgtcaagcttttggtttagctgcatagtaattttattgttattgtagtaatacttgcgataaccagtcatattcagtaatacgtagggactaatgttactgttgtcactaccataaccgggggctgcaccattagagtagaggatgggtaccgtgacgggagttaagttagcctgtgcagaccataaagcatctgtattatcaccataaccaggatagttctgcgtagtaatcacactttcttcgttaagtgagagggtggtggttgaagtgatgttcacatccacattggcgcggaagttgaacttgttatagtctacatttgtattatattcgttaacacccttgtcctgcttgaagatggcctgcttgttcagatagcctgcactaatataatagcgggcaatttcgccaccgcccgacgcactgagaaagtactgttgattccaagtatagtctttcagaatcacgtctcgccagtttacatcaggatgcagatcagggtcaaggtgattagcataaagtgccagatccacatcagagtagatgggaatgccgccgcgtgtcaccgaagactcattggctaattgagcataagtagctgcattaacatactccggcatgcggggcgagtaagaaataccggcattagccttcacacgaatatccagctttcccgccttacctttcttggtagtgaccaataccacgccattagcaccacgcacaccatatactgcagttgacgaagcgtctttcaagatggagaaactctcaatgtcttcaggatcgagagtattaaggctaccttcaatgccgtcaatcagcaccaaggctgacgaacctgcaccgaatgtactgataccgcgaatccagaattcagagaagtcgttacccggctcaccactatgattcaccgaaatgatgcccggtacacgaccacccagcatattactcaccgacgatgccggcacattcaggtctttcatctccaccgaagtgatagcacccgttacatttatcttcttctgtaccttaccggaactggtaatcaccacttcatccaatgcattcacatcttctttcagtacgatacgcatacgctcgtcggtcttagtcatcactactttctgatctttaaagccgatatatgagaatacaagcgtctgattcttcttgatgcccgtgagtttaaatcgaccgtcggcatcggtgatacctccgttactggcgttttctttcaccgatactgttacaccgatgagtacttccccccgttcgtccattacagaaccaccagccactatattggtctgggcaaaggcaccggtacacatcgtccatgccaaaagttgtataaggataaatttgaatttcatggatatactttgtttacaggtttattctatagttagtttacgtaccagtcgcttgtcgcgatcagcaatgtagaaattgtcttcatagtcagtgacgatggccaacggttggttgaaacctgattcgagcggttcgttcgatacgcccgtccaccaggcattaggtacgccagccactaacgacaccatatcacctttaattttgaggatacatgaacccgatttactaccaaaaaagatttcaccgtccttatttaccgcaatacccgaaggactacgtagcacagcatcgttcagacgatgtcccagcacaatattatcaccattgttgaatccggcaaacttcttagcaatccacttaccttcggcattttgagttatcttgaaaataccgtttccgccttcatgtgtggcaaagaagcagtgataatatttactgtataccagataactaatccaattagtacctacgttcacaccatcccaatcatctttctccaaaaggcgttcgaaacttttttctaccaaatcaatacaacccatgtagccgtcacccgtcatcacgtaaagatagcggtcgtcttcagcaaaagtaagtcctcccactacgctaccccccgaaagcatgtcattggtgatggtaaggtcagccaccggagtagctacccaaccgtcagcttttgaaaagctatataccgagcgattgccctcgcgccctatcacataaaatttatcacgcgtactggtcacagccggtccaccgcaccatccaacatcacctatcttaatcatcttattatcgtcgagcgagatgagactgatacgtgactcccattccccttctaccataataatattatcaccatcttgtcccgtcaccgtacctaaacccgtgggattcttgatgcgagcctcatcgaaagttccttctatatactcatcaccttcgttttccttgcccacaatgttcttaagtgactgtttctgataatacttaaattgaaaatcagtaacgatactatcgttgcccaccacaaccgaaaggctgttgagccccggataaagtttaggcaccataccatagagttcgcgcccatcacatcccaacactactgcctttttaatgccgaaataaacgcggatgttggccgtgtcttttgggaagttaccgcgaatgagatagttttgatcaatctgtccccacgaaggaagcatttcactgattaccacaggtttttgtgggtcgtaatagttgcccgtagcatgctgtttctctattatctcactcccattacaggcaaagagcgacagagaggtcagcgtcataaaaagtgtctttttcattttatataaatattagtttatggataaaatttctcacaaaggctttatttactattctttcaccgaatacatcgctcagcaaaataatcatcattactgtccctacgtgtaaagtaatcaaagggaactttgaattttctcgcctgaggtttccgcttgttcgatagtaatccgaaaaccaaggtcattcccctggccaaagttgtcacaagcaacaaggcagggagtaacttaaatgaatgattctttttcatggtaaaattttaatggttcatttggatactgcaaacatagtaattgtgtcttttacaataacaataacactgtttcacaaataacgaaggatgttccatcttaattttcaatgttccataaaactttgccaatgttccataagagttacatcatgcttataatcaaggaactatataatgtaataaaacagatataaggttaaagattaagtctactttaaaaagtttagcttacattatttgcccgaggtttgcatagactcaagctatctaaaaccatagtatgcaggtacggctgatataaatatatcagccgtacctgcatactaccaaaatcaactataacaatgtctgaaaaaacaatacctaatataattgagaacctttttcaactttatagagaccttctatatagtctccaacagtatccaccaataagcaatatcagtaataatgtaatgccaaaagcccaataattaactacacgggattcggcaacaagcatataatcactgtccaaaagacgaaaagcatctactttccaaatgagtgactcacctttttgcatggctgcattggtagaaaccaccctacccggcatggataactcaaactgcacagcataaccaaacaattctgcaatccgccctttttcctcaaacagatcatccattggctttttattgtccgcatataaacttgagaaatatttcgtttgactcaattcatccagataattgcatacctcttcgggcgatccgtcatcaccggtatcttttccggaaaagtacttcccataaaccggttccttcagatctgccaactgatgtacaaaggccgtatctccttttatcgtaatgaaatgaagaattacttcacaactcagttcatactgactacggttataccatttccagaatttggcttcaatgtcatccaacctattattctgttcaataccatttaatccgatcaaagcctcttgatctccccgaaaccatatccgctgctcttctttattcatataattttcgagaggtaccggacctttatcgggtaattcaccgtaggtagccgtatactgataatatgtatagaaccagcggaagcttttccggagtttttcaaccggaactaccagaggaagactgtattcctttccatccaaagtactgaagctatcggaacctaccgttggataagtccggcaaactttcacattcagtttgtcttcatctccccagcagttgaatttaacaacagagtccagattgctcacttcccatcccgaatctattcggaataaaaacggattatgattcctgtctcctgcaaggaaagcagagtcgccataagcatatacctctctgtgcatgctaccatcactatttacctgagaaaccattcggtaataggtaccgcaagaagtcataccgagcagcaaaacaatggctgccatccatttatacgttctcataatgatataatttaataagttttctttgtaagctccattactctcttttgcctgagtttcttatactgcacatactgtccggacaggtaatcgctcttttcagaaagcctcatcctctcccagccttccggtagggaataagcactgttttcctggaaacgatattcctcttctactctgacaccatcgggaaccggactaagaagagtctcactcaccaacaagcacaacaaaagtcctgcggctatcccggatacccaactgccaatcagcaggcttttccttttcttctttcggggaactatcctgctcacttgctgcaaaatggcggtagtcagttcatccggattgctcaatataggctgtacatttctcacctcatcaagccattcattgtaaagtttatcatcttgtttcataagccagcatctatttgattcattttgtttcgtatattcttccgggccaggtaaagggtggttttaatgattccggcagaaagtccggtgataatttgcacctccggcacatccagttcctcaatatcccgtaatgtaaaaatcaacctttgccggggagacagctcatcggtatatctcaggattagttcacgcagttgcttgttcaccactgccaattctacattatcatctgacgagatattcgcggaaacggaataatctgcttcattatcgagtggtgaatggtgcagggagcgcagacggtcataacaggtattacaagtgattttataaagccaggtagagaaacgacactcaccattatatttacccagcgccagccacacctttacaaaggtttcctgtaccatatctttagcttcatcttcgtcgcacagcaatcggaaagcaagccggaatacaagtggctgaaacgtagaaaccagcagagagaatgctactgcatcctcctgctggctcctacttataagctcttgtatttttttctggtccatcataataatatcttcgtttattatatgatacgtaagaaaaaacttccggtcaataaacaagagctaaaataatacttaataatggaaaatatcaatctttattcccgaaacgcttcttcaaatatttctccaggttataagttcccggagagtttcgcaatacagtaccatctttttctatccactcataatgaggaataccgttgaagtggaataattggcggagatagttgtaatctgcctgaggaatacgatagcaagcctcacccttcagattcttttctacatattcattataagtcttttcgggactttcacgatcactggtgatgtatataaactgaaattccgggtgatctttatactgttggcgcaaaccggcagtgtgttcaatgccactacgacagggaccgcaaaacgttgcccagaaatcgataaacaaagctttacctgcatgggctttaataatattacgtaagatttcagtagcaggcccttcaggcaaagcatacgtgctatcattttgtagcgggaaagcttgggcatacaaacgctccgcctcagcaagcatgaacggatgattgattagctgcttttctttatccaacagactacgggcaccttctctatccaattgttttaaatcaaaaggaagacttcgcaaagcaatgatctgcgaaaccaacgggacatatccgactatggtatccaatcgtcccgatttctctctttgattttcaaagaattgatttattctcattattttttcatcttctgctttctgattttcatcaatagatacagaaacatcattcattacctcattttcctttcgataagcttcgaataaatccttatatttttcgctaagttcttcccatatcttcgtctccgcaatgagttcgcttatctctcttgtcacagtcttaccagctctgtcttcactatcttttctcattttttcctgttcaggagtcaatactacaccattcttcttcaaataagtaaggacagatttttcaggatatttataggcaatctttcccatttcaacagtcgtcgtatcacccatagcccttgcaaaattcatatattcaaggcgattgataaaactactaaaattcttatccgctacgataatgctgtcattaagaggcatctgtcgtaagaagttataataagccgaatcttccttaaccttcagcacctcattatctttattctcccgcgccagataacttctgttcataacaaagtcgaacatcttataaccttgagaaatccgtgccgtatttctcaccaaacgtgccgctcttcccacatatcgattggcagcaacaagtgaatcggcctgctccgaccaacgacgaaacatgggttcgcaacgctctacaaattgtgcaggggtcagttctttctgcattttcgagaaatcttcataacgaaatacgaataaatcatctacatatttcaatgcctttcctatatatgcggtagatcccatgtaatggacattatgaagaggataataatgatcacgggcacggctacgggccattacagcttcccagtctacatacattgttacagtttgtcccggctctatataaaagggcaaccaatcattattgaacacaaccgaacttaccataggatagttgatctcaaacttacattcaaaccttccattaggttgcagagttaccaccatcggataatcttctcttgtcaggtcattggaaacataaatcagaccattggtaaagcctaatttctgatcatagccggcaatgtatccttgcaggcaaacactatcccgacggaataccggactctcattctcttcaacctgcatcgccttcatgcttcccgtatcccgcgaataaagccgggcaggttctttatctttccttatccggcacaaaccattcttttgcggggtaagttccagctccactttatcgccccggtcatctttcaaagtcaacagcatacttttacctttctgacggattgcttcgtactgatagaaacgattgtccatgacagcaagagaatcgtatataccaaaagcccattcataatagtcgtccattcccatccagttgccggagactttatcgaaaagtgaggctttagcatcttttttctccaaagatatatagtacgtattgagttcgtcatgatcagactcaagcaaatggatttcttttgtctccttaggaagtggaggaaaaataagtacaaaatccaacgtaccggaatctggtgtatatacttctttttctaattcaaagttttcactaccggttatataatacttcttaccagtaatcgcatcttccaaatgagtatctttgcctgtctttacccaccaatgcggacggaaaataacatggatatgcaaccttgttgcatccggagtacgttcaatgcgggtaatattataaatgctgcccgaacggaatttaaacttaggattatcaattacattttgtgcctgaagcatacaagcgatgcaaagcaggaaaaggaaaataagctttctcatggtatagttgtatatgattaatttctactaaaatttaaaggttgctcactctgacaaatataagcaataaaaaggaaagactttttattttaaataaatatttttcaataacttatatttaagagtaaagtatccttttggaatgactacaccctttatatgaaaaggtgtagccatgagagtaaaagggtgtagccatccggacaaaaaggtgtagccctttcaaaacagggttataaatacctgtaggctggattatatcatccttataaatatgttttctaaaaagttagttgttcacttatgtaaactaatcagattttatcatcgttattacttcaatatggcaaccttctctcttcccacaatataaattcctgcaggtagttcccggatcacctcacttctgcgcacctgagtgcgaagcttgattcccgtaatggtataaacatctaccagaggatctttatccacggtcacatccccgatgcccgtaggatcttcgtaatcatcggaattagtcagatagactttatcgataataatagggctgccgccgaacgaccagaaacctacgccataaatgtggctcggatcaagtttcactttagaattactcttatacatattattcaaatcaacaaccacttgcttactgttcttaatttcatactcagcagctcccgaccaatagctattctcatcaaataaacgaaatgaagcaccgttgtttgagttatcattgcctatttttgccacaacgtatttatattccgacaaatcaataccgttatcgtaccaccagccaccgaaaccatactgtccggtcaccaatgtatgtgtattctcatcaaaagaaccagtctcccaaatattgggattaaacagttctgcagttagcggaaaagtagaagaagtgacgtgaatctttaaagactgacggtcacccaacgggcctttataactgataattatatcactctctccatcttgcaaagccattatacgtccgttagttacacgtatgacatccggattctgattttcataatcggccgccatggtaatatcttccgtatgaccatcggcatatattcctttcactgtaattgtagaagaacttccggtaagcaaagtgagctcttcttttccattgatggtcaattcggttaaggtcaatgattcttcactatacccctcaaaagagtcgtcaaaatagaatgcttcatcaaactccggttcggtagagaaccagtctacatccacatagcctcctgtctgggcagttgcataattaaagatagcgaacttattgcctgtgaataccgtcagatcatacttcatgttcaggtcatccccaaattttgtataggtcttgttgtccaggctgtaataaaagcttgccctacttgtgttgtaattggcaatagcgcgcaaatagattacctgttcagtgaccacttctcctatctgctccgattttgcagccgacgatactacaggggcagtggtataaaccaaccgcttctgcccatctatgactttaacgccaataaacgcataagggtcctgaaatactgccaatcctgccacatcgccttcctgcatctcgcctatctccatcctgaccgtgccataggaatgttccaagtcctgaggataccccagaattctctgagtcaatgtgttcttggctttatgcaggctgtcggtaacatttgccgtatacaaccgcaaataaccggcatgttcagtcaacgaccattttgatctgtccgcattatgattccatccccattgcaatcctaatttatagtgcctgaaattatcattggtaggcaatgactttatggggtattccctgccaacatcgggcttacgataggtagtgactccttttccgttctcacctatttcaggccagccatccacccattttacgggttgcaggttagggaatcgtccataagcacctttatcatagaaaagcatagtccaccactctccggtctgcgtttctaccaaagctccctgatgaatgttgtcatcgtctatcagcttcttttcctcataaggtccatagatatccttggagcggaaaacagtttgaaaagcaggccatcctccatacgtagagtaaatgtaataatactcacctatcttatacaaacggctcccttcaagcccttcgcggaaagaccatttaaccacatccttatcactgccgggaattttattgaaatcttcatccaattcggctatacgaagctggttgataccgtaaactacgtatattttatcattatcaaaaagcaatccgcaatcataaaagccatcatttagcttcttcttttcccattcaccttcaatgtcggtagtggtcaataggtatccaccttcatccagtgtagtaaacaggagatagaacttgccgttatgatattgaagagctgttgcccactggccacggctgtaacgattctgaccattttcaagattataaccatcggatgcctctatgcgctccaacggattacagcaatactcccagttcaccaaatcataagatttcagaatggtggctccggggaaaatgtacatggtagtggataccatataatagacatcacccacacggattacatccggatcaggaaagtcaccgaatataacaggattagtgtatgtaccatccccattatcactatgtgactgataagtaaaatcaggacgtggataattttcctttgcatactcctgataccaatgataggtaggccacggacaggcttcgggatcggtcaggaaggtgtacgcttctccctcagcaggtggagtatccttaaattttgccaacaaatcagcacccgtaaaaataagccagcttacattacccgaattatctacaatatgtttcatatttgctccaaaaccgggaccaccgaatgtaccggtatgagccttcccccacgaagcgttatattttgacggtgcccaatccatttctgttatcatgataggtgcgaatgatgctaccggagctacggaatcatcccatcctttctggaaaggttcatagcctcccgtactggaaccaccatccccattttctccatcacttcccatccaacccggataaagatgtaccgcataaccgatgttatctccttcgataggattgacggcaaaccctttatacaacccttgataacccagaccaggtatccaaagaatgttaccgcaaccttgtgcacgcatcgcatctaccaccgactgaaaatactctttcagcttatcgaagtgtccctgcgaaccggctccgtaagtaccatcgggaccaagtatattaatcggttcgttggccagttcaaacataatgttgggatgattcttcaatttcggatgttgggctacgtgtgtccatactttaatgagatactgattatactcatctcccacagctattttttccggacatactccgggaggacgcattactacataaagtcctttcgagacagcatattccgccatcggaataaataccctatcaagatagtttttaaaccgattgaaatcgaatgctgaaatgtcattctctccttctacatgaattcccggagaatttgaccaatacgggtccatatgtaatcgaagaaaattcattttccaaccggcagccataatgtcgtcaatcaacccttgattgtatttcaagcatttctccacatcataattgtcccacttctgccccatctcattgaaccacggactataggtctgtgcaaacccatgcaggttcactttattcccatgcgggtctaccaggtaacggccttcaacatgcagtcgaggcatcgacatatcttcccatgcccaaagtgcggaagaagacatcaaacagcataaagctataagaaattcgtaaaatacgtttgtaatgtttttcataagctatatatttaaattacttcaacaaaaaattaataagaatcgctatgccgcgatattactttttcacctgaataaatgagattacccgatgtacaaacaccttctatcactaccccataatcggcagcagaatcggctgtataaaagctgacttgaacagttcccgattcatcaacctgcacgctcggattccagtatatcgtagaacgtaagtctggcttgacggattctttctttgcttccgtgtcatacgccggtgagtagaattctacagtttgctgataacctaaagtcgtaatagtctgcatgttgctattcattttatttttctgtataaacccattcttcgtagtgactactatggcaccatttcccgcagccgccccataaagaggaccgacagaagtggcaggggagtaaaaaacatctttgatgtcatccacgtccaacaggtcaaaatcaaagttttcttcgggaacattgtccagcaacaccatgaccggagcaaatcgataacgcacctcattattcgtgatagtaatacccggcaaacgtcgcaagaggtcgtatgtagaaataaaatgtcctttttttacatcctcttccgtcagcaccttcgaaactcccaccgaataaaagggagattccgtttttacagctctctctcttctacctgtcactatcacttccgccagattatagactctcattccattttctatagtatatttttggtccatctttgccatatagttttcttctatatgcggcttttcaatgcggggaatacacccgattcggggagcaggaaacgatttgtaaggatccagttcgataaaaacttttgaagaacctttcttgctgagcgcctggacaatatagtgagtaccactgggatattccagtttattgaatacaaaccgcccattccggtcaggcttcgtcagttctgtcccgatgagtgaatctttaagggcgagcaaagagatatttccctctttcaatgcagaaaacaagccctctactttaccggaaacttcatcacccagttccaaattatagggcaatgcgctggttacgttgcctttcaatacctccggtatgttgtatttccgccagccttgtgtcatcatcagcaaatccagggcataggaagaactgcggttgtcttgcaggtaactcaacggtgactcaatgtgtcctttaagatcggaagtgagcaataaggtggaaacaatgttggaaacggtatccggcttcacgtctgttctgtcaacaactgcaagtgcgaagttgcctgacatggggtttccatttatatctttaatctgtatatccatatctaccttctctcttgccaagtagttttcacggtcaagccagacttcagtctgcgccagtgcacttttttgcagagaaaacactaaacgttcgctcagaatatttctcccttcatcaaccagcagaaaatgaacgatgcccgccggaaaaaagtctttttcaaagtcaacataattttgtttatcatcccagggttgtgcatacagaacgatgccccgcaaatgcgccaccagtgtcagcgaagtgcccaatggggtatcgggtgatttggaaagacttacccgcaaataatctttagaccaaagtgtattcagggagatagcatccggagaaggttcgggcaaatcaaaacgcttggaaacgcctgttccgccactacaaacggcatgatacttttttccgggaacataatacatccgaaaactccccatacccaaatgctggcttttgaaatcggcacatacctgaccttcttcgtcaaatacttgaccttctacctctgtagacaaaccatctgcatcgatggccttaaatgccattttgattgtggtggattgagctgcatgacctccttcggggaagaaagccacatcaaaggttttactcaattcggggattctgaaatagcgattggaaatttttccgtcatacactgtctgtaacaaaaacgtgcgcgaagcaggaatctccttcttcttgaaagtgtaatggatattttccccttccaatgataagacttttccttttttgtccctgtctccatcggggaaaagaatggcttgtgtgggagtgacggatcggttgtccggtttactgagaaaatgtatttccgcatgaacgtcattgttttcagcagaataactgatttccggagatatcgcttcggatacgggatcggatatataaatcagtttatggggaaagtactcttcacctatattctgcatgaaccaagtgtaggctctgagagaatagttgccttccggcaggtcttcacccaatggaatatgtccgtaaaaacaccccaaagagtccggtcttattttcactctctccaccaagttgcccaacggattcaccaactctacatatacatatcgactggcattagcttgctttagcataagggcatctactaaatgtgccctgaaccaaagggtttcaccggacatgtaaatgccacggtctgtctgaaggtaaagcttttcctgagggaaatgcgacatttgctgtagaaaaaggttttctacactcatagaatccgtttccactgctaatggtgcttgtgcaaatacattttgcatacacaggaataataaagagaaaaaataggttctcatgatatagattttatataatttacagaaaatggtgcttctcacgaagcaccaccttcttaaactaatggtaataaaaaatgcaatctaactttaccttaaaatagaatcttttaataatcgtactttctattttcttccatccagtcatttatcttgcgtacttcatcatcgttcttacgctctttatacacaaatccccgggttttcttcaacataccatcctctttgaaagtataccacaaatcgtacacttccatttcgggataatacttaccgccaccactgacaaggttaaacttatcccaagacttcaaggttactgaattatccggatttacggtgatattaaagcaataatcgggtctgtagtctgtagcacctttcgaccattcattcttttgatgatacatacgtacagtgttaccatcgactacagcttgcaacgtgcgaggcgacttatagataacggaatcctttggattatcagcaggcttaatcacaccgtccatataataaagccctgaatagtcattcatcagattcagacggattagcaccactgtatcttctttagccagttcaaaacgagatgttccactaagtttaaacgccatcatatagagcgaatctatatgcaaagtggatgggtcaatgtgaacaggatacgtgccataggcttcaccctttttcacaattacattttcttgcggaaaactatagataccatttgtcaacgtacgatactttatatcatccgaaccaagttctttctggttataactttcaataccagaaggaaattcttcaacagtaacagttatatcttccttggtaggcagcgaaccgctgatggcaaccgatgcatatatggtatctttttcataacctatattcagatctctatttataatcttatcttttgccccaaccagataaaccgtttcgggccataaattctcttccataggtattttattgtcgcaacctgccatacatgccaacagcaaggttatcgaaaaaaatgctattctcttcatattatcagcttttattgttttcattttaattccatcctgggttctgtaccaacttaccgttctttctcagcacatttctgtcaagcggccacagatacatcttgttggaaaacatacgtttcatggttttttctgtattccagattctttctgtatagaactgttcgcgttgtgattcgcgagcacttacatccaatcctctgatgggtttgttgtaagcgtcataggcatctttccaacggcgcaaatcccaataacgatgactttcgaaagcaaactcaatcaacctttcatgcttaattagttcacgcatcctgctttggtcggctgcatcggcagttgtgattcccggttgaccggcacgataacgaatctgattgaaatatttcaccatttgatccacatcacgagtaaccgtcacctgcccatcttcgtccgtatacgaaccttccatttcgttcatcgcttctacataccccaacaatacttcagcatagcggaatatcggataagtcttcgcttttaccactccattccaaaagatacaatcatcctgatgcacatatttccggcaggtatatccggtcctggttctgttatcattattattcatatcagatgcactacctccgtagtaatagtcggtaacatagtttctggtacctgctgacaaaccgtcacggtgggaagttgtaggccagatacaagcattgaaaccaatagccgcataaaaacgcggctcgcgaccatcatcacgatgagctctgtttccggaaagaagataatctgacgagaatgttttatcttgtcccactgcctgccatgatttttccgcctgagtagcttcactaaacggtctaccgtcagccatccggtattcatcaatcatatctaaagtaacactaaatgaagatattccccccaatttggaaggtgtcacaagaatatagtttccattattttttgaaaaatagatgtattctttaaccaactcaggctggtaagtaccatcaaacagcgtcttgtatgacttataggggtctatacctccggctccatcagggaagtcggcatcagataccgtctcgggaagaggcaatgtgcctgtacccttttcattcactattttggatacagtatgaatggcatacttattcatatcaataatccgcttgaacgtggcggcagcttttccccacttaaccttgtcttccgtctgggcaatgaaattcctcccctctgagtctttccaatcggaatagtaactgttaccattgaaaagggggctggcagcatagagctgcatacgagctttgaacgccaaagcagcacccttggtaggtatatactgcaatgcatctatacgacttgcaggcagcaatttagctgcttcttcaaagtcggcacagattttctctacacactcatcgtaagtggaacgctcgaatgaaactgacgctacatcttcgtccgtatcgaaaggacggtcgggaagtacaactacaggcccgtacaatcttaccaaatagaaatagaagtaagcccgcagaaaataagcccttcccttgaaatcacgcatttccatctcggtaagctcctggtttttggatatattctccaatacgatgttggccttacggattcctttatagcactcgggccacggattaaaccatgagttcgtttctttcacttcatcataaagtatagcatttccattcgttacgaacggaacgattgcttcatctgagcccaatccactgggcaatgtagaagccgctccccaaccattcataagtattgattcatcgggaagaagagcagccgctccattgatatactcttccgttctggagcgggaaaggaaaatggagtccagtgtggtctgatcgtacacatattggtcaatgtccaagtatttttcgcacgaaccgaacataatgcttgaaaccaaaataacggttattgcggctattctgccgagaaaaccgaattctcttttataatttccaaattttatcataattgtcaggttatattagaatgaaagattaagctgtaaagtatacactcgctggaccggatagactgttccattatctcccgcttgtgcaggatccagcatcttctctttagaccaaactgccaaattgtctccaatcacactaattactgctttctggagaccaaactttttcaggaattggttcttgagtgtataagagacttgcacattcttcagacgcaagtaactaccatcagacaaccaaaaagaagatgattgactattattactgctacctccataataaagacgagggtacttggcgttcggattctcggtggcagggttgcctgagatctcacgtgaaatccatcggtttgccgggttggcaaaatctgtaatcacattaccggctgtactacccgagaatggctgatacatatttccacctttaaaataggtcacgcggcttactccctcgaacaggacacttacattgaagttcttccagttaaactctgtggcaaatccatactgtatctgaggcacataagaatacttcaaaggtacaatatcatcccaattgacaatgccatcgccattgacatccttatacttgatgtcacccggcaagtaattgccaaaatcctgacgaggactattatctatatctgcctggtctttaaacaagcccaaagctatcaagcctcggttaactccactttgatatcctacggctgattggtaatcgtatttcttaaggtcttcctcgaaattggtgattttgttcatggactgtgtatagttggcacgtacaatcaggtatttgtcattgtcacccaaagattgcgtatatgagatatgtccatccataccccagctcttcatttcacccacattggcccaaggcaatgacggaagtcccatctcttccggtacactctggcgttgctgataaataccggaacgtatatcctggaagaaatcgactgtcatctcaaaacgttcgtggaagaaacgtgcatcaataccgatgtcagctttcttggccttttcccagcgcaggttgctggaacccacttgcgtttcggtcaagccggaaccgttattccaactgccggaacctgtgtaaccaatcaaagtaagatagggaaaacgtaccgagtcgtcccaagtgaggcggtcgttacctactataccatacgaagccctgattttgaaataattgataaaattgtccttattacgccagaagcgatattgcgtgggagcccaacctatagaaacagcagggaaccaaccaaatttcttacctttctcaaaagcctccgaaccggtgtaacccatattaaattcggccatataagtatcatcatacgaataagagaaacggcttgagtaactattataacgtttagggatagcagtcagcaattgattatatttcgatgcttcataatcgctccattcggccttcaccaaggcacccaccttatgtaccttattaaatgtctggtcgtaattcagtcggaaatcccaataaattctacgctcagtgtcattccaatttgtataatagggctccactgcatcagatattttctccaaatcgagtgttccatcacgtttataaccatgagcataataaatggccggcattttttcgcgaacttgggttctcgcacctatcgaattaatgttgaccaatcctgcaatactcagtccgggagttatcatcttcaaatcctgattgagctgcatcgtgattttattatcattggaatagaacttgcgataacccgtcatattcaacaatacatacggactaatattcgatttatcagtgccatatccaggtgcctgccctgtggtgtacatcaacggtactgtcaccggagtcagattggattgtgcctgccacaataccttactgtcgtttccatatcccggataattctgagtaacaatcacagtctcttcattcagcgaaagcgtagtggtggaagtgacattcacatccacattagcacggaaattgaacttgttgtagtttacgttcgtattgtatttgtttacccctttatcttgtttaaagatggcatcttttgtcgtaaaaccggcactgatgtaatagcgagctacttcaccacctcccgacgcactcaggaagtattgctggttccaggtataatctctcaagataacatccctccaatccacatccggatgaaaatcagggtccatgtggttcctgaacaaatccacatccacatcggaatagacaggaatacgtccacgtgtcacggcagcttcgttggcgagtgccgcatattccgcagcacgtacatatttgggcattcgaggagaataagagataccggcatttgcctttacctgcaaattcagttttccggctttacccttcttggtacttaccaataccacaccgttggcaccacgtacaccgtaaaccgccgtagaagaggcatccttcaagatagagaaactctcaatgtcttcgggatcgagcgtattcaagttgccctcgacaccgtcaatcaacaccaaagctccctgtccggcaccaaaggtactgataccacgcacccagaactcggagaaatccttacccggctctccactacgtgtaacggaaatgatgcccggaacgcgtccgcccaacatgttgcttatggaagtggcaggagttttcagcgtagctacctcaactccggtaatggcacctgtcacattaattttcttctgtaccttacccgatgccgtaatcacaacctcatccattacattcgaactctccttcaacactacgcgcatgcgctcgttgctcttgttcatctttatctcctgaggatcataccccacataggatatgaccaacgtatgcccaactttgataccccctatcttgaaacgaccgtcaatatccgtaatagcacccatagaaggaacttcctttacagaaatcgatactccgattaagagctcgcctttctcgtccataaccgaacccgaagctaccacagtctgttgcgcataggccaaattcatagaacttacccatgccatgagaaacagtaatatatgtttaatcttcatcttgattcattttatatgatttctacttttattcaattgtcattttccggattgcatttgaagatcgttcacaaatgaagaagttctcctccgaatccaaagcaatatccactggattatcaaacattgcatccgtagggaatccgtttagtcttcctgaccgatcgggaactcccgctaccaaagaaacaagccttcctttgattttcacaatgcaatggctcgctttgcaacatacatagagttcaccgtaactattcaccgccattccgcaaggttgtttcaatacggcatccgtcaatcgatccccaaaagttgtattcaaccatcccggttggaagccggcatagcgttccacttgccatgcacccgaagtatctttccatatcttcagaatgccattattctcaggataagaggcaaaaaagcacttatcatatttactgtaagtcagataatgttcccactgaccgagattcactccattaaaagccgggtaatctgatggagtaactaattttgtataacttttatctgtcaaatccacttcataaagaccatcatcggacattgcatacacatagcggtcatcctcggcataagtcaatacccccacgcaactgtttgaagaaggtattttgagaccaagagagtttatagtccatccatccccacgggtggctgtgtataactcacctccatcacgaggcatgatgctcactttttctcttgaattatcaactgcaacagaacccataaaaccaatagaagtcagacgcatcaccatattatcctctaatgacacaaaataagtacgatcgccccatactcctgcatagaaaatgaaattatcactcttttgtcctgcaacagctacaattcctgaagaatcatccattcggaattcatctattttacaatcatttgacgatgtccaggtattttcaccaaattttcccaatattgttttcacagattgagtctgatagtacttaaacttcacattatcagatgtataccttttgccatccacttccaatgttatctcgttatagccgggaaactgcttggggataagcccatacaattcatttccgttgttgtttactataaccgcttccttgtcggcaaagaaaactttgacttttccggtcgtgtcaaccggaaagtttcctttgataataaaagagtcgttgattcttccccagtcgggtgacatggattttaactcaataggcttgctcgaatcataatagttgcctatttcaggccatttctcaattacttcttcgccattgcaacttgcgaacaaaatacttaagaaaagaaaaacaaaataaagcttgttgttcttcataatatataagtaatggggttctatgtttttcattaataatagtagccattggcaccagcccccctttaaatgtcaaagccacatgaaattcattacagattaccgaaagtgatatgtatcgctacggttatctctaattttgcagtctttacataaatagctgacttaaccgtcatcatcatacatacatttcataagattaacttgattagatttaacataacaataactccatcgacatacattccgtacatcgatgcacaaagctacagaagtgtacccaatacacttttagatattagatatataattttagatattagatattctatactataaacgataaaaaacaggaaaaagaagtaaattagacctctgtaggagacttgccaaagtactttttaaacaccgtactaaagtaactgatactggaataaccacaaagttcgctaacttccgtaatagtgtatttatgagattggagtaattctaaagcccggtttaaacgaatggatttaataaattcaataggtgatagacctgtcagtgcttttatttttttatacaataatgaaccgctcacatgcatttccatagcaaagctttccttatcaaaatctaaattttgcatattattatggatcacttccactgcttttttcacaaaatgatcgttaagctcattgtccaaaataacctgttgattatcattatccgactttatcaatttcaaagctctctctctgacgatttccctgttccgcataagggactttattcgttgctccaaaagtgatatatcgaaaggttttgtgatatagtcctctgctcccaaacctaaaccttccaactggtcacttttatcacaaagtgaagttagcaggatcaccggaatatgcgaagtttcaaaagtagatttgatcaatttacataactcaaagccatccatatcaggcatcatcacatccgaaataatcaattcgggagattccttttgaagtaattcccatgcttcattaccattgccagcctctaagatgttatattgattttcaaaagaacacttcaggaagttccgcaaatctttattatcatctacgattaatatagatttcttcttttcggacttatcatcttcctttttatattccgattgatcagacggaccatcagcagatgtgatattccccggctcttcatgttcagcaggtgcaacctcaaccacttctttataagggatgtttattttgaataaagaaccttcattctccttactttcaagtgagactttcccttcatgcattaaaacgtaattcttcaccaacaacaggccgatcccggaacctaccatacgtgaattaaccttattatctcctctataaaactctttgaacagcttcttttgagcattatccgagatacccaatccataatctcttacctccaagctccaatagtactcattacaattcaatgtaagttccaccctaccattcgtatgagaatactttatcgcattagatatcaagttatcaaccactttctctattttcaattcatcgacagctgacatataagattccctgttagagacaaactccaatataacattcttttttcccgccgtagacttgaacattgttttccgcctgtacaccaatttaacaatatcaaccattaccagaaacagttgtcctttccccatatccactttctgaaaatccaagagttgggttgcaacattagataaacgttcagactgttccgtagccagattcagataataatgccctttgtctgataattctttctctttattcaattcctgaataggcgcgtttatcaacgttatcgatgtacgaagatcatgagccgtatttgtgaaaaaacggattttatcttcagcatgacgctgtttcaaacggtttatatagaatttaagcacaaagaatgtaatgctcattataataatgaataccaccagacggaaccaccacgtctgccagtaaagcggaataacgtgtatgtccaatgtacgttcatcgactatctgagaaagtgaattattgtacattcttactttaagccggaaattcccattaggaatattggtataagtgattatctgctgattggaaggatgtgaccattctgtatcaagcccttccattttccatgaaaattttatttctttggaagaaacgccaataggcaatacctcaagcgtcaaagtattctgatcatatttgaatgaaatatctgtttgcttattcaccggaattccacgcaacaaatcttgattttctctgatagaactaccggaaatagtgatattctggaaataaatctccccgttgagctgggtatgatataatttatcggggttaaacattaccgccccattatttgtaccccacatcaattcgccattacgtaatttgcagctggcattcacattgaatgaagcactggagagagctaaagtagaataataagcatgcaccgtgctgtcggcaggattatagcggcacaatccattttccgttcctaaccataaatatccattatcatacatgacactattcacatagttagatggcaatccggattccactgttattttatgagtttcacgagtcgtgtagttatggtgcagcaatccgtctccggaagtagccacccaaatatcatctcccattactaaaatatcctgtgcaagacattccggtaagaaagtgattttccctgtttccttgtctagcaaaagcacagaataagtacaggccaacagcatttttcccggagaaaactccataaacgtacgcatgggctgtgcaccatacgtatgaaaacgcttttcttttgttaaatagcatattacatcttggatacctccaatccagatatcaccctcactgtccttatatatattcattatgaatttaccgtcagatttcaaatccgatgtattccgcggataatgaaccaattcttttccggtattccgatctaaaacataaaacccggatgagaacgaacctgcccagatatttccttcgtcatcttcacataaagccagaaaaacctgtgcctgttcctgtttattctgataataagtatcccattcattagtggcgactctccacctgcttatcccattatttgtagcaaaccagatatcccctttgctatcttccaatatcttgtttacattatcattccctaaagaattcggattattaacctgatgggtaatttgattaattaagggagatttccagtcgaagaaagaaagcccaccagtataggtagtgacccacaccctctgctgaccgtcgcaaaagatgtcataaaccccatctccacgaagagagaaaggattatcaatatcttctttcaaaatattcagaaccgtttttttatccttatccaattcccatactccctgcccgtcgattccgactaacaatgttgaatccgaactttccgttatcactgcgataggttgctttgggaaattagaaaatggcaataacgttttctttttcatgtccaaatagaaaagaccatcagtggaagttcctatccatacaacctctcttttatgatcataaaaaagagtatttatctgaaacatatcttctattccacatatacttttttgtttcaacgtatttgtatttaataatctaatactgtcttgactggctacaagcagatgtgtctgatcataagacgttatgcactgtgttcgaattggcgcctcacttatttgggtaaatattccatttttatatttgcacaatcccccggacgtaggaatccagagagcctgttcatcatcaataacaactttacctacacttaaaaaagtattattgaaagatattctaagatccagaaataaatcaaaccggtcatacagttcattataatgaaaaaattgcccattattcgtatatgctattaaaaatgaattattataggccaatttgacatttattatattggctgttttataaggaagctgataaatgcgataatcactttccgtaattctcaatatacccgttttagaggaagcccagataaaaccattcccatctttacaaacagaggccatctcccgcatggaaattccatacatcgtattaatattataaaacttcacatccgaagcatatatattaaaaatagaaagaaaaagaaagaatataagcagtcgtgatttcataatattacagttagctgctgcaaatataatatatttgaaagcaatcaaccaatatatgcattattttgtctaattttgcacctcgtttcacaaaaagtacagattatctatgaaagcgttcgaattcagaccaaagctattcacggctttgaagaactactcgaaagaattattcatggcagacctgatggccggtatcatagtaggtatcgtcgctctcccgcttgccattgcattcggtattgcatccggtgtatcacccgaaaaaggtattatcacggcaatcattgccggattcattatctccatgttgggaggtagcaaagtacagatcggtggtcccacgggagcttttatcgtcattatctatggcatcatccagcaatatggagaagcgggactgattgttgccacactgatggcaggagtcattcttatcctgttagggatattcaagctgggtgctgtaatcaagtttatcccctatcctattatcgtgggatttaccagtggtattgccgtcactatcttcaccacgcagatagccgatatcttcggacttaatttcggtggtgaaaaggttcccggagattttgtcgggaaatggatgatctatttccagcatttcgatactatcaactggtggaatacaattgtcagcatcgtaagtattgcaattatcgccataaccccgaaattctcaaagaagataccgggatcgctgattgctattattgtagtaacggtagcggtatatctgatgaaaacttatgctggaatcaattgtatagataccattggcgaccgcttcagtatcaaggcggaactgccggatgcagtaatgccttcactaaactgggaggctattcaggacttatttcctgtagccattaccattgcggtattaggagccatcgaatcgctgctttccgctacggtagcggatggtgttatcggcgataagcatgattccaatacggaattgatagcacaaggagctgccaacctaataacgcccctgtttggcggtattcctgccaccggtgccattgcacgtacaatggctaatataaacaatggtggtaaaacccctgttgcaggtatggtacatgcagtggtactattacttattcttctgttcctgatgcctctggcacaatacattccgatggcttgtctggcaggtgtgctggtgattgtttcctataacatgagtggctggcgcacattcaaggcactactgaagaatccgaaatcagacgtcaccgtattgctgattaccttcttcctgacagttattttcgacttaaccattgctattgaagtgggtcttgtcatagcttgtgtacttttcatgcatcgtgtgatggaaaccactgaaatttctgttatcaaagatgagattaatctgaatgaagaatctaacagcaaagaagatgaagaaaacctgtccattcccaagggcgtggaagtgtatgagataaatggcccttacttcttcggtattgctactaagttcgaggaaatcatgtccagactgggagaccgtcccaaagtgcgcattatacgtatgaggaaagtacccttcatcgattcaacaggtatccacaacctgactagcctctgccagatggcgcaacgcgaaaaaaccactatcgtactttccggcgtgaatgaaaaagtgcacaaagcattggaaaaatccggcttctacgaactgttgggtgagaagaatatctgcccgaacattaatgtagcattggaaagggcgaaagaattgctaaaccaataagtttagatacgctataactgatttcccaaaaagataaattctacttcaccacagattacacagatgcacacagattaataaatcagcttttgacttttaatttgtgtgcatctgtgtaatctgtggtgagattcaaaaagcttttacgcaatcttcttaccgacaaacagaccagaaacatccccatcgttcccggttcgtaccttccttataccctcctcgtaccagcttcgcttttttcatctctctatagaagcgaagaaaatgcaaacttgataccaaccgaaagaggtttagaccaaaaactgccttccattacaggttaccacataataatctgttatatccttaaaaaaaacgaacgtaattaaaaaccagataagcttacttttccaccagataagcatagaaaccagcaagtgcaactgtttctgatttaagaaaatctcacttaaatcctaaaaaagattatatttgttcccgaaaagctataacacaacaacatcatgagaataagcatttacaataaaagaatcatatacatctgtatatttttacttgttttactatcatgcacctcacaacgtaaagaggtcaataaaatgccgaagccaaccgctatcgatttattattaatcagccgatatgactcgatatatacttatcctgtcaagatgaaagatgaattcaaaaaagcacaaaaaggcttgaccgacagcacggaattttacaaattggatctgttcgtaggattatgcttttatctgcaaggaaatgctgatagtgccctgtaccttaatcagaaagttctggacttctgcgaccgttatcccggaacttccgccctcaaagccaatgcatggaaccatcgctccacattactgcaaggagtgaaccaaaaagattcttccattgcttgcctccaccatgcttacaatgcagtataccagtctgacgaccgcagagaattacaaagtatttgcataaatctggcagacgcttattgccagacaggtgatttgccacaagccgccaaatattacagaaaggctctttgggtagtcgattcgctaggatcaacgaatataaaattcagtatatacttaggattggcacaaacctatgctaacctgcacaactttccactggcacaccattatttcgacctggcagaacagaatcccgaacatcgcctggagcatgaaaaatatatatttgccaattcaaaaggaaattgcctttacttcgaagagaagtatgcggaagccctaccctatttccagcaagcctaccaagtggttcagaactttagccagccctcattgagcgccctggtagaagcaaacttgggagagattttcacattactcggaaaaacagattccgcacattactatctggataaatcctgttcgtactatatgaatgaaccgactgccaatgaggaagtggttttctacataaacagtcttcaagcagctttggcattgcaagaagataaactggcaacagccaactattatctctcaaagccctacaatcctctacgtataggtccgtcatacatctacctgcacaacaaacgtctaatggaatattatgcccggaagaaagactttgaaaaagcctaccagtataaaatagccgtggaacaatatgacgactctatcagaaacgtacggagcatcaacagtatcaatgaaattgattaccgatataatcaggataccaccttgttaaaacgcgatatactcatatccaataatcagattaaactatcgcaacagcataatattataattctagtcctggcattactcatcatatcggttctgcttgccatactgattttcattcatatccgtcgaaagaatgaacaaagatataaccgccagatggcattagccacacaactgcgtatggaaaacatcagaaaccgtatatctccgcactatatgtttaatgtattgaatacagtgatgcccacattcaaacaatactccgaactggcacatccgttgcaactgctgatacaagtgctgcggggaaacctgttggcatccgaaaaaatggcagtagagcttcaggaagaaatagaattggtaaagaactatattgctcttcgtaaggaaaccaccccaaatacaatacacattgaatgggaaattaccgaacaagttcccctacaaacccttattccgtccatgagtatacaaattcccgtggagaatgcactgaaatacgcattcgaagacaatgatgagcagacaaatacactctccatacatatttcgaaagaagacagaaatctttccatatctatccgggataatggtagcggatatgatccgggaaaacattccaattcaaaacggagcaccggaaacggactgaaagtgttattccgtaccattgaactgttaaacagcaaaaatactgagaaaatcatatttgatatccggaatataggtatatccgatccgtctcagcatggcactttagtgacaattaccattccgttcaattatcaattcaatatctaaaataatgacaaatacgattaaaacaattatcgttgatgatgaaatcaactctatccacaatctggaagaagatttgaaagcttatccggaaatagaaattctggatacgatcacctcttcacaaaaagccaagaaaagtattatacaataccagcctgacttgttatttctggatgtggaaatgccttatataaatggtattgaactattgcaggaaatacgcccgtatgtacgtaatagcatgcgtgtcatattttacagcgcctttgataaatatatgctggatgcactgcgtgcttctgctttcgactatttattaaaaccataccagacaaatgaacttaaacaaattgtagaaagaataaagagggagaaaacgaataaccccatcaacttcgatcaggctatgcgccaattgttaagcaacgactgcaagtttgccgtacaaaccattagccggctgttgttgctacgtcggtcagaaatcctgtattttcaatattcggaggatacccgctgttggcaaatgactttgaccaatatggaacaatacagactacgactaagcactaaagccaaagatatactgaatttttgtccttctttcatacgggtaaacacagactgtatcctgaacattgactatctctcatctgtagagaataatacactacgctgcattctttatgcaccattcagtcatctagagatttcagcaagcagacgacattatagtaaaataaaagaagcactgaattttttgtaaaaaacagaccacataaacatttttttcaaccagttaagcgtcgttgttttaaatctaagcagattcttttacaagccctcttttctgttcacttatattagtttaaatttgcttgacagaaaagaaggcgttttcaatttatatctgttccggataagccagcatgaacagtcaaggaataagcagaaattgaagtagttccacgcctttcagtaagtactaacatctactgttgggactaagtagagcaaaggttataaaacatgagaaactttattctatttttactttgcagtctatgttttccacaattattcgctcaaacaacgaacaacgatgaaaaacaaaaatatgtttatccacagaaagtatctcctgtagggatagataattacttgttttcaacgtattactacaataataaaaagacttataatctacgcaattccgtattgagcaattcgggtatcatatctgtcttgaagattaatccggcaggatcttcgtttgccattgtacatgccaaaggtaaaaagagtaatgtaacggtatacgatttatgggcagctaacaaagtaacgcatgagttcgatgaagacatagctcccgtatctttgtgctacgctccggatgctaaaagcctcgtcatatccggcaataacaaagaactgtttttcttcgatacccggcagtacgaattacaatacaaaatggaaataccttttgtagctgaaaacatagccatcagcaacaataatttcttcattgcggcatccaatggtacaactctgaatatctggaatctccagtccaaagaattacgcaaaagcatttcaacggatgagaaaatcaattgttttactttttccagtgacaacaatctattggcaatactcacagctgacggtaaactgacgacttacgacacccgtacattcttcattctgcaaagctacgatgcgatgggaactgcacgctattgctatttccatccggaaggcaaatatatagctatcgtcaccggagacaaacgtatttccatcctgaacctgatggacgaaaaggaccgcgaatacatcgacaatgcagaaggaggcatcacggatgcccgttttctgaaaaacggtaaaggggagattttccttgcgtacaacacggtaaactccatcacgtacgagctgatgagcaaattatcccccaactacagtaaactgatgaacgacgaattaagtgaccgcatgaacacttggatgaaaatgatgcctggtgaaactctggaagaatataatctccgtgtaaatgatgagacacgcgcacaacagatgcgactgtttgagcaggaaatcgctacccgcatggccgacaatctggtagaaaaatcagaggttacattagggaattataatccgaattctaacatgctggctgtagacttcaataccatgcccaccatctacctaaacattcctgcagatgaggtatccgactttatgaatcccggtgatctggaattccgcaacgctgtatacggacttacaaagaatgataaatttgaacttatctatgccgatgtgtataacaaagcttccggcaaaacttataaatacgataatctggatcgtgaatcattcgattacatgaagtccgacgataacttcattcccctcaacctggttcagcaatcgaatatggacgaaatcaaattgcaagaaatcaaggaaaacatcatgagcatggcaaaacagcagaacacgatatccgaccatacaaagatttccgtcgatgcaggcattgtttccgaaatagacgctgacggaaagaaaattatgaactacaacatcaatttctcttatgaagtggaacaaggattttcggctaaagaggacttcggaccgggaaaatacatcactacccaatccggtgctgcgatgtccatgcttgccatcatgaaaacagctttcgaaaaagactttgcacaatacgtacatgcgggcaaaaaactaagggtaaaaattaccggtatggcagatgcaagtcccattaacggaaaaataacctatgacggatgttacggagaatatacgaatgagcccgtatacaaagataatgatttgtccaacatcacagtaactaaagaaagcggagttacccagaacgatcagctcgctttcctgcgtgcagtaggcgtgaaagattatatcctgaaaaacattcctgctttttctgaaatgaactccgattacaactattacatcgaggtaaccaaagagaaaggcagcgagtacagaagaatcagtgtagcattcacttttgtagatgcattttaatcaatctctattaagatacaatgaaaaagcagttattaatagtcggtttatgggtctgttccggaatgctttgtcagccggtacaggcacagtccgttgataaagcaaatgaggaatacaagacgtttgtccgactgaataatgaaaatggagacaaaggtactctttattcaactttatatagctgttacaaagagtatgtagccgtattgagttccttaaagtctggtaatccgtcttatgatcaggcaaagagtgcattgcgggacatttatccgtatttacaacaaggagccatctataactcacaaaaaggtagccaacaaaatgcattattgctggcacaagcctatattgacgtaccgttgatggaggctttcagaacagaaacctttcctaaagacaactattacccgacaatggtctactttgcagcatcaggtaccttcaacataaaggactatgaaaaagctattgtttattttcaggaatacctgagaacaggagaacagaaaaaccggaaagacgtgttcacttacatggcaaaagcatgtacaaatatcaagaactatgcattagccaaaacagtgctcgacgaagcagtgaacaattatccttcggatttcaatcttttatccatgggaatcaactgttgcatagacctcaaagacaatgagggattacagaagtatgtttccaaggcattggcaataaagcccgatgacactactctactcaatattcagggaaaattgtacgaagacacgcaggaataccagaaagcgctacaaacatacaccatcttacgaaatgcgaacccacgcagcctggaaatctacaaacatctcggattgaattattataatctaggtgtgctgttcaacaacaaaagtgccatggagaaaaatccatcggcagccaagaagctaagcaagcaatccgaagaatacttttccgccgctgtatccattttcaaagatgttctaagttcagatcctacttccttgaaatatatggaagcattggccaccgcttattattgcttaggcaaaacaagcgagctgaacagcttgaacaataagatatcttctctgggtggaaatgccgtatcagcctcatccataccttcattaatggctttctctgatgataataaatctgtcccggcatctgcaaccgcaacgaactacaacacgcaactttttgccactccctcaacaaatgctgaggaaatacccgaatatcctaaatttgcccaaagctatgtggaagaaaagataaaagcttggcaggccaaagatccctatgaaaccgtagacgaatataaggcacgcgtgacagaggctacgcgggatactaaagtgaaagagctgctggcagaagccgaaaagaaatatatcagcacctatacgcaaggtatccgcttcagcgatatgcaactgaaaccctatgatgctgacaatcgggctttcctgatagagtcaaaattcggtgaactgattgtacccgttccgcgtgaaaataatgaagcgcggattttcgagagtagttggaaaggtatgcagttcaaggaacctcagttttgtatcaacaacggacagctggcactggcaagtctgacttttgtaacacctaccggcaatacttaccgatatgataataaagaggctgtaaactatgcggcaactacggtagatgtacgttttgatgctatagattatggttcgctggcacaggcaggtacttcggaaactcctgtttcaagagtacagaaaaatgaaatcaaagtaggaagttcggatgtggatatcaacataccggaagtacgcaccaataatgataagacttttgctgtaatcatttcgaatgaaaactacactatggtttctaaagtaccgatggctttgaacgatggagaaactttcagccgttattgcgaaaagacattaggaatgcctaaggataatattcgtttttatccggatgcctcttacggaaccatgctacgtgccatgcgtgacatcaaggatatatccaacgcatactccggacaaatcaaggtgatattctattatgccggacatggtattcccaacgaagccaccaaagatgcgtttctgctccctatagatgccgacggtcagcagactgaaggctgttattctcttaataaactttataccgaattgggtggattgaatgccaattatgtagttgtatttctggatgcctgttttagtggtgcccagcgtgacggaggtatgcttgcttcagcccgtggcgtagcactaaaagccaaacaggaagatccgaaaggtaatatggttattttcagcgctgcttccggtgacgagactgctttcccttataaagacaaaggacatggacttttcacttatttcctgctgaagaaattacaggaaagtaaaggaaatgcaactttgaaagacttgggtgattatctgacggagaaagtaaagcagcagtcagtggtagtaaatcgcaaggtgcagactcctactgtgtctccttctgcaacgctgagcagtagctggaaagagttgaagttgaaaccataacaaggatctttcaaaatggcaaatcacctgcaaagtttgaataaatcaatgaacatataaactttaaataaaaaaacaaatgaagaaattactattactgggcttcttcctcttgctgtgcagcctctacctgtctgcacagaacacggtgagcggaactgttacagataagaaaggtaaccctatcccaggagctaaagttgaaatcaagggaggtactgaatcgactatcacagaactggatggtacgtttacgctggaaacaaaaatacctgcacagaaggtgaaagtctattatgtgggtatgcagtcgaaggagcagaaggtaaaaccgaatatgcttataaaaatgtctgacagcaactggtggcgggaaaaacccgataaataccagtggctgataggcgcgcagacagccttacctgattgtgaagatattaaaccttcttttggtttgatgctgggaagagtgaaaaagattggttggtatgtgaaaggggtatatagtaaagtacctgatacggacggttcaatggaagcggaagactactatgctcattggctgacaggcaaaataaagcaaagttattggaatgcaacagctggttttatcgcccgtttatggagtcctgttcatgtatatgtaggtgcaggctactctaatcgcaaagtcgcctgggaaacattcgacggaagttatgtgaagtatgaaccagactgctattacggagctgtcattgagtgtggtcttatgctgaaagtaaagaagttcttcatcaatggaggcgtaatgctgaataatgattcaaacaacttcaaagatcgtgtaggaaactttggtatcggtatgtacttttaatttataaacaggaaaatatgaaaaaaatacaatctatattagtaatagcattgggagtatgtgcaatgctgaccagttgtcaggaattggatactcccatcaataatatccctacaatagaaacgggagaggcaacagagattacagcaaccagcgcccttctttcattcaaatcagaaaatggaaaagctgattgctcgctcgtatatattctttctacctcacccgatatgaatgatgtttgggagagcgaaagcaattacataaaggacctgatacctaatactacttattattatatggctgcactccgtagcactacggatggtaagaataatgaagtacgcggagaggtgaaatctttcacaacactcagttctatccgactgatttccgtaacctccacttcatgggatggtagtcaggaagaatacaatcctgatatgttggggacttatctcttttatacagcctctccctccatttatcaaggacatggaaatatgtacgtggagaaaaacgttatcgacggaaaaataggttggaagcttcctcaagaaatctttcctgcaagtaccaacttaaaaatgtgcgcttactttccttatcaaaaaggaaattctgaagaatatatgattccttttggaacctataaatatgatgaagatgtattatggggtacaagcgacacattgaacgaacagacaccggatgcctctattcagatgcaacatactatggcacgtgtaatattttccataacaggtacagccaatgtactggaaactacgattatcacagactttatgctagccaatcgaaatgaagcaagcggaatacctacttacggatacctgaacatttatacaggtaacttcgaaaatttcacttatgagttacccataacacgttcaactaattttcatccgactgatgtagcaaaagacattgaagttttgatgttccccgccgaatttagcaatgaagctgttttattgactctgaagactgaaaacgggcatgaattatctgtgaatcttcctcaagcccgctgggaagcaggacaccaatatacttatccaatcacttacgatgaagcacatattactatcggtgatgtagttgtagaagactggaataacaataagggtggagatataacaattaacgactaaaaaataaaagataatgaaaaatattcaagctatattttacctagcaacaatgataggtggggtactgtccgttgcgtcttgtaataatgaaaatgaaactataactgccagcaaacaagtgccattggagatacagacaggcagcgtacagactactcgtagcatcattgaaggaagcacactaccagaagaatgtcaatatggtatctttgccatgtatggtaaagaaagagaggtcattgacggtggaatgaatgtttgcgtcaattattccaaaggggtaagtactcttaataaaagtgtgtatctacctacgaatgttgacgtccctgtatatgcatactatccatataacgctaactattcaaacattgaatatctcttggaaatgccggtcgatgttactactcaaacggactacctatatggttatagtgccgacaatgatttcaagctgacgtatgtcaaagatactcagcctaaggcaactatatacttcaaacatgctatggcacgtgtgactatgagaattaaaaaggcaacggataatgagaatacttataaattcccttatatcaacctcctgaatgtagataaaagtgcttatttaaatattttagatggtggcaccattcttgatcctacaggaaccgccaatcttactgcaaaaccttctgattatgtacttgaaaattctgacaatgaaattgttgccgatttccttgttattccgggaaatacagaagggaaaaaagttctactgaatatgagtgacgatataagcagttttgagaacgggctttccgcagccgtaccggtaacgaactggcaggcgggacagcagtatacgtatacagtgacgatagatacttacaaagtactcagtattagtgaggctactattacaccatggattaataacaaccaagaagaaattaagataggagatgaaaattatgctggaattccagttaatggacctgttggacaagctgtagatttaggacttagtgtgaaatgggcaaattggaatataggagcatctgcaccagaagaatatggtggactttatggttgggcagatcctacaggaactaaaatttcaatactaaatgaagattatccaaattcaaatcctccaagtgacatttgtggatcaatatatgatatagctcgtgcacaatggggaaaagattggcgactaccatctaaggatgaaatagaagaactattggcacagtgtacatggatatttactactttaaacgacatatcaggctacaaagtagaagcccaaaatggtaattctattttcctacctctaacaaaggaacgcagtggaacaaatttatatgattttgaaagaggtttctattggtcaggaacattagatacaagtatgagtataggagggatatcaaattatgcttataacatatggtttagtaaagatggtacaggatgcagtagtaacaatcggtacaacggtatggctattcgccctgttacaaaataaaaaagaaatattaatggttaatttattattgataaatatgaaatcaaaagtagtttttctatccctatgtatatgtatgatgattctttcatcgtgtaaaaatggcgaagaagaatcaattgcaaacagtgcattactccgcatcactactgatattcagactcgttctgtaattgaatctacaacatttactacaggcgataatattggcatatattttcttggaaaatattactttgcaacatatgaagaaaatgaatggtcatttggaaaagaaccagttctattgactgaaaatccgacaccggtttacgctttttatcctaattcgggagattacactgatggaaagttatcaatacggctcggtgaagaagatattacacaacaaaaagattatctttatggaaaatctaatgaggatgtagatagtaataaccctgaagcacatattcatttcaaacacgcgttggcccgtatcactttatctattaaacgtaatcctaatgatataggtaccgggttactttccaatattcgcttacagaatgttgaagaaaatacaagtattgcaaatggtggttggatgaacattattacaggagatataacagaaaagactgtaggtccggtatccgttaacacgaagtatacacttagcagtgaaacaactcaaaatgtagatatccttgtaataccaactgtaatggaaaatgaaggtatggctgaattagtactgaatattgatggttttccatatatagtgaaaatgcctgccgcaacttgggaagctggacaacaatatacttatccaattactattagcaggacagatgcacacattgaaacagcagctcgaataggagattactattataacgataacacatggtctactacactcgataaaaataaaacctgtataggaattgtatttgctttaagtcacgaaaaagatggaaatatagatataacactaagcgagtctattcacggaagaattgttgcattacaggatataggttcttatagttggggaccagcttcagatgttgaagaaatacctaacatctcattccttgcatacgataatatcatatataaaagatgttatttaccagtaaatggacaagctatttatcacgaacaagctacagaaaattttattctaccatatagtttctctaattggccaacagaatcaggggaaaattatggattaacggattatagtgggcgtaagcatacctcatatataaaaacagaagaatatcctgctgcaaatgcatgttattcatatacagtaaatggagttaatgaagggttttggtatctacccgctgttggagaatttgcccgactcgcaatgtcctttggtatcggaaaggtatgtaataataagcaatctatatttacagacttgaaaagtaatggaacatctttaaatgaatcatattggacttcctctgaacattatgagttatatggagcatatgattataatatcatgttaggaaaagtagaaggcagtaatagaacttctataggatccaacaatacaaaacggacttctttacatgttcgacctatttcttcattctaaatttaggattggttgtctgataaagcagcccgttataataaatattttccaatgctatattatccataaatctatgtgcaaacttatcctctccttcttcatactcatattctccactaccgcatttgcccaaaaagtaaaaaacgtttgtggagaatatacattctatgcacccgaaaacgtatcgctaagcgaagcaaagcgcattgcactggaacgtgctaaactgcaagcccttgccgatgagtttggaactgtgatttcgcaagtgaataccagtgtggttaaagatgataacggaaaagcggacagccacttcttttcacttagcggcacggaagtgaaaggagaatggattgaagataaaggcgaacccaaatacacttacgacactgataaggaaaacggaacattagttgtcacctgctctatttgtggtaaagccagagaaattataagtgcacagattgaatttatggccaaagtattaagaaacggaattgaagcccaaaatgaaagtgaaatatttcgcagtggagatgatatgttcctttcatttcaatctcctacagatggttttatcgccgtatatctgatagacgaaacacctactgcttactgtttgcttccttatagaaaggatggtgacggacaacaaccggtaaagcatggagaaaaatacatattcttttctcccaaatacgacgtcaatcatcccgatatagtagacgaatatactctaacttgcaacaaagaagaagaacataaccaaatttatgtcatcttctcacctaaaccttttactaaagcactagataatcaggtgaaagaaaccattccacgcgaacttgattacgaagcatttaccaaatggctgggaaattgtagaaaaagagacaagcaaatgggagttgtgataaagaacattaatataaaaggggaatgaaaaagaattccattcccctgatccttctatttaaaagacatttattctctcatccatgctccggtaatctctgccacataaatatgatgcaaaccaccatgagcgccaccataccattgcttacaaacacttggatcgatgaaacaatcttctttcattacatccgtataaagcttgcggcattccagactgagacgtccttgttcaaaaagaatatttcctttttcagtaatgaccggtttcagtcccgtctcttttaccttgtctacttccctacccgacttgcttccacatatcttatggatagctctgttctcttctcccaggaaagagagcgtgaagtattcactcttctcaataaactcaaacgtgtaacgttccggacggataaagacatagaccaccggtttgttccataggaagcctataccgccccaactggcagtcatcgtattgaaatgatctttattacctgccgtcaccagcatccattctttaccgataacttcaaagaagttctctgaaaggtctttaattgcaataggtttcattgtatacatattataaaattattcactttaatatttctgataaattccatgcttgtacatgacgtataccttctcttgaaggaaattgaacttcatccattgaaacaacatacttctcataactatcagcaattgataataaagaagcatattcacgctccattgtttcttccgtttccatcatgtaagcaacctgaatataaataatacggtcgtctttcatagccacaaaatcgacctctttatcacgaatagtacccacataaacttgaaaaccaaacctgcgaagctcgatatataccgcattttccaacaaatatcctacaccgtatgcaaagcccggatataaaaagttcttaaatgccaaatcattcagataatatttgcaattacccgccagaacttcttttcctttaatgttgtaacgctctgttttataagccaaaaaggcttcttctatataacttaagtaattcgataacgtatcgtatgatactttacggttcttcgatttaaagaaattgattacattctgaatcgaaaataaattagatgcattattcaccaaataaataaaaacatcatccagaagcctgacatcacgaacaggtttacgtttcactatatcacgcaataatacggtatctttgacagaagcaacatattgcttctgagattcagtatcaggcaaattatataattccggtaaccctccacgttgtaaataagataaataagaggaacgtcctcccaccgtatccgccacttgaatatattccatataattatatggaaaaatatgaaattcaacgtaacgaccggaaagtaaagtagccagttcactggaaagcatccttgagtttgaaccgctgataaacaactcacattcttccacaaaatcctgagaatgagaattgacaaatcgttcccaaccatctacattttgtatttcatcgaagaataaataaacttttccttgaggattaagtttttcacgataaagttgatatagcttttctaattcctgataattgtctatgaaatcaaattccaaatattccttattgatatacagaatattattagggtgaacacctaagtcagaaatcaaaccggaagctatttgcctcaaaatatagcttttgccggaacgacgttgacctacaagtacttttaccaatttattccccacaaaagcatgaatcttattaatgtaagatgtacgtagtaaccctaatttataggaatttccattccaaagattatacttttccagtgcactccatctatcgtccatagcttaagtttttcacaaaaataagaatagtttcgattataatcgaaaattcatatgcttttattagaaaattcatatataatcgaaaccactcagttgctttactatgctcttatcactccattatttcccgtttgtaagatctatatacccaacgtattggatatatagacccaatacattggatatatagatcctgtaaaccgattaataagaaacacttaccgatattgctgcttctttaatcaaagcagcaatgcggtccagttcctcatgagtagccttacataaatcatggtcaggcgtttcacgatcgatagtataaatcatcacctgacggggttttatctctttcacaacctccagccatggaagaacgtatttatccgaagtattatctacgtctttcccctgataactgcctttcatgaacatggtctgaataatgcaattgcctagaaaagctttcatatgttctatgatttcgcccacagaataatgccctgtaggacgatccacagtatgaatataatcctcgtctactgtatcaagtttcaatatgttgttatctatcttattcagcgcatcaaacaccgcagggcggtgaataaaggtggaattactcaatacactgactttggcattcgggaaatacttatcacgaagcatcaacgtatcttctatgatttcagggaaatgcggatgagctgtaggttcaccgtttccggcaaaggtcaatacatccggttgaggtccattctgttgcatatcctgcaatttggcttcaagggcattgcggacctcttcgcgggtaggcaatgccttcttgggacgatggtctgcattaaaaccgcattcacaataaatgcagtcgaatgaacacaccttaccatcttccggcaataagttaatccctaaggatactcccaaacggcgggaatgaacaggaccgaaaatgggagatggataaattacagtcattttatttacgatttgacaattgacgattcaaattactgaattactgtaaaaaccggatacagtattttcagcgtttataacggcaaagttaactaaatctttatacgaagctgcatttgtaagtcggcttttttatttccttgtatcaggtcgttacccgaaccaatattctcacggtcttcgtagatagtctgcccgaatttaacaaggaacataaaaactttgttcacatcataccgggcacaggcagaaaagcgaaatccctgtccataaaacgaaggtgtatagaaggtataaagcaaacctttttcgaaagcataaatacgagaatcgtaatcatccgtatggaaataagtgccctgcacagatatctttatgggaaaagaaaaagcatacgagcaggattgtgtaaactgatatccctggctttcctcctgctcccgggaatgaaaatgattataatccaccgttgttcgtaactgtagattatccggtgaataagtcagtcggtaacgaaggcgatgctgataagtaggaaggataacttttccatccgttcccgctacgtctctctcttttcgcttatagcgatagttaacatacatagataaatttcgcttaggagaatagattgactgaaacatgccatccacaccttgcgacggtttactgatgcggtatttccaccagggaaaagaaaacaaatccagcgaagcgaaaaatttccaatgtgctaaaggtgatgcttcggcagccagataccagccattttcattttgcggtgtactactttcaccaaacgaacgtgcaaacattgcccagtaatcatgactataatatctatgaacaatcagcagttgataaccggttaatatattatatttcaattgattcagtagtgaataaccttgtttgcccatagctgcttcacctgtcagagtaaatcgattccagcgatatttataatctacacccacattatgaaagtaattcccttgcaaattatacttggcataggttcttaactccggttgataactacggttgaaaaagtagtaaatgcctgttattcctacttttagattgttcttttcataggtaatattcccacccatcagctgtaaagtgaaagcatttactttatccgcttccttctccgtacgatgcaatccggttttataaatagaggtaatttcattcccttctataactccatccatagaacgatgtgaataaaaaccggatagttgaagtgcagggataacctccactgttgccgcagcacccctgaaataattatattcatccgttgaactgtgcttccggatgccaccactacggttatctaccgttgagagagaataagttttccctaaacgaaaatcagtgctgactactagcccttgtccgaaacttaatctgtaatttcccaatgccaacgttttcaacttacccagattacgaagcaaaaagtagatagaataataatcatatcctttttcattatgcagggcaaagaaaggttctcctgcatccttttcggccgtaattcccatttggagatagtctccgtaacgatacccatatcttagagagtggtacattgcaggtcccagataattcttctgataacctttacgggtatagaaaggcgcatccagccgggtcaatacctcctgtttaccatatttcaacagacttttcaaccgaggaaaacctatcttttcgggcacaggatgtacacaaacaaaagggagaagcaggtcgatggtatgcttatccatctcttccaccaattgcagttcataaatagtttgcatctgcccgtgtatatacacataagccaagatattttcaatctgaatgtccgaaagaaaaggaaattgctctaattcacgtttagtagtaacattgatattaacaggttcctgcaggcgattggaaagctcttcaagttcatcttcccagttcttttcttcttcatccatagagagttgctctatattctcttcccacaaggacacacttgtattttgagcttcaagtacaggagtcatcagcagcatactcagaaaaactcccaacttgagtaatttcattcgtgtaaataagtttaattgtcgcgaaattaccataaataagttaacacgacaaggaaaacatcgacaatcggaccaaatataaagataaacacttaattttgtggcatgaacgcacgactgaacatattcatcatcgtagtcttccttctgttcggaacttccttatgccaggcacaggaaacgaaaaccgaaggatacctggttcctatgtgcgtttacgaaggagacactatcccgtatataaagatacccaccgtttatatcttcaaacctctcaagttcaagaacaagaaacagttgaatgaatataaccgactggtatataacgtaaagaaggtattgcctatctccaaagaaatcaaccgtgcagttattgaaacttacgaatatatgatgactttacccgatgagaagagccgtcagaaacacatgaaagcagtagagaaaagcctgaaggaacaatatactccacgcatgaaaaagctttctttctctcaaggaaagttattaatcaagttagtggaccgccaaaccaattccacgggttacgaactggtaaaagccttcatgggaccttttaaagcaggtttctatcagactttcgccgcactgttcggtgccagtctgaaaaaacaatatgatcctacaggagatgatgcgcttaccgaacgggttattctgttggtagaaagcggacagctttaaaatagaaatatcctattccttatttatgtaatttttcaatcccaacagccctctgtaataaccttcaaagatcgtatgactgtgtttttctatattcaaagaatcatagttcaaaacaatcttcggacaagtggataaaatctttattgcctcctctgtggcaggcttaaatgactcttctattttatccttcttcccgcttgccagatacatataaagttggttagcccctttgtactctttagtaaattctgaaagtttatcaatcatcatcttcctgctatacatatagttaggagatacagacagaatacattgaaacaaaccgggattgctaagtaaagcatacgtcacaaacgtgccgcctaacgaatgtcctaccagtatattccgcaaacccgtattatatctgctctttataaaaggaataatttccttttccagagataacaataaagaatccccctttccaggatcatcatacccctttaccgattcttcatccgtataaggaggagttaattcactctgcctgttaggattcaaaataccaacgattatacagggaacacccggatacaataattcaaaggtggaacaaaacaaattgaaagtaggcggatattgagcgtcgaatacatagatagtcaacaatgaatcacttttcaacgtagcatctaccccactccggtatacttgtagttcgcgtgaatcatcaaaatattcagagtcataaatatacctgtcgcccaatggctgcaatgaataaaagtctgcttgcgctttaccattccagctatgaaaaatacagaataaaagaattaataaaacctttttcatagtttgaatcctcctgttgatatgatgttaagaacattgttagtaatgaaaaacagtcattatagaaggccatgtatttcaaacacttatctatgttgaaaacttctatgaaccattgttcatttctctatcgataaagacatgataaccactgtttgaaccctgttcaaacaacttatcaacatcttgttatttcagtttcttgaataaatcccagataacgataccggcagttacagatacgttcaatgagtgtttcgtaccatattggggtatctcaatacatccatcggaatggtcaataacctcctgctgaactcctttcacctcattgcccataactactgcatacttcttagtacggtctaaagacaactcatccagcatgatactgccttccgcctgctctacggaataaacagtatacccttcttttttaaggttatcaacagcttcaacacagttatcaacatacttccagtcgacagtgaattcagcacctaaagctgttttatgcatctcaggatggggcggagtagctgtaatgccacacaggtagatacattccacccggaaagcatccgaagtacgaaatacagaaccaatgttatgaagactgcggatattatccaataccaccaccaggggcagtttctcagcttccttaaactcctctatactaatacgattcagttctgttattttcagtttacgcatgacaactatactctttaaatggcttttattaatagattgatttacaaagacttgtttaatacttgtatttcatttgtaccacacttgtgtttcatttatataacacaagcattacagacaagccacacaagtgtagaacaaacaacgtacttatacgttatctttttattcctgttgcaaagatacttctttccgttcacatccctgttaataaccgttgaaaagctgtcaaaagagtagggaaagaaattcaaaaataattcttgcaatattcaaaacaacgtatatgcacccaccggaatgaacattccaaaaaagttaagagaaactttccgaggttatataaacacatttttcagccctattacaccggtttataaccataaagttattaactttgcactttatcaacaaggtgttgaaagagttttatagatggcttattatcaagagatataccttttatttgcccgttgataacatacggataaagttttatctcatactaataacttcatagacaagaaaaatcgtatttacttgtcgacactattaacagcctatcatcaccatcaaaggatttttaaattagaaagagaaataaaaaatataattatgaataatctcatagaagctatcaagcaacttaaaaaggagaagaacgcgattattctggggcactattaccagaagggggaaatacaggatatagccgattacgtcggtgatagtctggcattggctcaatgggcagccaaaacggaagcggatatcattgtgatgtgcggtgttcactttatgggtgaaacggccaaggtgctttgtccgaataagaaagtgctggttcctgatatggcagccggttgttcgttggcggacagttgtccggcggacaagttcagtcagtttgtcaaagagcatcccggatatacggtgatatcttacgtgaatacgacagctgccgtgaaagcagtgacggatgttgtggtaacttctaccaatgcgaagcagatcgtggaaagtttccccaaagatgagaaaataatctttggtcctgacagaaacctggggaattatattaactctattacggggcgcaatatgttattatgggatggcgcatgccatgtacacgaacaattctcggttgaaaagattgttgaattaaaggcgcagcatcccgatgcagtggtcttggcacatcccgaatgtaagagtgtagttctgaagttggctgatgtggtaggttcaaccgcagcattgctgaagtatgcagtgaatcatcccgagaaagagtatattgttgctaccgaatcgggcatccttcatgagatgcagaagaaatgtccgcaaacgacgtttattccggctcctcctaacgatagtacctgtgcctgcaatgaatgtagcttcatgagattaaatacgctggaaaagctttataattgcttgaaagacgaatctccggaaataacagtagatcctgaaattgctgagaaagcagtgaagcctattaagaggatgctggagatttcggcaaaactggggctttgataaagtggtagattgataagattgataaagtgatagaggtgataaagtagtaagagtgatgtcaccctacccactttatcacctctatcactttatcaatcttattctcctcttataaatgcaatttttgtaacaatcccctcttttccttcactgtctgcggcaagtaccatatatattcctgtggccactctcctaccttgtttatttcttccgtcccaggtgaattgccctcccagggaagtaccttggtaaataagatgtccggcagtatccacaatcttcacatcactgtcgtaaaccattcccgtgacagtaatcactccgctgtagtctggacgtaccggattaggataagcacgtacattactctctttaaagctgttttcagcctctgtagcgtcactttggtaagaaacgagccccttgcctgttccgatgaagacttcgccggtacggggatgtatggcaatagatacgatgctattggaaagcagcggactgttttcttccgtaaagtgatgaatcgtttccattccatccgcacttatcaggtaaattccattggacgccgtacctatccactttctgttggcaccatctattgcaatggcattaatcgcttcgttcaccagtaagaaatcagccaacccgctgtcatcattacgcggaactttaatttgtgtacaatagaagttatcattgaaatagcgggaaggattgttcagtaccaaaggacctctgttagtaccgatccagataactccctctttatcctcggcaatgcaataaactgccaactgttctaaaagggctccgtcctgattcgtgaaccgggtaatgaacctgtgctggtcgtccgaagtatccgctatggtgccgttataattcaggcagaacaatcctcccgactctatacgcgaagaagtagcccatagccaacctcttttatcaaagatagtccgtccgaaattacttgcctttactatttccggataatgaagacttgcccagtcaccatttttcatcaatacactcactgcatgttgtgtctcgcaactcaccatccaaaggttattttctttgtcataaatcagtccgttcacacgtacataactatctgcccaaggttcattaggtacagcactttccaacggactgttatgcatactataccagtttatgagcttcccatctttaaattcgtaaatcccttctcctgccgatgcagcaaaatgatgagtagcgtctttaggatcctgcacaatacagtttatatcatcgtatctatgtttggtttgttcactgataccttcttcctggaaactgttccaggtattattttcaaaagtcataatggttccgggcctgtcaagtctgttggctatatgtcctcctccggtaatcagcaatcgttctccggcaaaattcatataatacggatagttccgtacaggactattcggagtaatgttttcgggtacttctcctttgaaaggaatatcgtggtattgcgagaggaattcagaggtattatccgacactttcttccagttcttaatatccagtagattatctgtcaataaccctgcaaacaatccttcggaagtagcggcataaagatgattatccgatacattacatgccagaacgtttttattcagaggatagtaattgctgatttcccgctttttcagattgatacaaagaatacccgatgcagtggataaatacgtgtattccttataaaaacaagcgtggttgaccgtcttatcctgtgtcatattcttgtttttataatcgggaaggttatagatatcctcctcattcaccaacaggtctatattcgcattggaataaataatgaccaatgatttataggctgactggtaagcaatataagatatttccgtatcgcttagtggaaaagattttgaataagttcgtatgctggtatcttctttatcataagcatataaatcaccattggcaaggatgaagagtttacttccaatgacttcactgcgggtaggattatgataagaaaggtaagtttgccactctcctatcgcattttgcgaataggcaggcagaagatagattaagcagagaagaaatatatattgaaatctcataaaatcagagttatattagtttgtaagcaacacacttacaaactaataactctatatttacgggtttattgtatgctattaaggaatttgcaaagtttgtttgtagctatggcacggtggctgattttgtttttcagttcgttgcccatctctgcaaaagtctgcgtatatccttcgggaacaaatataggatcatatccgaaacctgagtttcctcttctggttttgatgatttctcctttgattacaccttcgaacaaatgctcttttccgtcgataatcagtgcaaatgcagtgcggaattgcgcttttcggttctctattccttccatggcatgcagcagtttcagcatatttgcttctgcattatgtccgtctccggcatagcgtgccgagtaaactcccggttctccgtttaaagcttctacttccagaccggtatcatcggcaaaacaatccatctggtagttttcataaatgtactgtgctttcagtaaagcgtttccttccaaagtatcggcagtttcaggtatgtccgtatggcaatgaatgtctttcagactaagaagttctattctgttacctaaaatagcggttacttcttccaatttgtgtgcattgtttgtggcaaatacgaatttatgtttcatatgttgattggttcttatttcactttcagtcggtcaaaaccttctccatagactccgataacggaactttgagagataaatgcgttcgggtcaatgtctttcaccaaacggaaaatatcaattgactggcgcttataagctaatacaacgagtacttttacattgtgtttactgtaccatcctataccgtccagaacggttacgccgcggtgtgtctcttttgtaatgcggtcggcaatcttttcatactctttggagaagatgaagaattgcacggactggcgggcactgttcacaatatagtctaatacaaaaccgataacaaacaaagttacaaaaccaaatatcacgcgtctccagtcatggaatacgaagtaacaggaactgatgataatcacatcgcaaagcataaccatacgccccaatgtgacgtctttatacttatgtatgatagcagcaataatatccgttcctcccgtgcttccgttgcaattgaatacgattccaaggcctgcaccgcacatgacggcacctatcatacaagccatgaagtcctgccccggtcccagtataagcggtggcgtattgtcgggaccattcacaagcatttggaaaaaccataaaaagaatgtcagcccgaagatggcgaacgtggttttaatactgaatttaggacccagtattttaatggcaaatgtcattaagacagcattgatgatgaagtatgaccattgaataggaaagtccgtggcgtaatagatgattgcaccgatacccgtagttcctcctgtcgttatctgataaggaatcagaaacaacgcccatcccaaggcataactgataagaccgacagtgatgaagatatagtctcgcaactccctcatcatttcggctttggttggttttgtgatttgcatattaatcagttacaagatattaactacgagttacaagttacgaactacaagagagcgagtcaagttaccttttctctctctacttgtagcttatagcccgtagctcgtaactaatttatttaataacaatgtttacgatcttcttcgggacgacaatcactttcactactgatttgccttccatccatttagccgaacgttcatctgccaatacggtgctttgaatggcttctgatgtttcgtcagcaggaaattccatattgaagcgtgccttaccattgaaagatatggtgtagttgattgtatcttccaccaggtattcttcgttgtaagcaggccacttggcatcgcaaactgagtctgcatggcccagtgtatcccacaactcttcacatacgtgcggagcgaaaggagccaatacaataaccagttgattcaatatttctttcttgctgcatttcaaactgaataactcgtttacgcagatcatgaaagcactgacggaagtattgtaagagaactgttcaatatcacccgttactttcttaatcagtttatgcaaagatttcagttcttccttggttgcaggttcatccgtcactatataactgtcgttacggtcgtagaacagtgaccagaacttcttgatgaagcggtatacaccatcgataccattcgtatcccaaggcttggattgctctaccggaccgaggaacatctcgtacatacgcaatgtatccgcaccgtatttctcaacaatcatgtcgggattaacgacgttgaacatggatttactcattttctccacagcccagccgcagatgtatttaccatcttccaggataaactcagcgttggcaaattcaggacgccatgctttgaaagcttcaagatccagaatatcattggatacaatatttacatccacatggagtggggtagtgtcgtactgatccttcagattcagagaaacgaacctattgctgtctttgatacggtaaacgaagttactccgtccctgtatcataccttgattaaccaacttctggaacggttcttctacgatagacactcctacatcgtgcaggaatttattccagaaacgtgaataaatcaagtgtcctgtagcatgttccgtaccacctacatagaggtcgacacttctccaatattcatctattttcttatcaaccaatgctttgttgttatgcgggtccatatagcgcagatagtaagcgctggaacctgcaaagcccggcatggtattcagttcaagagggaatacggtgacgttatctatcttttcattctctaccacacatttgtttacagtgtcccaagcccatttggtagcgtgtcccaacggtggttctccggtttcggtaggaaggaatttggcaacttccggcaattcaagcggcaaactactttcgtcgatcatataaggcattccatccttgtagtaaaccgggaatggttcaccccagtagcgctggcgggagaagatagcgtcacgaagacgataattcacctttacgcgtcccagattatgttcttttacgtaattcttggttttttcgatagcttctttgatggtcagtccgttcaatgtaagatcacaataaggagttacatcaggtctcggagagttgcaaacgataccttctttggcatcaaagctttcttcgctgacatcacaaccttctaccaacggacggatctccaatccgaaatgtttggcgaaagcatagtcacgactatcgtgtgcaggtacagccatgatggcacctgtaccataaccggcaagtacatagtcgctaatccagataggcactgactcacctgtgaaaggattaatggcataacttccggagaatacacctgtcacgctgcggtctgtaatacgatcacgctcggtacgtttctttgtgcgttccaggtaagcgttaacttcatccttttgttcaggagtagtcaactgagctaccaattcgctttccggtgccaacaccatgaaagtaacaccgaacatcgtatctgcacgggtcgtgaagatggtaaattccagatcgctgtcttttactttgaactgtacttcggcaccttcgctgcgaccgatccagtttctttgagtttctttcagagaatctgtccaatcgatggtatccagtccgtccagcaagcgttgtgaataggcagaaacgcgaagacaccattgacgcatcttcttctgaactacggggaaacctccgcgttcggatacaccgtctatcacttcatcgttggccagaaccgtacccaattgggcacaccagtttaccatcgtttcacccagataggcgatgcgatagttcatcaggatttcctgtttctctttctcgctcttggctttccattcttcggcagtgaagctgagttcttcgccacaagccacattcatgccgttggtacctatttgttcgaaggcctgtatcagttcttcgatagggcgagcctgcttttcatcattgcaataatagctgttgaacatcttctggaatgcccattgagtccaatgataatattccggttcgcaggtgcgtatttcgcggctccagtcaaaacagaaacctatcttatccaattgctcacggtaacggtcgatattgttgatcgtagtaattgcaggatgttgtcccgtttgtatagcatattgttcggcgggaagtccgtaagcatcatatcccataggatttagtacattgaagccctgcagtcgtttgtaacgagcataaatgtccgaagcaatgtatcccagcgggtgtcctacgtgtaggcccgcaccggaggggtaggggaacatgtttagtacatagtacttctgcttcgtctcatcttccttcacttggtaggttttctcttccacccaccttttctgccacttcttttcaatctccctgaaattgtactccataatggttttctttcgttattttatggttgatacttagttatatactttattaaacggtgcaaatttacgggtttattttcagattcatagcttagtacaacaaaaaagtatttgtctgtaccataccagggatacacttgctccgtatcaaagccgtactttctccgtgtagaagtacttttgaccgaagaatgtacggagcaagtacggttcggatacgtttcagacaggtagcggaacatttgaaaatatatattttttcctgtttagtgatatctaaagacacaaaaaaaacaactaattcattgtgaattagttggctttagctttactattgaaagaatattcctgcaatattgaaaacaaactatttactgataaacacttttgttagtttaaaacaatttataaatcagtatagattagaaagttatttgataacttttccctgcttccgttgatagttcttttacttttccttcataccgcagaagacatttccctccctttaaggattttatattagtagagatgagttttccggctttccattccatatcaaaaacaaatgcaccacgtgcacacaagcccgtcacttttccatctttccaggcagtaggtaatgaaggcaacaagtcaatataatctgtatgactttgaagtatcaattcaatcattgccaaaggaactcccatcatatcgcctacttgtggacgaccgtgagcatcgacaaacatattagggtatgcttttgtgaaataattgtgctgcatcatatctaaactcttatcaccctctttcaaacgagcaagcatagaagtaacccatcctaagctccaaccttgggcatgataattatgatttaatctgtaatccaaagatttacgtacagcatcaacaagatgcggagttttgtcttgagtaattctgtttcctggcatcataccccacaagtgcgaaatatgacgatgtcccggttctgtttcttctaactcttctgtccactccatcaaacgtccatcgttagcaatagttggcatactaagttttttcatacttgcttcaacttcaactgtttcttcgttgttaatgcctaatattttgcatgcttcaagaaaatctctaaatgtattccatataatttcttggtcgtaagtacagcccatagttaaacttgcaacttttccatttactttaaaacgattttcgggagatgcagtaggaccagatacaagttttccacttcgtgggtcagggacaagccaatcaacgaagaacaatgcagtttctcttaatacaggtaaagctcttgtttttaaaaattctttgtcaagagtatatctgtaatgttccatgtggtgtaagcatagccatgcagcatttgtgatagacataccccagtgtgctttgaggaaagtgggaggagcataaaaccaggcatcagtacgatgacctgcaactgagcctcttttagttccaaacataacttgggctgtctcttttccattcttaataagattctctgtcaatgtaaatataggttcatgacattcagacaaattagcttgttcggcaaaccaataagcttcttgtatatttacgttgatatggaaattagatctccaaggagctaacattaatggattccaaattccttgaagattcataggcaagccaccctttcttgaagatgagataaacaaatatctgcaataattgtagtattcaaacagtagttccgaatctatctgcccacttgccgccaactgaatgcgcttgtcgatagggttattattaacaggtgtgttaaatgcaatatcaaatgacgaacgattgtataatgctgaatattcgtcaatgtgagtttgtttaagttttttgtaacctaacttttgtgcttgcgataattgcttttcgcaaatctttttacgattatgagttaaaacattcttcgtatcgtgtatattgtaatctgtgctaatagctatcattattgttacactattggcattgtttatttctatatctgtttcgttagcttttattttaccgccttcgttataatagttaattattccttcaaacttcacacctacaaactctccattttcagcataggcttgtccttgtacgtattgactacgattgttttctgcctttgtagttgctccaaacggacgtgtatatctagatttaaacgaaacttgtcccggtttgtcggcagtgattctcacaaccattacttcatttggtttacttacaaaagcctcacgggtataggttacaccgttttgtgtgtagcttacataagttatggcttttgtgtagtccaaccatcgtttgtagttgcttattactcctttatctttaaaattaatattcaagaatccaaaaggttgataacttctcgcattttcgtgtactccatctgcgaactctttctcacaaacgattactgcttcttcatattttccgttgaaaataagattacgcattttattgattaattcgggacctttaggattgtttggaggaagtggaggaccacaccaaattgtattctcattaatcacaatttgttctgttgaaggatcaccaaaaatcatacctccaattctaccgttacctattggcaatgccgatttccaatcagatgctggttgtgcataccaaaaatggctacatttgtcttgtgcaaacgttagctgcaaacttgacataagcaagataattacaaatagtaaatttctcataaattgtttttattatgttattcatgcgaatcaaaacttgaaagattactactgattcatggttaatattttgtaattcagttaattatcttatttatttactgtgcttggatataattttctgaaccattgattacaactacttcaccaaaaaaatgggttttcaaatttgattaaataattgtattttcatcactgttattttttcgactaaactattcagataaatttctatgttcggatatattttgtcaactgttataagatttgcatcagttggattactatgattggaatactgaatgattttccacgcattcggcatcctattattgtctgtatcaagtagcacagattatataatcaatattcatattttacttattttgattggatatccgctcttaacttaacgtgaatagtgctattgagcacaggagattctattacgaatcgaggattgtttaataagcgaataatttccgaaccagctctcattacggttccgtgaaaattggtggtacagcttttacctctattaaaataataaacattatcatgagcaagcgttgtaccttccacaatatcgcacacttcgcctgattcagtaacttttgtagcaagtgcattccatcctgcaagagcagcagagccgtaaatatgactgagccagccttcatttaccccttttgcaatactgtaaacgaaaatggcactggctgaggtttctagatatgatcggggttggtcgagtagattgtgccataaaccggttccatcctgcaaatgtaccaatgcttgtgcatgcctgcggtatagcgctaacactttatcccgaccttcaaagttttctggtaacaccgacaatagctcagccatggccataatacaccagccatttgcccgtccccaataaaatcgtgggtcatctgctgctgagttcacattccaaccatggttgtacaagccggtttgctgatcaaagagtcttgcagataattgtactacttgcctaacagaatcttcgtaatattttttatcgccggttaaagatcccatttgtgctagaaaaggaatacacatatataaatcatctgcccaaagcgattgaggttgcggtcgttggcgggctattgtcctatcgcgcaaacgatactgcttgttataaatataatctgctatagtatctatccattccctgaatctagggtcgggatatcttttctggatttttatcaacgctgccccgattgcaccacaatggtctaatgctgccatatggatcatttttttatacggatgatgtcgtatcaggccgttttcttccattgtccggaaataaggcatagctttaaaagtgaaatcaaaaaagcgtatggcataattgaaatatgtcgtatcattggtagtttcataaagatcgttgcaggcagaaagtgagacaccattcggatacgaccactctataaagtaaaatgctccttgtggataaatcgcatttttattaggctgagagtatgaaatcgtttgtccgttaatagaatcaacaagataaaaaagcgagtttttctctactctttgttgtatccggtctacgatattttttacatctttaaccgtaggtattacgtaaggggtactgtaagtcggcaatgccggtttccttgctgaaatgcctgttcctaattgcgaaaaagctacagtattgcagccaagaagcaaaaaaagaacaaggtgttttttcaatgatactttattattcatttgggataaatattattttgtttactattcaaataatatgttgtaaaatttaccgggatagatattcacctcttttcccattccatgttattttctttttagttgtttttatttcagaataaaaaattcaatcgattgcaaatataat

SEQ ID NO: 6355 - DNA, 15403 bp, Unknown
  gut microbiota DNA sequence
ctttttcctatatttctttcaatcgattgaaattattcaaaaaaaagctctatttttgcaagcaaatcagaattaacaaagatgaataataaaagagtaaccatttatgatcttgctaaagcaataaacctgtcaccttcttatatttccaaggcattaaataatcatccttcggtgggagataagatgaaagagaaagtgagaaaggctgccaaggatttaaattataaacataactcttacgctgccaatctcaggatgggaatttctaaaacgataggagtaattgttcctcatataaataagagtttcttctcagaattgattgcaggcattgaagaagtttgttttgaacatgattatggcttaattatctgtcaatcacaagagtcgtatgaaaaggagtgtagagctattgatacgttaatacgccaaaatgtagatggtattttaatttctgtatctgctgagactaattcttcagaacatcttcagaatatcataaaccatgatactatcttgattcagattgatagatttattgaaaactttaatagttataaagtaactaatgacaatgaaaagcttgcatacaatgcaaccatgcatctgatcaatcaaggataccaaaatatagtttttttggggtggacagaacagcttactattgaccagttaagaaaaagaggctacctgcaggcaatgaaaacttcagggcttaccagccatatttatgacaatgctattcagaaagataaaacaaaggaaattataactctattgttgtcatccaatactcctccagatgcatttttgactttttctgacgagcaagctctatgtgtgttgcaagtagctaactctttaggtattaaagttccccaagaattaggaataataggctctggaaatgatattctgacggagattactacacctactttgtctgcagtcaatcaaaaaagcatagagatcggcagaaaagctgctaatctttattttgaaattttagccggaaaaaatgataatccggtagaaataaaagaagagatcattcaagcagaaataatcggcagggaaagtactgcaaaaaatagctaaccatgaaaacatatttaatttttgcaatcagtttattatcaacatcattcactttttcgcaagcagtagtgatagacggtgttccgcgtgatacttcttttgcgttaaacactacttatcagaaagaattacgttaccgtccctacattgaacccgtaagagctagcctacccgataatgtattagccaatgaaggtgtaacttataaaacagtagaaaatgcatggggtaagcatgaattaaagatgaatatataccgtcctaatgacggtaaagaatatccggttttaatgatgattcacggtggaggatggaactccggaaatttgggattgcaagtaccaatggcacaacaaattgcaactaaaggttatgtaactattcctgtggaataccgcttaattccagaggcgctttatccggcaggggtggaggatttggaagacgctattgaatggatatacaataatgcaggaagattcggcattgataaagaaaagattgccgtatccggttgttcagcaggtggtcagttagcgatgttaattggaatgaagaatgcttccggcaagattagggctgtcatcaatatggatggaatctcttcttttgtcacagacgaatcgataaaccgagccaaacaagcacgagatagtaacaagccattgcctattgatgctatctggctgggtggaacctatcaagagcagaagaaaaattgggaagaggcttccgctttatactggataagtaagaattcggcaccggtttgttttattaacagttccattcctcgttttcataatggccgggacgaagctattgctttacttaataaatatggaacttacaccgaaatacatacatttgaagataccccacatccttattggtttttcagaccctggttcgatcccacaatcgaatacatgactgaattcatgaataaaattctgaagaataaaagataggatattctttctacaatctattttttggtaacataatgaactttttgataatgtcaggtctaagcacaattattagtactcagccgagaaaaaacgataaacagataaatatttttgttaattcagaacaatttctaatttttattgcttatatttgtgaagtgcttattaaaactaattcaagtaatgtaatacaaaaaatggcaaagttaattcaataggattttacacaaaagtgtttttaggatatttcaagggatgaagtctgagaagattgcatccctttttgtttatttttctgccagattgctgaaaaacactctaatcacgttgttaataaacgtgggtaaagtttttaaaaaacgtcacccttatttattaaaaacgtttccggcgtctattaaatcccctgttttattgtacaaaaagtagaaatggtatatctttgcctccaatttatcgggaacgtatgaatgagaagaaaaattacacctatcatctgatagctatcttcaccgtaggagtgtggggattaacttttatctccaccaaagttttaatagccaatggactttctccgaaagaaatctttctgcttcgttttctgattgcttatatcggtatctggtttatatctccccgcaaactgtttgcaaataactggaaagatgaactttggttgttgttgggtggcatcacgggcggttccgtctattttctgacggagaatatggctttgggcatcacattggctaccaatgtggcgtttattgtttgtacggctccactgcttaccactatcttttcactgatgatttataagaaggaaaaggctacccgtactttgataggcggttcactgatggcattgataggggtggcaatggtggtttataatgggagttttgttttgaaaatatctccgttgggcgattgtcttactttggttgctgctctttcatgggcgttctatagtctgataatgaagaagatgacgggtaggtataatactatttttattactcgcaagatctttttctatggcatattgactacgcttcccgtctttatgtttcaaccttggaaggctgacctttctttgctcattcagccttccgttctgttgaatttattgtttctgggtgtcgttgcttccctgatttgttttgcagtttggaatgtcgtactgaaaaatctgggaacggtacgcgcttccaactatatttatctcaatccgctgttcactttggtaggatcggctatcctgttggatgaacatctgacagttattgcactgatcggggctgcttgtattatggggggagtatatatggcaggaaagaaataaccggcagattattcttcagcaaatagtattattcttcttcgatacctttctccgagtgttgcaggcggtaaaatgttttttgtagctcaatctccctgcgtaactcttcctccgtaggcatatacaacatatatttggaagcaaaaagttgattattgtcatgtagtactgagtagcgggctatatcttcgtctgtttctgaacagagaacgataccgatggttgggttatctccttcaccacgtatccgttcatcatacatccgcacatacatatccatttgtcccacgtcctgatgtgttataggatttgttttcaaatcgataaggacgaaacattttaataaataattataaaagacgaggtcgatgaaatagtctttcttctcggtacgcactaatttttggcgtgttacatacgagaatccttttcccagttcaagcaagaaacgttgtaagttgctgatgatagccgattccagtttggattcggtaaagtcggtgttcggggacaatccaataaactccgctaccgtaggattcttgataaactccaatttgtcctgctgatacggaagcgtgagcgacttcatttccgtttccacttttttccttgtcgtgcgagagtagcagacgttcgtaatactgtgaaccgatgttgcgattgagtgtgcggtaactccacatctgctcttgtgcttcttttagataccatgcacgggcttcagaattgggaactgttaataagcgcttgtaatgagaccaattcaatattctccatggtgtagagaatatttcgggaaaggtttgatagaacagtcgatagttgtaaagactggggactgagaaccccttcccgaactcttacgtaagttctgtcgagagttcttttagcagttgtgttccgtagtcggctcgttcttttccctgctgttcctcttccacgatacgcttgcccatcagccaataggcttctaccattgccgaattaatggcggtgtaggctttctgtcgggcttcagttacaatttgcttgatttcatgaatgaaacttgtgctatgtaaggctatatggttttcttttttcattgtcaaaatggtaaatgatttaatgacaaagttaggaaaaaagcaggataaatgcacaattaaggtactgtgtatttgcgatgcctgaatttatttctctgcaaacagaatgatttcttccggttgtgtggagtgttctaccattaggttccagctactttcttttttgttccattcgtagctttggtaatttacgcccattccattgatttggtaaacggctttggtctttacatcggtgtaggcattgtcttttctgttccatgctgcgtattctacgtttacttctccaccgtcgtatgagaagttcaggcaatactgtttctcgaagcgttggttgcctttactccatttcgatacctctttgctggatacacgtccttcggcatcatacgcatagttatattgcagatgattctgaagatatttatcctctttcactttgtatacgtttttggtttctacacgatctccatccatgcgggtgttgtaggcaaaaccttccagactgttgttatttactgcgtttacgattgaagttactgcaaatactactgataatactaaagttttcataatggtgttattttttagttatacatttttgtttctttcgatgttgcaaaggtaaggcagaggctcatggaagaatgttattacaatgttatctttaggttaacaaagaaaatccgttgatttgtctactatttctttttcaaaaagaaagttttttctatttttgtcttttcaagaaagaaataatttcaatatgttatctttatgaagaagaaggaattactaaaacagttgattgcaggtttccaggcgggtttacccgtggaagtatatccccgtgaattgatgctacctgtagatagtaacaaaattattacggttccgggtgtgagacgttgtggcaaatcttctttattcttattggtaatcaatcaattgatttcggagaaaggcatccggaaggaacaaatactttttctgaatttcgacgatgagcgtttgcagtttgatgctgaaaatttagatgaaatattgcaggcttatcgggaactatatcctgatatttccttgaaggatgtatatatgttctttgatgaaatacaaatggcggaagattggcaaccgtttgtgcgtagggtgtatgaacaggagtgtagacacatctttattacaggcagtaattcaaatatgctttcgtcggaacttgccacttccttgcggggacgtacattgcagtacgaagagtttcctctttcatttcgggagtattgttcatttgtaggcgtggataccaattattatgtacctgaatatagggcgcgcattgtaaatgcatttaaagtgtacctgcatcaaggtggttttcccgaagtcagtcttgctattcctatgttgaaagaccgtattctgcaggaatatttcttcgtaatgctctataaggatttggtggaaagatatgaaataaagaatccggaacctgtccgttacttcattaagagagtaatgagtaatttgacgaaaccgacctctatcaatcgtatttataatgagttgaagtcacagggggttagtatcggaaagaataccctgtatgatgtaattgtacaaacagaatctatctatttgtttttttcattaacgaagtatgagccttcggtcgtaaaagagagtagtggagataagaaatactattgtattgacaacggtttacgttccgtgttgcttaatcctctaagtgaagataatggtaaattacttgagaatgccgtttatcttcatttacgccggaatttgcaaatacaggaaggtttgcattattataaaggtaagaaggagtgtgattttgtaattactaaccatgaagaagtgaatcagttgattcaagtgacttatactttgcacgacgaagatactcgtcaacgggagatagacggtcttttggaggctgctcaaactacaggctgccgtgaattatttattctgactcttgaagaagaagaagaaataaatgtgagtgaatatacgattcatgttcttcctgtatggaaatggatgctgaaaacattatatttgtcccccaaacaatagcaagatgaagcttcgctcactctatatcctctctattataggattgtttctcgttgtggtaatacaattgggaggcatgatatatgcttatgacagctataaaaatgaggcgaagcgtacactgaacgaatgtttccggcaagcttttatagaaacggtagataaccgggtgaataacctgccttttcctgattataccgtaccattctattcgtacatccgcagggatgaaaagatgccttacgatgaaatggtatttttgggatatcagcaagtagcctcttttctggaagatgtttatcatgtggagataccgctggatgagatggagaaggtattggaaaagaagctgaaatggaagaatatcgataggaccgtatggattgattcggtagaagatcacagtaaatattccgcttacagacgtttcaaaacggttatctcggagcaggcatggctgaatgaaagtaagggtaaagcgatagaagctaccattatttctcctttccttccacttgtgaaggatgtgtttttcctgttccttcctactctgctattaactgctttccttatttacagttgggcacagcagatgaagtatatcatcagccagcgccgggggattgaggaacagcgctctgctttctatgctctggcggagaaaatgaggttgccgataggtaaggtgcgcaggcagattcccgaacaacagtgggaggccatagaaacatcgagcaggcagattctggatatgacggagcaaacactttccatggctaaagaagaggagtggaaacgccaggcccgtaaacaacattcgtttaaggtattcttcatagtcagcctgttggcaagttgtttgttgatggtagcctggtttgcttatttgtaccgcacagctgcccgtgagactgcttatcaggtgaatgattgctttgaagcggctttctatgatgaggtggtggaacgttatccgtcgttcctttcacagactaaaggaggaaaaaagcccatagaacagaaattgccagaggaagctccttttgccaaggaacaacagaaatttctacaaggaaaggaggctgagtatagcataaaccgtttgtttgtggtacatacctataatacgattgatcagaattatcgtcttcgtgcagccttgattatgcaacgtgagatcaatgaaagtagcatagaaatgcccttgtcttctttatacctggattcagcttttgcggagcgtttaagccggttgggcataaagtcacgtagtggtattcgtcagtttctccgttcttcggatagtacggttacagaggttggatacgcttccaggaagtatggtgattatacttctcagtttattcctttgaaagaagatagtacgctttgtgtgcagggagttgtgaagaacccttatcgtcatgtggcgacttctatctggtatcttttgcttcccttgtggattacattcctggtaatgctcgattgtatcttcggccaggtgaaggtgcttcggatgcaacatcgtctggagcagttccagaaagactttacttacgccatgattcatgatatgaagtctccgttgaactccatattgatggcggcacatgtgctggcaggagggaaactggcgggtaaacctgaaaaagaagagaaatatcgcctggtgatgacggaagagagcgagcatctgctggctttatcgaacagggtattgatgcttacacaattggatgaagggcatttggagttgcataaggaagatgtttccctgcgtccgttgattgatgatctggttgcgaagatttctctgaaagccggtaagagggtggaattcaatacggtttatcatcgctgtgagacggtctatgcggatgctttctgcctgcgtgaagtgctgggaaacttattggacaatgcgatcaagtattctcgtgcagaggtgaaaatagacattatctgtgagtcggaaaggggagtttgcaaaattaaggtatgcgataacggattgggtatctccttgaaagaccagtcgcgtatcttcaatcgctttgaacgctctgcggcggcagtacgcagtagtaaagggggtgccgcgggttttggcttaggtttgaactatgtgcagcaagtgatgctggcacatgagggcagggtagaggtggagagtgaagaaggccgtttcagtgagtttactctttattttccggcacgatcctgattttaccatatatggaatcgtaactcctgtgaacagtcattgataaatgcatctttgctgaatgaacgcagtttccaaaggatgcagatgtcgtccatgctaccgataagtaagaatgttccgaataatgtgaaataataattccctgttgccatgccatacaaaagcggaagtatgcctaacaacagaataggtaagaagcaggttgtgcgatattgccacattctgatgggttcgttgcagtgacagaaacgtatgcctcccttatgctttacgaaagagatggaccggaaacctttgggcgaaaagattccgaagaatagtgcatgaagcaatagatttactccaaagcctgccagggcgcacgaccagaatatcagcaatgatacatgagccataccttctccatgtatccatcggaataagagcagtatgggtactgtaaaaaggattgcagccagtattccatacttattgatcttatttcccgaaaccatgatttcggttcctttcttgctttgtacaattgagatatccgctttcatcattcgttcttttaattgaagaatatatttgcaatggcgtgtttgagtcctgtgtacgcaggattgactgtggccattaatacgtaagctgccaaaacgattgcaataccttttactaattcgattcctattttctgaaatttcttcatgacttgtttattatttaagtgatacattggggttatttcgatgttgcaaaggtaaggcggcagggagagaaggaatgttatcgcaatgttatctttaggttaacgatcataagttgatatgcaagtttagtaaggtataaagagctaataaaacttgctggcaaatcctttctgtatgattatgaggtaaatgggtattccaatataaatcgagtatctcaattcccctcctccggggaggaggagaattgagatagtattgctcgtcatttgattcattactatttcagcataaattagctcattatccttagttttgtctgttattctattggactattcccattataattgaaaatatccccttgcttcttctctgcttaatgataataattagttgaaaaacatagatttataataaaaatgagactctttatttgtcccccatgtttctttcctgttttatgtctatcttcttatttttgttccgttctcgtaagtagatacgatacaactattattaatctatatcagaaagtaaaattatggaaaaccagggaatacttctttatatcggaatagcccttatcatcttattggtactttggtatatctggactgccaataatctgatagcaaagcggaatcgggtaaagcaatgccgtagcggcatttgcgtggcattgaagcagcggaacgatatgataccgaatttggtagctgccgtaaagtcctatatgggacatgagaatgagacgctaacccgtatcgtagaacttcgttcacgaacttttcagccttcacaggagagtgaacagataaaaaccggtaatgagctttcttctttaatctccaaacttcaattatccgtagaagattacccggaactgaaagcaagcgaacagttcacccgactgcaaaggagcattgaagatatggaattgcaactgcaagctatacgccgcacctataatgctgcggtcaccgactataataactccattgagatgtttccttcttccatcgtggccggccggcagaatcatcatcaggaagaactgattgatattcccgaacaggaacaacggaatgtggatgtcagtgcacttttaaagtagatgtaatatggaatcaattgacttcaaaagcctttccgaaaggcttcgtaccgaactttcccgtgtatatttctggcagaagatcgttcgtattctgagcatcatagtctatctctttgtcttttgctggatgatgttcgtcctgtttgggggctatcttgttggatacatcggtttagagaactacagtgtggttacgcaatacattttcccggtttttatgggatttattgtgctgaactttgcattcagccgctctcttatgaaattccaagggcaggaaaatgatatcatgcgcagcattatgtctgctatgtttccatcggttcttttctccttctcttcgcaactggaccagcgtatattatccggtagcaagctctttaattcttctttttccgatccggcattggcggctaccacctatgcttatctggaagtgccgcgaggggatcgtaccctttatatagccgatataggggtttcctatgggctgatgaataagttggagctcaactctgtagcgggctatatcgtgatgctttaccgctatgtgctccgtccgctgtttgcctctaggtatgaaagcagtgcgcataacttccgcggaatgtttggctggtgtcgtctggaacgtagttttaaaggtagcacgattatcctgcccgatcatctggaacaaaaggtcggctatttggcaaagaatatccagggcttgaagaaacgctataatgcccgtttcgttcatctggaagacccggatttcgagaagtatttcgtggtttatgccgatgacgaaataactgcccgtatgatacttacaccggcaatcatgcgtcagattacccgtctgcgcgaaacattcgggcacgatatgatgctctctttcagcaaagatactttttactatgcgggagtgatgcccgacggcttcctctgtcttcgcaaacaggcactggacaatgaacatctgcttgaagagatatacaatgacataaaccttgcctgtcaggtgacagatatcctttaaaaccatattataacatgaaacaaacacttacatttattcctcccgtagtggactccacgcaaagttccattcatacggaggcttacgaaaagagcgtggacttgtataaccaaggcgagtatctgcaagctttccacagtttgctggattacctgaatgcggacttccggacgaagtatggcaatgcagatggtactgaatttcatattccccacggttctatcctggtgcatatctctgtaaaagacggattttaccgtatcagtgccgacttcctgaacttgcccgagaaagggcgtgtagccatgcttcgacagattgcagacctgaatctgaataaactgctgttgcctcgctttgtgaaggacaacgataagttgagaatggagtacacgtgttctctctcgcagagccatccccataagatgtacttcgtgttacagaatatctgccacatcggtgataaatatgatgacgagttttgtacgaagttcggtgctactcggtgctatgagccgcaggtcacctcttatccgcaggaagagatagaccgcatttatgaaggtctgcaaatcttgggccgcgaaacactggaagccgtgaaagagtatgatgtcgaccggaaatatggctactcctggaatgtactcgatacgactttctatcagatttcctactttgcccgtccgcaaggccagctattgaatgatcttgataaagcggtggatgatatggatgccgaactgcctactgccgaggtggtggcgaaaggtaaggcctttcttgaaaaattgcttgccatgactaaagaggaactggcggctgatctttatttcgtagatacattggtgtctaccaagcgacgttcgtctctgaagaatatgcaggagaactttatgagtgtctataaagaagctactgaagccattcagacggaaaactatgagcggagtgtggtacgtctactctatatcttctatgaggcttatttttataatgatgtgcaggatgacattaacgtaattctttcgcatgcgcttaaaaaagcaagcggtaagccgctggaggatgcatctgaaatcctttataacgcaatggataaaataatggaaggtgatctggaaccggatgaggatgacttggaagagatatcggcagaagccatcgaacaaatacagggcatggcagcatctctgcaagaggaaatcatgaaggcacaggctgatatgcagtctgccatgatgaagggagatatggccgaatatatgcgtttggcgcaggaacttcaacagaagatgatgcaacaagcacttggcggacaacaataacagattaaaaacaatgaatcaatggaacagaacaatatatatcagttggttttcaaagtaacccatgcaggtggatcaggcagctgtttctatctgaaagactataatctttttgtgacaaactaccatgtggtgaaaggctttcatgcagtggcggtacatgataatgaccggaatccttatttggctaaggtggtattggtgaatccttcattggacatagccctgttgtccgtagacggtgatttctcggccctgccttccctgaatctggcaggagataattccttgtccatcggtggaaaggtttgtgtggccggttatccttacggtatgccttttacggtgaccgaaggctctgtgtcttcgcccaaacaactggtggatggaaagtattatatacagactgatgcggcggtgaatcccggcaattccggcggtcctatcttcaatgaaaagaacgaagtggtaggagtaacggtgagtaagctgagtaatgccgacaatatgggtttcggtatccgtgtggaagcattacggaagctgcttgaatttgtggaggctgcggaccgtacagcttttcaggtgcagtgcgacagttgtgacgaactgatatcggaagaggaagaattctgcccttcatgtggcgaaaagctgcccgaaggtatctttgaagagcgcgaaccgtcttcattgagtactttctgcgaacgtgccatccgtgagatgggagttaatccgattcttgctcgtgacggttatgactcctggacattccataaaggcagttccgaagtgcgtatctttgtttatgaaaatacgtatctgtttgctgtttctcctatcaatctgttgccaaagaaagaggtggaaagggtactcgactatatcctgagtgaagattttagtccttacaaactgggtattgaaggacgccagatttacatagcatatcgtgtacatctgtctgacattacggatgcatcggaagatgagatccttactaatctggtgaatctggcattgaaggccgatgagatggacaatatgatggtagaagagtttggttgcgaattctctgaatattctaaacacgaagactgactttaagtgataattgcaaacgcggctgtctgaaagattatctttcggcagccgcgtttttcattggaaactgtaagagagaattcttgttagagtaattatctgtttgccagcaaagcgctgttccaatttgttgcattgtgctctgttaccagattccaggagttatctttctcattccagttgtaagccatgtagttcatgccgttctcgttcatctggtaaacggctttggctttcacatttgtgtagtcaccggctttgctgttccatgctacatattccacgtttacttcgttgtcggtgtagctgaagttgaggcaatacagcttttcaaatcggctgttgtcctggttccatttcaggatttccttggcggatacacgtcctttttcatcatgtgtgtagttatattgcaggtggcgttccagatacttgccttcttttactttatagactgtctgggtttctacaccgttttcctgtttctcactgttgtaagcgaagtcttttacgttgttaccacttactgcatttactactgatatcaatgcgaatactactgataatactagagctttcataatgattttattttttaagttatacatttcgttacttttgatgttgcaaagatagggcaggggcatgaggatgaatgttatcgtaatgttatcgttaggttaataaaaagagtttcttaatccgatggtggaattctgcaaataagcctgttttcaagcgggaggtatagtcgtaagattatgcctttccttgtggttgaggagggagacagcggtgctttgtcacgcctctacttgttccattttgtttcttcctcttggaacaaaagtgccttgcttgtggaacaaaagtttcttggttaagaaataaaagtttcttaggtaagaaacaaaggtttctcagagaagaaactcttgtttcacaataaggagacaaatgttccgataaagtggagcttacgtttctccgtaatagaacaatatctgattaataatgtcttattgaagaagtaggcactggtcttatttacagcggcttatcactcttcttatttatagtattctcatatgcaagttctatcttgatttcaccaatggatactctatagatatagactatggagataccttatttgtaacctgttggtggaattgatttatttaggtatagaaaagaacaaaagtgattagtgtttagtgataagtgattagcgccattcggtatattattttttagacgcggatgacacggataacgcggatttaaa

SEQ ID NO: 6356 - DNA, 38712 bp, Unknown
  gut microbiota DNA sequence
tataagacgcaatttaatatcattttgtcacaactgaaactaattttctttcgtcaacaggctttctaattcttccgcattcaaacgcaaatggaattgtcccttataggctacggaaatggaaccggtttcttcggaaacgataatagccaatgcatcagattcctgagagatacccatcgccgcacgatggcgcaatcccagttccttaggtatatccagattatgtgataccggtaaaatacatcctgccgccttgatccttcctttgctgatcaccattgcaccgtcatgcaaagggctattcttgaaaaagatattctctatcaaacgttggttgatatcagcattgataacttcccccgtgcgtaccacatcgtctaacgggaaattatgttcaattacaatcaaagctcctactttctgtttacccatgctgatacatgccatgaccaccggcatgatttcatcatgctgcatattctccttcttattcccggtgaaaaagcgtaccaatgcactggcatgctgatgtgaaccaagcgtcagtaaaaaacgccgtatctcatcctgaaagaggatgataagtgctaccacacccacgctcaccaacttgtcaaagatggaaccgagcaacttcatctccaatacctgcgacactaccaaccaaatcaatatgaatatcaggatacccgtaaacacattgatggaaccggaagctttcatcagcttatacgtatagtaaagcagaaatgcaaccagcaaaacatcgataatatcttttactccaatatcaaaaaacacaatagtttaagatttatgatttataatttatgatttatgagccaagtggccttcctctatcacttatcactccatcactttatcaccattccttctcatcgcctccacaatcttcaccgtttccacggcttctcgtacatcatgcacccggagaatatcagcacccttcagcagacaaatcgtatcgagtactgttgttccgttcaatgcatcctgcggagtacctcccaacaaacgataaatcatcgacttacgggagacacctaccaataagggcaactcaaagacacgaaactcttcgagatgcgccagaagttcatagttatgctctaccgtcttaccgaaaccgaaaccgggatcaagaataatgtccttcatacccagatcacgtaattgctgcaccttctgtgcaaaatataagaagacctctttcaaaagattgtcatagtgcggatgtttctgcatattctgtggggttccttgcatatgcatcataatataaggcacattcagttcggccactgtacgaaacatatccgtatccatctctccggcagcaatatcattgatgattgccactccatattcttccacacacatccgtgccacatctgccctgaaagtatcaacagaaataacagctccggggtgtgtcttacgcaagatttccaatcccatacgcaaacgttccatttcttcatgaggagaaacattctccgcattcggccgggaagaatatgcaccgatatctataattccagcaccttcatccaagatctgctgtgcccgcgcagttatctcagcctcagtctgcatacgcgaaccggcatagaaagaatcaggagtaatatttaatattcccatgacgcagggaacggacaggtcgagcaaagaaccgttgacgttaatatatttagaggataatgtttccatggataatcctttttcgtttatactttgcaaatgtaaccaaaaagattatcgtaaatacattaaatacaaaaaaacaagttaactttgctcaggattaacaaccaatagatagaagtagtaaactatggaagcatgcagaacgactggactggtctctctttttctactacttttctggttgcttattcccggacatatccacgggcaacagacaagcgaacaagaaaagtatcatgttgacagtacattatttgtatattatcaacattgtaaggcagaaataaaatctccttctgtcatgcagatgctcgatacgttattccttatggccaaagaaaaaggagatttgcgtatgcaggcagtcgccatatccagcaaaacagatcatttctattttggcccgtcctttgaaggccaagaggacagcctgatattgtataccaatgccatcaaagactttgcccggaaaaccaatcaacctcaatattattattttgcctgggccaaccgcctcataacttactacacaaaacagaagaaattaaacctggccctctatgaggccaacaagatgcaacaagagtcggaaagccgggaagaaatcgatggtatgcagaattgctaccaagcactgttgcgcatctatcagagtaaagaactctacaaacaagccactttatatgcgcaaaaactaatagacctcacattaaaatataatctgaataagtataatctaacaaataaatatcttgaattaagtaactgctacctccgcaccaacgaacctgcaaaggcttggaaggctcttgaagaaagtaaattgtatataggtaatgaactaaaccaaggagcttatttatgcggactacttcgttattatattcacaccaaagatatggtcaaagcccgggaaacactaaaagaaaccacacaacttttcagcaagaataccgaactgcgtattaagcgtgctactaatctactggaaattgaaaccaattactacatagaaaccggcgaatacgataaagccctggggatattccaacaagcctttgaaaagctgagccaaaacggatttatcaccccaacactataccgcacacgtggggctatctatactgctaaaaaggactatcagaaagcgattgagagttatgaaaaagcttttgaactcagtgattcactgaatagtgcccaggaagacatagctgtaggagagttcgcaaccattttgggaatggaacatcttaatttagagaacaaggagttaatacaaaaaaatcaggaaatacaattagaaacacgccggcatatcatcattctattatgtatcatagtagtaattgtcggtattatgttttttcgcgaaacccgactgaataaagttctgcggcgtgccaaagatgcagaacagagcgccagccgcatgaaaacagaattcatacagaatatgagccatgagatacgtaccccactcaattccatagttggtttctcgcaaatactcagtagcaagatttccgaagaagacgaagagtcgaaagagtatacaactatcatcgaacaaggtagtaatcatctgcttcaattagtagacgacgtattggaattatccagtcttgatagtggcactaccatccctatcgacacaaagagtgagctaaatgagctttgtctacaatggatggaacgcgcaaaacgcctggttaaacccggagtcgttctttcttatcaacctgaacagaacgaactctatctgcatacaaaccctgcacgtcttgaacaggtagtattacaattactgcacaacgcagcaaaatttacagaagaaggtggtattacacttagctggcgcattcttcccaaacaaaagcaaatcatgatttgcatcactgacaccggcattggcattccccaagacaaacaagattttgtgttcgaacgattcgctaagttagatacattttcaaaaggtaccggattagggcttgccctcagccgtctcattatggaaagaatgggtggtaatcttgtacttgatgcccaatatacggatgggtgtcgctttatgctgactttacctatataatagtttccagaaagttccataaaaactttttattccaacaaagaaaggctaaatttgcaaaaagagttttaccacattagtaatgaacacaaaaaagccgttttttcctattttcatcattttgtattgtctcggcactttatacagttctccaatgcaaggacagcaaagagacacacaaaaagaatacaacgtagatagcacattatatgcttactatatgcgttgcaaagccgaagtgagttctcctatcaccgtgcaaatgtcggatacacttttccttatggccgaagaaaaaggagaccaacgcatgcaggccgtggcattatgcaataaactggatttctattattaccaaaatagccaactggacagcatcagtcattatgtagaagtaattaaagactttgcaaagaaaaccaatcagcctaaatattactattttgtctggagtaaacgactgatcaattactacatcaagcaataccagtataacacagccttatacgaggctaacaaaatgatgaaagaggcagaacaagagaaatacatgaatggcatagccaatgcctacaatgtcttaggttctatctaccatctcaaaagattattcaatctgtctatcgacaacaaaaagaaggaaatagaaatcattctacaatacgatctggataagtacaatctatccatctcctattcaggattaacaaacctttattgcgaattaggggaagcaaataaagcacttgagaatctcaacaaaagcgcctcttgcctttatagtagcacgcaagaattctactatcatgtgcgtgcagcccaatattacctctttattgaggactattcccaatcctggaaaagtctgcaaaaagccaaagaattatatctctcaaagaaagaggtacagaaaaacgtagaagaatattatgaaatcctacaaaaatactacacaaaaacaaagcaattcaaaaaagcattagaagtccaggattatataattgctacattcaacccgaacggaaggtacaaagtagaagctatgcgtagacgcgcatctatatattatgaaatgggggacaattccaaatcggcacaatactatcaggaatattacgctttaaatgattcaattctgataacaaatgaagatattgccgcaggagaatttgccgccatgctgggagtagaacgcctgaatctcgaaaaaagcgagctgcaacaacaaatacaacagcgcgatctggtgaacaaacaacgtatcattattttcctaatcatcctgttgagccttggattcattattttctatcgcgagcatctgctcaacagccgattacgcatctctcagaaacagcttagcgaaaagaacaaagaactgattcgttcacaagtagaactgaaacaggctaaagaacaagcggaagaaggtagccgcatgaaatcagaattcatacagaatatgagtcatgaaatacgcacaccactcaattccatcgtaggtttctcacaaatacttagcagctactacggtgacaatgaggacaccaaggagtacgcccatatcattgaacaaaatagcactaacctgctgcaactgatcaatgatgttctcgacctttcttatctggatggagaacaaaacatccctgcggaaaccattgcagagattacaggtgtttgtcaaacttgcatagatcagacatattcctatctgaaacctaatgtgcaactcatatttactcccgaacgggaaaatttctccatgcagactaatcccgaacgcatttcacaggttctaatgagtcttttgcaaaatgcagcaaagttcacaacacatggcagtatttctctttcctatcacattcgtgaagaagaaaagatgattctttttagcgtaaccgatacaggtataggcatcccgatagagaaacaagaatctgtcttcgaacgtttcaacaaactggatacgtttatgcccggcaccggattaggtttatccattagtcgcctgattgcagagaagatgggaggtagcctcaccattgattcaacttataccacaggttcccgttttattctgattttgcctttgaaagaataaaaacattttcattgtaaatgtatcactgtagcggagaatacctatctttgcaacgtttttatacaacagaaaataacaacgtttcaaaaaggagatagttatggatatcaccgccctatacaagatatttctggaatgtaccagtgtaactacggacagccgcaactgccctgaaggttctttattcatcgcactaaaaggtgacaatttcaatggaaatgcttttgcagccaaagcgttagaatcgggaagtgcctatgttataatagatgaagccgaatatgcactcgccggagattcacactacatattagtaaacaactgtctgcataccttacaggaactagccaactatcaccgccgtcaaataggtacacgtattatcggcatcacggggactaatggaaaaacaactaccaaagaactaatggccgctgttctttctaaaaaatacaatgtactttatacacaaggaaatctgaataatcatatcggtgttccccttactttactacgactaagagcagagcacgatctcggcatcatagaaatgggagccagccacccgggtgacatcaaagaattagtggacattaccgaaccggaatacggaatcatcacgaatgtaggaaaagcacatctggaaggtttcggttctttcgaaggggtcatcaagactaaaggcgaactgtatgactatcttcgcgaacgtaaaaactctactatcttcatccaccacgataatttatatctgaggaatatggctcggggattgaacctgatttcttatggaagtgcggatgaattatacgtcaacggacacgttacgggcaattctccctatctgatttttgaatggagagcaggcaaagacggtgaatctcatgaagtaaaaacacagctaatcggtgaatataattttgccaatgcacttgctgccgttactatcggtcacttctttgaggtagcatcggagaaaatagatgcagcactacgagaatataccccgcagaacaaccgttcacaactgaagcagacagcagacaatacactgattatcgatgcatacaatgctaatccaactagcatgcaagcctcaatcagcaacttccgtaatatggaagttgaaaataaaatgctgatattgggggatatgagggaattgggaaaggatggtccgaaagaacatcagaaaattgcagacttcttggcagaatgtggtttcaaggatgtaatgctggtaggagagcaattcgccgccgcaaagcataacttcccgacttacccggatgccccggcagtcatcgaagttttacagaaaagcaaacctcatggaaaaacgatcctaatcaaagggtcgaacgggattaaactgagtacggtgattgattatttatagtcaatcaccattattgtttctttgccattcgcggacgtaatacaaaatatcctatcagcgaagcaatcagcgctcctgttgtatttgcagcaaagtccagccaatcgcctccacgataagtagtgcagtattcctgcaacaattctaccattccactaaataataccggacagacaaacgctcctacccatgcatgccacaatggagaatctcctttttggtgcgcccgcaggaactccagccacaacataccagacatccctaaatacatacaaacatgtacgattttatcaatattaggaatattgctcaaatcggtggtaggcggtttaaagaacgacaaatagattaccgtcagtataatcagtaatgataccggatatttcttaatatagtatagcatatctcaatttatgaacgatttgtgcgcaaaagtacagaacattttctatatttgcatgttctagtagagaataataacgaaatgaaagaaaaatctacttttttatgactaaaaatgacagagccaattttgggagcaaattaggtgtcatacttgcttcggcaggttccgcggttggtctgggtaacatctggcgatttccctatgagacaggtaatcacggcggtgctgcgtttattctcatctacttagcatgtgtacttatattgggaattcctatcatggtatccgagtttcttatcggacgtcattcacgcgccaacactgccggtgcttatcaaaaactggcaccgggtacgcactggcgttgggtaggtcgtatgggagtattggcaggttttctgatcttgagctactattccgtagtggctggctggacactggaattcattggtgaagctgttaccgataactttgccggaaaaacagcagccgattatattaacacatttaattccttctcttctaatccctggcgccccgttatttggctggtactctttcttctttccacccacttcatcatcgtgaaaggagtggaaaaaggtattgaaaagtctgccaaaattatgatgccgatgttgtttattctgttaatcatactggcaggttgttccattgcattacctggctctggtgccggtctggaatttcttctaaaaccggaatgggataaggtaactaccaacgtattcctaagtgccatgggacaggccttcttctccctgagtctgggaatgggatgcctttgcacctatgcatcgtatttcaaaaaagacacgaatctgactaaaactgctttcagtgtcagtattatcgatacatttgtagctatattggcagggcttattatctttcctgctgcattttcggtgggtattcagccggatgccggtccgagtcttatcttcattacactacccaatgtattccaacaggcatttagcggagtacctttattagcttatatattttcagtcatgttctatattcttctggcagttgcagcactgacttccaccatctctatgcacgaagtggtgacggcttatctgcacgaggaattccacctgagccggaaacgcgcggcaagcttcgtaacgggcggttgtatattttggggaaccttatgttctctttcattgggagtaggtaaaggatatactctgttcggcttgaatttattcgacatgttcgactttgtcacagctaagatcatgttaccgttaggtggtctgtgcatttccatctttaccggctggtatctgaataaaaagattgtctgggaagaagtcagcaataacggaacactgaaagtaacgttctacaaattgctgattttcatattgaagtttatagctccgatagcaatttcactcatctttattaaggaattgggattcttgaaattgtaggagatgcagaatctatttaaagatttcttttacttttcccggggagaaaagcgaggtatcctgatgctcatagcaactatctgtatcgtttttctcgccgggtatcttatatccgcctggcaacgaagagatcagacctctctggatgacaagcttatacaagctatcgcccaacgggaatatgaagaattcatagcctcactggaagaaaaagagcaatccggtgaaaagcaatatacgagttataagccaaagaaggtagaaagcattcccgtcatcttggcttctttcaatcccaatacggcagactccataacattccgacacttaggactaccagcatggatgacaaagaatatcctgcactatcgggcaaagggtggcaaattccgtaaaacggaagattttaaaaagatatatggaatgacagaagatcaatactctgttctgtcaccttacatacatatcccaccggaagacacagtacgtcatacaccccaactgtatattacagaaactgtaccagtggaaaatataaaatataaaaccggcactattcttgatcttaatcgcgccgacaccaccgaattaaaaaaggttccgggtatcggaagcggcattgcccgcctgattgtgggttatcggcaacgccttggcggattctaccaaatagaacaattaaaggatatcaatctggatacccaacaactgcaagcctggtttagtatcgacctgacaaatgttcaccgcataaacttgaaccacactggcatagacagattacgctcccacccttacatcaacttctatcaagccaaagccattgtagaataccgcaagaaaaaaggctcgttaacgagccttaaacctttctccctttacgaggaatttacaaaagctgatctggaaagaatcagccactatgtctgctttgagtgatagccttaaaattacttctccaaaactcctgaccggatagcagcatcacgttcattcttcaagcgttccttctcctgtttatattgatttttaagggacctcaccttgtcttttttgacatctttagataaagaactattttcaatagcctctttatctttttcaaatttcgcttccaattgatcgagtctattatcgtaatcatctttcatgatgccgcgcaagccttcaccattattcatacttccataatgcgtttcccatgctttgatttgattttctgacaagatagccctaatggcagctttgtgttcaagagccaacgccctcttcttttgccccttttcatatccaggaaggttactccgtccaatagctctaaacttaggtcccacttctttatttagctttttgatttttgcaatttgatcggctgacaggttcaacaccttatccgattcgattcgtttaaaggaatcgaaatttacatcctgcgcataagcgaatgacacaaatgcagatgcaactaaagcaagaattacttttttcataatgcaatctatataagttataaaaatcagggctaagatataacaaaatgttataatttccatccatcttatatagaaacagatttaaaaggcgtttgtttttctaaataaaaaatagcaattgatgcaactttaccagactctacttcgtctaatcaatagaaaacaatctgaaacaggacaggccagtctgaaattagaaattaaaataaaaaaatcacaatgaaaagattattaatagccatactaatagtcagtatggtacagggagtatttgctcaaaaaatagagataaaaggtactatacgcaatgcaacagacaatgaagccacagaatttgtaaacgtagtactacaaaccaccgattctgtctttgtaaatggtgtgtctaccaacaataacggaagcttcatcttcaataaagtagaagctggaaattaccgattggttctttcttgtgttggatacaacacacaatacatcacattgaatggagtaaaacgtaatacagatctgggagatatttttctggaagatgcctcagtagccttggagggtgtaatcatcaatggttccaatcaaatcaaccgtcccgaccggaaactggtattcccttccgaacgccagatgaaagtctccaccaatggagtcaatctgttacaagaactgatgctcccacgtatccaggtcaatccgatgaataacgaaatcggaatatccggtgggggtgaactacaaatacgtatcaacggagtcaaggcagatatcaatgagataaaagctctgcgccccgccgatatcatccgtatagaatatcatgacaatcccggcttacgttatggcaatgcggaaatcgtactcgattacattgttcgccgccccgatacgggaggaagcttcggcaccgatctcagtcagggaatcaatgcaatgtggggaagctacaatgtattcggtaaagtcaatcataaaaaatcagaattcggtctttcttaccacatgggcccccgcgatttctacggtatgtatcgggataatgaagaaacattccgcttagcagatggaaataccactcagcgcgtagaaaagggagaacccagccatgccatgttgtttatgcaaaatctgaatgtcagttacagccttcaggcatccaagaattctctcttcagtgccacattccgcctgcgtggaaacaatcaacccaattgggattaccaaggagtgctctataatgtgaatgatgaaacagatatggtaaatatgatagaccgcaccaagaatagctggactcgcccctctttagacctctactatcagcaaaacctaaaaaagaagcagacgttggtattcaatctggtaggaacttacaaccgggagaagtcgcaccgtatctatcaggaaagcctacacaacgaaatgttgactgacattaataacaatgtattgggtgacaaatactccttaattggagaagccatttacgaaaagcagttctcaaaaggaaacgcattgagttttggcttaaagcacacccagtcctattctaacaacgaatacagaaacggccataattatgatacccggatgaaccagggaaacagttacatattcagtgaataccgtggtaagataaacaaattggattatagattaggaatcagtctaacccgtttctattacaaccaaagcgggaatgatgattcttctaaaaagtacaatgtaaacccgaaagctacattgcattacactttttccgagaactcatacctccgttggaaagccgaagtattcaatgcaactccttcattgagtaacctgagtgctatagaacaaactatagactctttccagatacgccgtggtaatccaaacctgaaatcgtatatgtgctatcgcacggaactgacttatgaatggaagaaaggcattttctacagtaatctatggggtgcatatgattatcgtcccaatgccattatggatgagaagttacaggaagacaataaaatagtacaaacgtgggataaccagaaagactggcaaaagttatctggacgtctgatgctccgtgtaggtccactatgggatatgctacaactttcatttacaggaggagtgaaccattatatgagtcatggaaacaattattctcatacttataccaactggtattacgaaggacaagcttcattcaattacaaacgattctccctgttctggcagatcaataccaattggaacaacttttggggagaaaccctctcaggaggagaaaacatccagatattaggtctatattataaatataaagatctccgtttgggcgtaggtgctttcaacccattcactgataattataaagtagagaatgagaattggaatcaatttgcctcgtacaagactaaaagctatattaaggaaagctcacgtatgtttctagtcagcttatcctacaatttttcttttgggcgtaagttcaaagcaacacaaagaaaagtaaacaatagcgataatgaatcaggagtaatgagtacgggaaaataaaatcaaactatttccccgtcaaccatgtgcaccgtacggtccgtaatccgtgccagtccttcatcgtgagtgacaataacaaatgtttgtccgaaacgattgcgaagatcgaagaaaagctgatgcaattcttccttattatgagtatccaggctacccgaaggttcgtcagccagtatcacagccggatgattaataagagcacgggctacggccacacgttgtttttccccacctgaaagttcattgggcttatgtccggcacgatcagtcaggcccataaaatccaataattccagcgcagatgcagtagcctctttctgccccacacctgcaataaatgcaggtatcatcacgttttccaatgccgtgaattctggtaaaagctggtgaaactgaaagacaaacccgatatgtttgttacggaaagccgacagttccttctccttcatacggctaaccaatgtaccgtcgatcgttatcattccgctatcaggggcatccaaagttcccataatctgaagtaaagtagtctttcccgctccactcggaccaacaatactaacgatctcgcccttatctatgttcaaatcgattccccgcagaacttgcaggctaccgaaactcttggttattccttgtaattgtatcatacatacttcatttttatctaatgaataattacttaagtactgattctttgcctataagatggcaaaagatgtgcttgctgatcataatctcttcaacacatactccgccagataacatccgaataccgccggcatatagctaacagttccacatgtcgatttcttattcatttcatcctcagtcagcagtaccgctttcggatctgcctgctccgtactgaacactaccggcagtttacgcttaattcccattttttggagtcgttttctgactgctttgctcagcccgcaatgataagtatcccatatatcggcaaaacagacctgagtaatatcactctttgcaccggctcccatgctggagactatcttaatatgtcgcttcatggcctctgcaatcaaatgacattttggggacaatgtatcaatagcatccactacaaaatcataggaggccgcgtccagcagttcaggaatattttcatctttcagaaatacgggcaatacggtcagtccaatttccggattaatgtcccggaagcgtttctcaagaatttccgccttactcatccccagcgtagaatgcaaagccggaagctgacggttcaaattcgttggttgcaccatatctgcatccacaatcgtcatacgccctactcccgcgcgacaaatcatttccgccgcatacgctcctactccacccaggcctactacaagcacatgcgcctgccgtagccgttccatcttttcatcacccaacaagagttgtgtcctttgccgccaatcttccatccttaactaatcacttatcacttttcctaaaccatttatagaaccatttacccaccttttcataatgctgatcctcattattgccacgcgggttagaaaatgacaacatatcttgaggctcacccaattgatccggatacagcactatcaaactattattggcaaaatactttcctaattgcgcgggaagtctctcaaatgcaggatcataagagatagaaccacgacgggcactgataatcacgagtaaatgatcataattcacctgcccggtcagcaacaacaaatctccccaatcgtccaaacgagaaaaatcagtcatggtggaactaaatcttttcttcaccagaatttgcaaaagcgtggttgtttcttcgttagcgaagaaatgcacccggcaccccaatgtatttcccatacggcagaaatgttccacccacttctggaaaccagcttcatattccgctttgggcggaacggcaatattaattctccgtaaagtattaatcggcatcaggaacttagcaatcattacttcccgatgcaagcctttcagcaaattctcagccagcataccaaagaaagaatccacgatattcaccttacggtgcaggccaatcactacatccgtcactccatgttctttagcagtatggataatacccgaagcaatattcagatcataacgactaatttgttttagtggcacatccgctgaagccgttatcatcgccgctttctccagataacgttttccacggagttccagagcttccgatgcattattatcatttattacgttcaacgccaacagattatccctctgtttagggtcacgtatcaccaatgacagattaaccaagtcttcaatcgtatccggatttgcaaccggtatcaaaatcttctctagttctgtcggacgcttttcatcctccaaatgcgcctcatcaatagctattttacgggcagcgcgctcagtaataaacgaactcaccacgcaagtcacaaggataagcaacacagtaccgttcagcacatcatcattcagcaacctttcaccattgggcaagatgatgttatatccgaccaagacggcagccagcgtagcggcagcctgggcattacttaaaccgtacatcaactcccgctcaatggctcccatcttatagattttctgtgtcaaccagcaagcaatccatttaccggtcaaagcaaccgctatcattactcctgccaccttcagagcatcaccatgcccaaaaatcacatgtatatcaatcatcattcccacaccaatcaggaagtaaggaatgaaaagcgcattacctacaaattccaaatgattcatcaacggagaaacatggggtatcaaccggttcaacaccagccccgcaaggaatgcaccaaggataccctccattcctacaaattccatcaatcctgcccctaagaataccatagcaagcacaaagatgaattgcattacattatcatcgtacctacggaagaaccaacgaccgatacgagggaaaaaatacatgatcaatccaccaaggaaaacgactttaaccaccagccatacccaaaacagtccaccggattctcccttaaacataccacccactacagccaggaccagcaacgtaagtgtatcagtcaccgctgtacctcctacagcaatactgacacttcgatgtcgggatacaccataccggataacaatgggatatgctaccagagtatgtgaagcatacatacttgccaacaggactgaagtgatcaaactatacttcaagaaggtcatattcaccaccaaaccgatcatgattggaataataaaagctaataatcccagcattacggccttcccccgattctgcttgaaatccgccatattcatttccagaccagccaaaaacattatatagtataaaccaactttaccaaacagttcaaaactactatcccgcgccaaaatattaaatccatgctcaccaattaccaatcccgccaatatcataccgatgatatgtggaatacgcaatctattcaacaaaatgggagcaaacaatatgataagcaatacaaggaggaatatccatgtaggatcagtaatcggaagtttcagactgaagtcaaataagtccatgggcttcaagttttaggttttacattgcaaaataacaaaaaagttttcattttatacgttgtcatacagcaaattgttataaatttgcagccaattctatcgtttttaagcatagaagaacatttttataaacttaataaaaaacaaaagaaaatgaaagtagctattgttggagcaagcggagccgtgggacaggagttcctgcgtgtgctcgatgaaagaaatttcccgttggatgagttagtgttgttcggttctaaacgcagtgccggaacaaaatacacattccgcggtaaacagatcgaggtaaaactcttgcaacacaacgatgactttaaaggggttgatatcgctttcacttccgcaggcgctggtacctctaaagagtatgccgagaccatcaccaaacatggtgccgtgatgatcgataactccagtgctttccgtatggataatgacatacctttggtagttcccgaggtaaatgctgccgacgcaaaagatcgtccacgcggcatcatcgccaaccctaactgtaccactatacagatggtagtggcactgaaagccatcgaacagctttctcacataaagactgtacacgtttctacatatcaggccgccagcggtgcaggtgctgccgctatggatgaattgtacacacaataccgccaggtgttagcaggtgaatctgttactgttgaaaagtttgcataccagttggcattcaacctcattcctcagattgatgtattcactgataatggatacaccaaagaagaaatgaagatgttccacgaaacccgcaagattatgcattctgacataaaagtaagcgcaacttgcgtacgcgttcctgctcttcgttctcactctgaaagtatttgggtagaaacagaacgtcctatttcagtggaagaagctcgtgaagcttttgcaaaaggcgacggtttggtattgcaggataaccctgccgaaaaggaatatccaatgcctttgttccttgcaggtaaagaccccgtttatgtaggtcgtatccgtaaggatctggctaatgaaaacggcctgactttctggattgtgggtgaccagatcaagaaaggtgctgcactgaacgcagtacagattgcagaatatttggtaaaagagaatgctctctaagcattactgataaaaatagaaccattggagaaatggttgtaaacaaaaaagaggttatccagaaaatgaggataacctcttcttttatgatagaggaagattacaccaaaggattcactcccacaacttctttaccgaacttatcgtccacaataatcaaaagaacatatggtttattgttgtctataagagaaaagtttaattcaaggagttcagtttcccgaaaatctacgctttgcgaattaaagccaactttcgcattaaacgctttcacttctatcttgtggcatccaactcctttcatcgtcaacactgttctatatccatcaactcctgaatatcgcttctccacattaatctgaatattatttataacatcaggcttaagttgattcattcttaaataagcggccattcctcccatgaatctattgactggttcaatccaaagttctttgtaagtggcataattagatgaagaccaatacggatcatcccctgtcatacaatccatacctacaggtagcgctcctacaatattcttggtacaataggcataaagaggagcataatcgtacccaactccatacatcagactttgtccgaaaggattattgccaaatatccattgcaattgtttagttaccaactgcatccccaaagtatcgttcctaagcaaagaagcttctgctaacgcccatgtagcagacaggtgggcattggtactaccatgaaatagttcattttcccagataggaaatgtcctcaaagcatattcttcattcaggaccgtaccttcattatattgctttaaaagttgcctgcgttggcaagaatctttttctgcaagtatagaagattttgaatatacagaatttggcaataaatcataaggggcggcaaccctgctaccccatttcatgaaatagtcactatacaatacagccgaagcataccagttcatccaattttcatcctctttgaattcatcgcacagttccctgaaagctatcattgcggcttcttcaaatgctgcatgtgtattatgaattatattcctgcgggatgtgtcgtaataaaagaatccggtgacaggcatgtcattgataaaactttgttcctgacattgtaccaataatttcccgaaatgaagcgcttgtgctttataacgttcttcaccggttgcccgatacaataatacagaagcaatcgcaccccatgaagcttcctgatatccggtacgaccccaatcatcttgggatgcaaaagcaaactcccaatcttctgtagcgcacgccaacagcttctttgataattcagggtccgaatcaaccagtattccggccgccttacattcaaccgcagctcccaggaagttctcccaaggtactttttgtgcctggctcacattgtcatccagagtgcctgccagattatctgtataaatcctcataacactccaacttatgtgataaccatcttcgaagcgagtattcagtaaccaatctataccccacttaatttcagaatgcattctttctgacaattcagctaaagctttatcttttcgaatcagttctaaattactaagcagagcatacactcccatggccgtacgccaatacccttgcgataagtcagctgcatcgtgccaacctccattaataaccttccgttcattaccatgaaagccgaaccaatccttatgacatgcctgatgaatacccggtacatcatagccacaacgctggcaaaaatagaaattcaagccactaaacaatggggacagccagatattctcttcaattggaaaaggaagagactcattcgtaccacattgtaaacggtaggttccctcttctctgaaattggaaaagtccaacaaataaaatattccgttcttagtagtatctgcaacaaccgaaccctgaaaagctatttttccatcaacatccagcaactggaaatcctgacaatccggatgtccaatcatagcaatctttttatcttccggtctatatccgatatgtgaaaaagagaatttgcctgaaggaagatcccacccttcaaaattatccgtctctactttctggagctggaacctatcaaaatcataagtaatgaccgattctccctcaggagtatgtccgattaatgtctggatgatattgaacttctttactttatccctctcaagatgtggtatctcccataatacatgattccattgtcccggaacaaggtcttggacaaaatggtgcttacgcgatgtagtagaattataatcagtaccttcgttctccagttccagaaaaaaacaataaataggattggaagtgggatgtatatacacccagaaagacaaacgattgaattgggaccaatcctgagttttttcaaatgtccgccctacactggcatatccgccttgctcccctttgaaagaattccaaggagtacgattcataggaagccgatagtaagcagtatctaccagagaagtacggaaacgaagagagcggcgcccgtctacagcatgttcttcggtgtaatagcactcggcaataccggttgcctgccattcgctgtcttgctccatatcttcaatcaagagtgaatccaagactggcttccgttcccattgcgatagtaatgaatattctgtccgaacaggtaatgggaaacgttgtccaaattccagtctgatacctctaccgttcgcattgaatataaagacaaacgacagtaatgccagttgcactaattttcgggtattattcatgaaaaactttcaactttaatattttattctatatttatattctattcaagctcctcagcgctacacatcgctcaatttattaacggaaccgaatagccttctccgtattaagtacggatttggtacatctttatataaattttacaaaccaatctactttattttcaaaagtaccaattcagcccccaactgcaagcttattttgtcaccggttttaaggctttgtattatctggtctgactgattaggaatatacatatcgatagaggaaggtatttcagcaaactccacattcacatttaccggagctacttcaatatccttatgagttttcacatcatacacattcactttgcggaacaatgccaaccaatgactgccatcttgcttttgaagcaatgtatattcaatatccttaaccgttggatcaattccaaactttagtggagacaattcgtaagatacttcttcctccttgactatcgacagcagattcttcagtgcccggaaagatggcttagcactaccatctgcacgtatcaagccataatgcatattcatatcatccactacaccggccttattccaatccagaagttcataaatataagtccgggaaacccctgcattataatatacaaacggcagatgaacatgataaatagcagcggccttttccgaacatcctctaaactgattgctattctcataattatgataaccagcttctgttataatcaacggtttctcaccgcaaataagtcttgccttactgattgccacttccatacgtgtcccccagtaattaccaaaatcctgattcgtaggatgtaaccccgaagcatacaaatgtagattaccaaaatccaactgcgaagaaagattgcctaatcgcgaagggttgtcaacgttctccgctaaagcaatccccaatacaggaacctgttttcccggaatagagcgtgcggcagtgaacactcgttgttgttcattgcgggcatgctgctcccactcaccaggtttcttattgaggtccggttcgttgaccggttctatcccccaaagcatctgtccaaaagccccggcacattccactggatcatccactaccggatcaccaccaaaacagatcagtaatagattaattccatactgttccaactctttacatctggttaacggagtatcacctgagtttccaccccagatattaccatcacgaatatgtttgacgcccagttccaataaacgtggtttgagcatgccttggaaatctgcataatttgtatcatagaaaccaatgtgagtattcactcctatcgagttaaagaaagcagatgcacgggtgggcatcacttcattcatggaaggagaactaccatctaccaaactaccatcttcacatcgacagaaaaggaaacctaaagccaagcaacctgtcaataataagtgtttattcatatattcctgctttaatcatgtttatttaatctttttcaacccacgtaacccttcttcaccagtggcctcaacaatactgatagctgctccgccacttcgtgccagtttctgtttgagtacactcttattggtaactactgctttgaaaatatgataactctgtggattcttttcccaatcagcatcttttccatcttcatatatagttgcaatgtacttttttccatcaggcaagaaatcgaaaggaatagttgctgtacgtgcattttcatcagtaatagcaccaacaaaccattcattcttcccttttgctttacgggcaatcgtgatatagtctcccggttcagcttccagaatatccgttttatcccagtctactgcaacatccttaatgaattggaacggttcaggataacgtttataattctctatcaagtcagcagccatctgtatggggctgtatatggtaacatacagtgctaactgtttcaccaatgttgaactacgcttacgcttattcgaaccgtaagtcgaaagatcaccctcaaagattccgggggtataatccataggtcctcccatcagacgggtaaatggcaggatagtcgtgtggtccggacgaataccatcgttgaaagactcaaattcagtgccccgtgcagattcctgagctatccagttaggataagttctgtacactcctgtaggccgcaccgcttcatgagaattcaccataattttataatcggcagcagtctttaccacatacaggtagtgattcaccatccactggctatcgtgatactcgctacgtggaataagccgtcctacatatcctgttttcacagcatcataaccattatctaccataaaatggaaagcatcatgtaattgcctttcataatcggaagctgtggaataggtttcgtgatgcattattatctttactcctttgcttgaggcataacggtgcaaaccctccacatcaaaatcaggatatgccttggtaaaactgaacacacgttctttcaagtaccctcctccattctcccaaccttcattccagccctccactaatacagcatcaaaaccattttcagcagcaaagtcgatatattccttcacatgggttgtattggcaccatgatgcccgtgtggtgtcagctttgtataatccgtttcaccgattacaacatcttgagcatctgtgtaagtccaagtagaacctcctcccgtgaaatactcccaccatacccccacatacttgcaaggtttaatccatgaagtatccgtcagtttgcacggttcattcagattcagtatcaagttagatgccaatatatcacgggcatcatcactgaccacaatggttcgccatggagtcgcactaccggtttgaatatatccttttactcccgctttatctggtgtcaaatgcgaagtgagtgtgaaggttttatcatccacattcaaacacatggcagcataattcaccaacgccgcttcatgaatattaatataaagtccgtcagtcgatttcagcatcaacggagtctggatgaccagtcccggtgcgggagcttttgctgctaaaccctccttccttacatcatccatcaaagtagatatctgagagagtgaagaggtggaaatcggatactcgttcgaatcatagtcagccggaatccagaaagccgtatggtctcccgccagacggaactctgtcttttcatcctgaatcacaaagcacctcaaacccggctgcacagggaactcatacctaaatcccagtccatcattgaacaaacgaaaacggatattcaattttaacctgctctctttctgtatgagttgcaccagcatttccttataatgactttggatccggttgttttctccccaaacgggtgtccaatactcttcttttgtatcatactgaatattatcaaccttgaaaccagcatccatcgcttgagaatcgttgataacgaatcccatcccaccctttttcaaaaccaccttattcttatagtcaagactataaatcggtgtaccattattattgacatcgaatgacaatttcaagtttctatccggtgagtcaataacctgcccccaaagtgagggcagggttaaacttaaaatgaataacgctataatctttttacctattcccataatcatatcatttaaaaagcgacttgtatggcaggagcatagttcagttttgcttcagaagcatcgacctgtgcacctactcggaaataaaatttagttcccggcttcagaagatgtttgtttgtagaaatgggaattgacaatctgcattcattgcctgccacatatccaccgtcttccggattgggccactcagcatacaattggcgcatctgctctcccacctgttggttttgatgtgcgtacaaaccaattctggtaattttatgccctgtggttttctctacttttgcggtagccaccacttcatccccttctatcttaatctgtacatctttgatcctcaagtaagggattacttcgaaatcataagtagtatttcctttaatggtaatttccacaggttctgtcgcagggaagttagcactcctaatctgtatcgtgtagtcatttgcaaacatcattttgttagcatacgtaccatcattctttatcaccatatattgcgtcaacggattgtcatatccgtgctcgatgaattcaatttgcgtaccacggataatatcctgttccaccaactcaccggtttctttatcgatgattctacccgaaagggtagcgtccggtccgtcgtaattatccagttcacatgagtgcaatatcaaagcactcattgctataaacaaagtttttacaaatatctttttcataatttctgcttaataattttagatcttaatagaggggattctgggtgatacctgtagtttcagtaccaggaatccatacataataagctttcggttcgaagaacttcatcccatcccgggaaatcaatttacgaacaaatatatactgaggtttctccccacggaggtcaatcaccggcatcagagcaagcctttccctaccattaaactccttctgatattcacgacggcgcatcaaatcccagtgtctacggttctcaaaggcaagttctaccctccgctcacgcagcacattgtccagtgtcaacggtatatccttcgtatgtccggcacgttttctcagtgcattgatagcttctgctgctctggtttgcgctccatttgccgaataattactttctactacagcttcggcataatttagcaggatttcagcatagcgtatatcaatgtaactggtagtcgactcaaagaatcggggagcaacatccgatttttcattcaggaacttctttctcaggaaaccggtacgcgtcatattcggatgattctcaaaacctgaatattcgctacgaaccgatgctccgaaggtatagtacttctttccgttgggcatggtgtatgaatcttcagtctctgtaacataacttccatctggttttatcataccaccttgaataatgatggtggtattcttccactgacttgaaggtacaatcaatgttccgaacaagcgggcatcctttcctttgaatatatccatcggattgtcgaagtgcaaatattttctagcaggattatagcctgaaacatcactaaggtctccatcttcagttgttactatcggtgcactatgccccggattatcatagttttcataaagatctgccaaatcgagagtggggttcgtacgtcccggataagaagcaccgttagctgtttggttcggattattccaaaagtctgtactgtgccctctctcagcaccgggttgtgcatacccttttgcaaagatcacctcttcaggagctgtagacggatcttcaaatatttcctgatagttacgagcagcctcttccgggttggctggattaggtttgtgcagtgaatagggactatcattcatcagagcttcggatgccttgatacaggcttcgtaataccgattggcatcatccgctgtcataccgcctacataccctttgtctactgcctctcccgaaaatggatattcattccaatatttagctatggatgcagcatgcagagctgctcttgatttataggcataagccgcccatactgttgcccgacgctgattatcagaccatgattgaggaagattttcgatagctttatcaaatagttcgagcacataatcccaactctctttctctgtagagcgaggcactttcagtatttccacatcaccttcatactcctgcaactctttcaccaaaggtactccaccatatcttctcaccaatgcaaagtaattataagctttgataaaagcacactcaccaatcagtgacttcttctccacatccgtaatatccaaagtcggaatagcagcttccagtacattcacatcgcggttcagcttatagccaccggtccaccactgatacatattgatatcccagccaataaacatccagtactcggagcttacggcctcatccgtgtagacagaagggttgattccaaaattctgggcaccattgtaattgtaattaaagcctttatcctggtcgaacgtaaagtcctcaatcggtagctgataatagagatttgccatataagcctgaacacctttcgggtcactaaacaggcggtcggctgttaccttatttttgggctccaaatccaggaagtccgaacaactacaattcaggagaaccgtcagagccagtaatatcgttatttttagtttcataaattctattctttaaaatgacacattcactccaatgttataactcttcattaccggataactgaagccacaaccataggcaccttctattttttccgggtcgaaaggcttcacaaatgaatcggcaaaagtaaacaggttatatgcatctacataaacgcgtacatcagccaatccggtctttgccaacagacgctttggtatagtatatccgatttctatattcttcaggcgtaaataagaagcatctcttctccatatcttactttctttgtacatactacccacctgccccgaactgctggctttgcttgcgggccatttgcccggaatccactcactgttcggatcataagggtcagcacgatgccatctgtcgtagaaataggtcggcatattggctccgttcaaagccatgatttcactataaatttccgtaaagcgcactgaatatttacctgaaccttgtaacaaggcattgaagtcaaaccctttataggaagcattcaatgtaataccatagtgcatcttaggttgtccggtccagaataaaggttgcaaatcgttatcatcgagcaaaccgtctccattgacatcctcatatttgaagctacccggcaattcctgaatatttccctggtctccattctgcagaatataactgttgacatcatccatatcctggaattgtcctaccggtacaaagccccaactcatatcattccaacgattggaacttccatttctccacttctccatactgcttctgaaaggggcacgttctacatagcgattcattgtacgggcaaagttcatattaaactttacaccataatgaaaactaccgatactgttattatgagagacagaaaggtctatacctctcacccggtcactgttgatattctcatcaggcaatgaacctccaaatgtattgggaagtgaaagattacgtttggccaataatcctttacggtcgcgttgatataagtccatctcaaaattgagcaagcctttgaacaagcctacatcaatacctatattcagtgttttcgatttcaaccacgtcagattcggattaataatgccgggcgaagctgctccaccggtataaacgccatctacaaatgaatatccgcctccaccagtagtagaaaatccttgtacatactggaacggctcacccgtattttcacccaccgtaccataagatgctctcaatttcaagttatcgataaacgtcagattatccttaatgaacttttcttctgaaatacgataacccactgacactaccggaaagaatccccatcttgcacctggagcatagcggtaagaaccatcttccctgaaggcaaactccaccaaatagcggctcatataatcgtaagtaaaacgccctatataggacatactggcttcttctgtttcgtaaccgccattcttcatgttgttgacacttccctgatctacctgatcattagtgtagaaatcataatcacgatgcaaactggaattacgataccaatacttactctgctcataaaccaatgtaacccctacattatgacgtttgttgaacaatcgttggtaggacacttgtgcctgcaataccaatttattatgatcgtcatagctattgttaatataagccggagcaccaattgtctgtttcagatatgtatctgtttcgctggcataggtaaatacatcatacgaacgatgtgcattctttcccatatacatattactgtcataagcaccggtagccttgatttgcagtccttgcgcgaaaggtacgtcatactttacagaagcggttgtctgaagtgccttgttattggtctgactataccctacgatatccgggtcggacatggctaccggattattgtccagaaatactttggaaggataatccggattgttgttggcaaaagggcgttcagtgggccaagctgcacgcgtagctttaaagatatcaaagaaagtaaatcttggtgttttctttgtatcgtaacgtccgccaatcaacacttcggctgtcaggtgtttactcaatttagcactcaagttacttcggaatgtatacttttcataatcgaaaccatcgttcttcacaataccattatcggtcagatagcccagactaaagaaaaagtccacgttttcgctcccaccggtcaccgagaaattgtgttgctgttgaaaagcgctgcctttcatagcttcgtcataccaatcggtgctttcgtatccgggtgctccctctttccatttcatcaactcttctttcgtaaggataggttcgccacctgcattgatacttgcctcattcttaatatccataaattgtccggcattcatcatttcgggtacatccgtaggtttctgccaaccgaacacaccactatagttgaaacgtggctttcctttctgtccttttttagttgtcacaagaataacaccgtttgcagcattcagaccataaatggctgccgaggcatctttcaggatggagatactttcaatatctgtcggattcaatcgttgaaattcacctgaaccgtcacggggaataccatcgataacatacaaaggtgtaccaaatccacggatactaatcatattatcaaaagatccaggctcaccggactgttgcctgatttgcaatcctgcaactttaccttgcagattctgtgccagactggaatgtgtcgtcgtgagaatctcatctgatttaatactggcaatagcaccggtcagatttccttttttttgtgtgccgtaacccaccaccactacttcattcaataattgtgcatcttcctgaagcacaatatcgaagtccgtttgatttttgattggaaactcctgagtagcatagcctacataactgacaaccaacgttgccttagggcttacctccaaagagaatccaccgttaacatcagtaataataccgttcgatgttcccttttcctggatagagacaccaatcaggagttcctgattcacgtcagaaacgtgtcccttcactcttacttttcctcctccttgcgcatatagtactgccgaagaagaaaagacgatcataaaaagaaagcatagtagctttcgagaaaaaaactgctctttccgcataatactaaatttaaaatttaacagcaaaatttactgatggcaaaattagtatgttacagaacagcaaagaagcaatcaatgcatgatacaaatagttaaaaacgatatatctctatatatcaacaatatacatcatttcaaaagagattatatacagatataaatatcagttataaactctctttatccgcataatatagtattcaaactcttctttcggaacaagtgatttggcttttatgcgagttttatatgcataaatggtattgacggaaagattgaggaactgagatactttttcgctgtttgtaatccctaatcttatcaaagcaaatatacgaagttccagagtcagcgcattttcttcgtccaactcaacttgtttgtcttcgggaaaaagcttattatactcgctgacaaaatccgggaaaagcatcaggaaagtcttatcaaatgactgaaacatgttctcccgttctctcttcaagtcaaactctgtatgaagtcctttaatagagtcatactggcggacagaaagtttatgatctattttcttgagaatggattctatcttattataatagtcggatttactatataaagattctaaaatatactggtctttaatagcatcagcttccttcagattttcataagctgtattcagttggtcgctcactgtctgtagctggttaaattgttcgcggattatcttttctttctttcccaactttttgtttatcttataatagaaccacaaacaaaccgataaaagggtggcaaaaatacaaaccaaaactaacagaattataagtttgttattctgccgcgctacaatctccatattttccttatcgataataggtaatacggcattgatatctactttccgatgccgggcattatagaaattagcatcttcaagtgaggcatgaatatatttgctcgccttttctatattacccagttcatagcaccaaatagctaatgttgttttagaagcggtttctgttattccgagccgaatatctgatatagcggataatgcaaggttataaagagccggttcgctattcctatcccccatatacaacgcccccaaaatcgaactatttatagccaattgatgtaaattacggtctttcgggtcagttattctttcataaaaagcaatctttttctcagacggtatatcagggtttgtataagttttcagtgccaatacattattgtattcataagaaccttcaggcagaatcaatagtgcagaatcacaatatgcctgacaaagatttacatacttcctatggtacggttctttcatattctccctggctagctcggaatataacctgctcatctgatcataaaatatttgcttctgtctgattgacattcgggaagtatttatctcttgcataacatcaatggcatccttaaataatccggcagatataaagcaaaacaataaattagatttagcagattccatcaactcatcattcttcaatagctccgccttttcaattgatttttgcgcatagacataggcagaatcaaactggtaagaactgtactcattgtataatttatcgcagatgaaatattgctcataaacactacttgcaacgaataaactttgcttcaatgtacttatctgtttttccttttccatccggtattccatctttttgcccaattcagaatccaatatagtaagaatagagtctgtccgagatgcagaagccgtagaaacgaattgtaccagtaataaaaataaaaacattctcatagtatcttcatatttagcatacgttcaataaattatattcgattgagtatttacaaaccaatataacagtgttcatctatgacaaaattacagagatattctatatagcagatgatttttataaattatttgtttctcaaatgaagaaatacataatattacaataaaaaagggaatcaactttcatggaacaatacacattcctttatagctttttcgataagtttcttcgcagcaggcctgcacccagggaaaaaagatgtatcaaaaacccctttctttgaagttttacgccaattcccggtgatacggccttgatggagaattacagattgaaatataccaaaattattataagcatacttcgtatgcgcttcctttatacagtctaaacgatttttgtaacttaccaggtattcatcaaacggtggaaggaactggaatacatttctttcatcaatctccacctctcctacaagcccgggcgaagaagcatgtatcagcatttcacggtcattataccgctctgttatcatttcagtgccaagtgaagcgatggcattacgcgcttcgcctatattcaatgcagaccaccaaacaaaatcttccagtgtggccggaccgtggctcctgaaatatcgccgtgtaagttctgcaagagcctcctcatgggagagctcgatggcatccggaattctttcacaggtcagtgcgtaggtatgctttccgttcttctcgatgccgctgcacacggtaccgtctgcctcgccaaaactcagatacattttcacgatgggttcatcgagagcaatgccctttgagtggagttgttcaagaacttcctggctcgtcaggtgttgtccgctcaacacttcttctatctggggcttactgcggaggaagtcttcttcagtcagactgaaatgcttggcataaaaacgaaatttagacagcagacctttagtggataaccccgtcatccatttgatgtctctaccgggaatgtaatgccacgtgggacgcatcacatgaagacgcaaaatccggcccgtatccagcgcctcttgcacagccgtcagcgagggacttgcaatacgcaaccctacagcccacttcgccgccctgatgtcctgtgcctgcatggcacccatccattcaacaacttcctccggcttttcaaaccgtggtcctgcaataccctgtgacaacattcttagtttaagcatggttcaaatgataaaattatgattttagtatcggacagctttttacaaagatagagaatattttgtgatatccaacaacgcccctatatcccaacaagaaagaggttggactctaacaaatagaatccaacctctttcagttacgccattaacaatctcaccttatttccagaacggattctgttccatattcgagttcagagtcagctgagtggtaggtataggatagaaataatgcttagcctcataggtacgcggttggttgatggtattggaaccaatcatgtatccatcactattaacatccacttccggattttctacattcttcatgttagccccaagatagatcgtaggattcttggaagagtcaagtaaatcaagcttatgccaacgaattaaatcccaataacgtgtccagttatcgcacatcaactcacaacgacggcaacggcggatttcccaaagcaaattactgacccccatattattagccggatcggcttccggactggtagtcatagcgggcagaccggcacgttcctgcaatttattgatggaattatcaagatcggcttgcgtcaatgttccaagctctgccttggcttcagcaaagttcagatagacaacagacaaccagaaaagcggacaatctgtatattgcttgccaatactgttacggtcacttaccgacaattccgccgtattatcatatttagctatgccataaccggtagtagaagtaaatgcagcaactccggcacggctataagcactacccttaaagcataatacaggatcgagagtaatcgccaatcgcttatcgcgaacagcaagcacagactcaaggttatactttccatttgcatcttttactgcggcatcattggtatccattgtagtggttgctttgggcttaccatcaaggaacaggtaactgtcgaaagcatttttagtcataccgctggtaccactggtatttatagtgtagtcaatagtagaatgcataaatgtattctgcgaataaggcttatagaatatcatttccggattggagctgagcgatattgaattataatttccttgatagctcggattcaatgaatatcccttccccatcaaagtttcacaagcagacacacattcacgcaagtacttctcagcacgagcgttgtcggcagccttaccagcattatcatttgcattgcgatacttacagtaggtaccttcgtacaacgtgatgtcagctttcatagccagtgccatgtcagcactgaagcgttgcttgttggttcccgtaattgtagtcgtagcatagttcagatcttcaaggacattgtccattacaatgtcgcgatccgtacgtggtccgtaaaccacatctttttctgccgggtctacaaccgtagttatccactgtacgtcaccatacatgcgaaccaattgataatattcccatgcccggttcaaacgtgccagaccttcataattagctttaacagcgtcatcaagagaagatgttttcaatccttcgataatataattagcacgacggatttcggtgaaagggtcggaccaatttgtagaagtagccactacacttgtgtaagtccagactgtcgactgatagtctacctgatcatcactcaatgtcttaaaatagtaccatccgctaccactgccgtttccataacctgaatagttgttatagaacgtattgcattggttgtcaagattactcgtattactccaatatgcaggagtattggtaaaggcatccaaaggtgctttgtcgagaaagtcattacaacttgtcaaggccatcagtgccattgttccgtatatgaatagctttttcatcattcttattgttttaatcattattataaggttacctgaataccgaacgagaaagtacgggtaataggtgccgtacgtccccaacctgctgaagtaagcccgtcgcctgtactgatttccggatcaacggggagatcgctacccttgtaaagcaagaagaggttgctaccgctaaagtagatgcgcgccttttcgatgaaagctttgcgggtccattccttcggtaaagtataaccgacagttacgttctttaaacggagataagacatatcagtcaagtaacggctttgcggatagtagttgttggaaccgttcgcaatacccgatacagtacctttggcttcatttcccggatataaacgaggataagtattgccttggttgatatcatagccggtaattgttttccagtcatcgctatagaacactctgttgtaacttgattgatgttcgtaaactgctaagtcggcagaacgcatcatcgggaaattcagagaagcaatagtccaatcagaacgtttgcctacgccttggaagaacaaatccaggtcaatgcctttccaactaccacctaagtggaagctatattcgtaacgaggaagtgaattaccgataactttcaagtcaccatgatcatcagctgttccttttccaccgtcaatcgcaccactgccatccaaatctttgaacttaatatcaccaggaccatagtggaacggagcccgttcaagtgcggactggctggcaacgcctgacttatagatccatgaaccatctgcattctgacctgtaaagtctgattcttcaaaataacgatctgtttcgaagccccaaatgtcaccataagtcttgcccgaaaaataagaactaagcaacttagtatcattattccactttgttactttcgttttagaatcgctaagattgaaattggcataaacattaaattcaccgaatttatgatgccagtcgaggttcaactcccatccacgagtacgcagtgtacctgcgttatcgtaaggagcagtggcacctacactgttcggcaaaacttgagctggagcaagcatatcacggttttcacgttgataccagtcaaaacctacggttagttcattattcaggaaacctaagtccaaaccaatgtcagtagtgcggatacgttcccaggtaagagacttcgataccagtttaggcatattgtattgagtcaatctgttagcattggccccattgccatctacccaataaatatatcccgtagccgatgtattttcacgttggctgatcaattcttcaaacatatagtttccgatagcttcatttccaatttcaccataggatgcacggaatttagcattgctgataactttcttcaacggtgcaaaataagcttcttccgagaatcgatatcctatagaggcagaagggaagaatgcccatttatcattgtgcgggaatctggaagaaccgtcataacgtccattcacttccaacagatagatacccttataatcgtagttaatacgaccgaaataaccggctgatgcacgggaagtatgtgaccagtttatttgctgtccatcttggctcgccaaattcaattcgggatatgcttcatcatacagtcctttgcgatatccatataaataagtgtaatccacttcttccgcattggctccaaccattacattcaagttatgactctttgcaaaagtcttggcatagttggcatacgcattcagagtccaagtattctgcttggaattatcacgccaaatagctgaattacttttggtaacgatatagctgggaacaggcattcctgaccagttgataccatagaccgaaaagtcctcagaaccactattcaagttctgaattgcataagtaaaatcggcatttaaagtaagccccttgataatttcagctttcaagaatgcattcatacgagtaaggtctgttatttccttacgatcagatgcttgtttacgcatagccatgaggcgagtatcataaccatcaatggtgcctgatggaatgaagaaagaaccccagcgccaaagggtctgataagtactactgtaaatatcagggcgttgataagccttgcgggagtaattgacacgtgcacctacttgcaaccaatcatataaattcgtagtcacatttactgaaacgttgtacttcttcaactcatccggacgcactttcataataccttctttctcatcatagccaaaagaaaggtagtagttagttttacctgaacttccctgaacggataagttgtggctctgcgaaggagcagctttgctataataaatatcctgaacatcccaatcggcatagtaataaggagttccgtcaatgatggtataatcaccgacattgctatcgctctgatacggtctcatttcaccgtatttcagttttcttcctccattctgttgtgcccacttttcagcataaggcaacaacttatcgaaatacataccaaagagttcgacttcatattggttggcatttgccttagcctccaacgcagaacgaagttgtgtgggaacatccgagaaattcggaaggtaggttgcttgatcccaagcaaagttattgctataatttatagtaaccttttccgtcggtttagcactctttgtattgatcaaaataacaccaaaggcagcacgcgtaccataaatagaagtagaagcggcgtctttcagtacagagatactttcaatatcctgcgtattcaagaaagagatatcgtccatcggaactccatccaccacaatcagtggattactcttttcagaattgcttaacgtaccgacaccacgaatacgcattgaagcattcccgttgatatcgccattttctgtagtaatgctcaaaccaggaaccgcaccctgcaatgccttggatacatcttgctgagggcgtcccgccatagtcttattcaagtctacagtagttaccgcacctgttagattagctttcttctgtacaccataacctacaactacaacttcatccagtaattccgtatcttccttcaacacgattttcatagtaggtgtagcttttacttcctgaggctgataacctacgaatgatatttttaatatagctccagtctttacactcaaaataaacttaccatcgatatcagttacaataccattcgtcgttcccttttctaccacactggcaccgataatcggctcgcccgtcgcatctacgaccaaacctgtaacattaatagattgtaactgctcagttacttccaagacattatccgaagcaacttgagtagccatcacattaccgctacttaaaaacagtgcgctcattgctactactgtgaggaatttgctatgtgctaatcctcgttttttgcgatcttcattcataaaaagattgatgattttgttattaattaaatagttctctctaaaaagttggggtaaggatagtcagttagaaatagctaaggctatttctcctgtcagataagtttctgtttcataggctctttctctatttataggtttaacttatattatatctctattaccataattatatatcggctaagttccaagagaacttggt

SEQ ID NO: 6357 - DNA, 93699 bp, Unknown
  gut microbiota DNA sequence
aaatgatttcttataataagagctataaatctcattaaaagaatttatagtagtatcgctcatttgtatgtcaactgcacttttcatttataggcattaaaatgatatagcaaagttaataataaacatttgataaaaacagaattctatcgaagatttatttgtgatacttaaagttatataggtttcaggctctaaatgaaaatattacagatatttaataaaaaggagaataatctataagattgaaataatcggctaccgcttccgcgcatcgttccccgtcaataccggcagaaacaataccacctgcatatcctgctccttctccgcatggaaacaatcctctaattcttacatgttgcaaagtttccctgtctcttatgattcgtacaggtgcggaggtgcgtgtctctacgccaatcattactgcttcattggtcaggaaaccgtgactgtatcgtccgaattgctggaatcctttgctgagtcgttcagtaatgaacggtggcatccagaagtgtaggggagaagagattaatcctggagcatacgagctttccggtagatcataactcagcttcttgcgtgtaaagtcctgcatccgttgtgcaggtgctgtttgtcgcatattgccttgttgccagcaattatattccaatgcctcctgaaagtacatcatgctgagttggggataggtaatactatcatcctgcatagctgttcctctattttctatcttcaatccttcgtcttccagatcttccggccttaactctacgaccattcctgaattgctccaacgcgagccacggttactgggactcattccgtttactacaatctgttgtgggccactggcagcaggtaccacgaaaccacccgggcacatgcagaaactgtatacccctcgtccgtccacctgattcacaaaactatattcggcggcaggcagatattttccccgtccgtccttgctatgatattgtatctgatcgattaattccgaaggatgttccaaacgtacaccgactgcaatacctttagcttcaacctccacttgattggcagccaaccaacggtacacatcccgtgccgaatgtcctgttgccagaatcaccggacccagaattgtttgtcctgtatgggtttcgataccttttatctcatcgttttcgataatcagcgcctccatacgtgtctcaaagtgcacttctccgccacattcgagaatggtattccgcatattctctatcacacgtggcagtttatccgttccgatatgcggatgtgcatccactaatatagcagtaggtgcaccatgctggcagaatacattcagtatcttgtctacattcccgcgttttttgctacgggtataaagctttccatccgaataagcgcctgcacctccttcaccgaaactataattggattccggatttacagtatgctcccggctgatctgagccaagtctttttttcggtcgcgtacattctttccacgctctacgatgattggacggagtcccagttctatcagtctcagcgcagcaaacagtccgccgggaccggcacccacgacaataacctgtggtttgtcttctacgttcttatagatagtaggctggtattcatcgtctttgggcatttcgttcagatatacccgtacattcagattgacgaagatggttcgttgccgggcatcaatgctgcgcttcaagatacgtgtcgcattaatattccgcacattcagtcctttttcctgtacgaggtactcttttaactgttgttcattggcggctacttcgggtagcacgcgtagttggtattcttgtatcataatttatttttttaccacagattacaccgattgacacagattagattatatatctatgtattccgttctgtagatttgttacgttgaaattaattagtaatcctaaattgtgctcagaaagtttgaggcatgtcaaaatttgagcagtatgaataggtaataaattctctactgactttaattcgagcacaatagaatcttctactaaaatatctattctatatccattatttaaagtagctcctttataattaatcataagctctttttgtttttcaaactttaagccttgtttctctaattcatagcatagacaggtttcataagtactttccaacaaacctggacctagaattttgtgaacttcatatgcgcatcctatgattttgtacgttatatcattaatatttttcattattaatctgtgtaaatctgtgtaatctgtggtgaatcacccgaatagcaccctgaatgcctcctccaccttcctcaccggtatcagttctattttaattttcttcgtatcaattccttgtaaattgtatttcggcagcacgaaccgtttaaatcccaacttttccgcttcaccgatccgttgttcaattcggttcaccggacgtatttctccggacagaccgatttcccctgccatacagacttccggttcaatagccgtatccatattactggaaagtatagcactgataaccgccaggtctattgccggatcattcaccttcagtcctccggcaatattgaggaacacatccttctgggccagtttgaagcccactcgtttttccagtactgccaataacatattcattcttcgaatatcaaatcccgtggccgaacgttgcggattaccatataccgcactgctcaccaatgcctgtgtctcaatcaagaacgggcgtatcccttctatagccgaagctatcgctatgccactcataccttcatgatcctggctcagtaataactccgacggattactgacttgccgtaatccatcctgacgcatttcataaatacccaattccgctgtactgccgaaacgattcttgatactacgcagaatacgatacatataatgctggtcaccctcaaactgcaacaccgtgtctacgatatgttccagaactttcggtccggcaatgctgccttccttattgatatgcccgataagcaataccggggtatgcgtttctttggcaaagcgcaggatacttgccgaacattcgcgcacttgtgcgatgcttcccggggaggattcaatgctttccgtagaaatagtctgtatagagtcgatgatcaccaactccggacgggtattcttgatgtgaacaaaaatctgttccaatgaggtttcacaaacgatgaggcaatctgtggaattgtgcgataaccggtccgcacgtaatttcaactgacgggcactttcctcacccgatacataaagaacgcgcttttcagggatatgaagcacagtttgtagtaccaaagtagacttaccgattcccggttctccaccaatcaacaccagagaacccggaaccaatccgcctcccagcacccggttcaactcttcatcatgcaagtcgatacgcggttcatcatccgcttctatttcactgagaatgatgggttttggcttttctgtctcaatcccggataccggacgtttgtttacgacttcttttcgtatcacttcttccacatacgtgttccactctccgcacgacggacatttgcctacccacttcggagactcttgtccgcagttgctgcacacataaaccgttttttcttttgccataaggaaatctacttgctgaatgatttgtcaaagatacgaatttagctgtttacgaggcagaaaaacaggacaatttattccacttcgtacctcctttatacctccttcgtaccctcttcgtatctgcttcgctattttcatccttctatagaagcgaaggaaatgcgaaccgggtacggctgaaaagagcttttgaccagaactgttcaggcatcaagttttatgaatagtccgaaaaattttcgggctgacagagtatttgtagagcttaaattgtggattataacagattaaaatagcgagaaagcatattgtggagtattgtgttattattgggtggttttatgttatcacttcttaccctatagcgctatatttgcgtggacttacgaaagaattatattcataaataaatagaaatctgatagatgaaaaaagtattattaaatctggtattcctttttgctttggtatgttttgctgaggcacaggagtttaaggttgctgatattttcagtgacaatatggtgttgcagcaaaagataaataatccgttctggggttggggaaaaccgggaacgaaagtgactatttccacttcatggaatccggataaagaatatacgggagttgttaattctaaaggtacctggaagatagccgtacctacgcctgttgccggaggaccttatgaggtgacagtcactgccaataagaaaaaaatctttcagaatgtgtttgtgggagaagtatggttggcaagcggacagtccaacatgagtatgccgttgaaaggatattattgccagccggtactgggatctacagaggccatattgtcttcagcaaaaaagcaaatacatttcattaatatacctactttagcggcctataaaccattggaacattttgaggccgaatgggtgaaggcttctccggagaatgtagcggaatgtacggctgtgggatggttctttgcagatttcttacagcgcaatatggatgtgccggtcggtattatcaatgccagttatggaggctccaacatcgaagcatggatgaatgcggaagcttgcaaacaatttgatgatatccccgtaccgccattgagtgatgaaacttctccgtggattagtaatgtgcctacggttctgtacaatggcatgattcacccactggtgggatatggcataaaaggtattatctggtatcagggtgagtctaatattttcaatgtgccccgttatgctccctcggttgctgccatggtaagtaaatggcgcgaagcctggggattgggagaagtacctttctattatgcacagattgccccttacgattataaagagtggaactttttcacacctcaatggccggaagtttcggcttatcaacgggaagcgcaaagacagtgcctaacgttaattccaaactctgcaatggcagtattgttggatgtaggagagcgatatctgatccatccgaggaggaaaaaagaagtaggcgaccgtttgggcatgctggcactctctaaaacctatggaatgaaaggatttgaagcggaaagtccgactttcagtaaaatggaggttgagggaaataaggctattattcattttgacaatcaatttaatgggcttaccagctatggaaagactttggaactgtttgagatatccggagacaataaggtattccataaggcggacgcctatattgatgaggaaaaaggtactgtagtagtcacatgcaagtatgtggcagagcctaaagctgtgagatatgcatttaaggattttgtaaaggcggaattatttggtacaggcggtctgccggtatcttccttccgcactgatgattgggattaattaataacatgatactatgcgaaaactattgattttattcgtatcggctttgctcccgtggttatctgtccggtcacagaaaccggtttataaagatgcgggacagcctgttgaaaccagagtgaaagatttgctgaatcggatgacattgcatgaaaaggtgcttcaactgaatcaatatacatttggggagaatgataatcccaataatataggtacggaggtgaaaaatcttccggcggagattggttcgctgatttatctccataccgatccgaagttgcgtaaccggattcagcgtaaggcaatggaagaatctcgcctggggatacccattctttttgggtttgatgtgattcacgggttgcgtacggtgtatccgatttcattggcacaggcttgtagctttaatcctgatttagtgactcaggcttgcgggatggctgctaaggagtctgtattgtcgggtattgactggacattttcacctatgattgatgtggcgagggatccccgttggggacgtatttccgaatgttatggagaagatccttacctgaatacagtctttggtgtagcatcggtgaaaggttaccaaggcgagaaactgtctgatccgtattctatcgcagcttgcctgaaacattatgtaggttatggtgtatccgaaggcggacgggattacaggtatacggatatatcaccccaagccttgtgggaaacctatctaccgccttatgaggcctgtgtgaaagcaggtgccgccactcttatgagcagttttaatgacattagcggagtaccggctacttcaaaccattacatcttaactgaaatactgaagaataagtggcagcatgacggttttgtcgtatctgactggaatgcaatagagcagcagatttatcagggtgttgccaaggatcgcaaagaagctgcgtataaggctttccatgccggtgtggagatggatatgcgggacaatgtttattatgaatatttagagcagttggttgctgaaaagaagatagaaatttcgcagatagatgatgcggttgcccgtatacttcgggtcaaatttcgcctaggcttatttgatgaaccttatacgaaagagctgaccgagcaggaacgttatttgcagaaagaggatattgctttggcagcgcgtctggcagaagaatcaatggtgctgttgaagaatgaaaagaacttgttgcctctttcttcaacggttaaaagagttgcgttgataggacctatggtcaaggatcgttccgatttgttgggtgcctgggcttttaaaggtcaggccgaagatgtggagaccatttatgaaggaatgcagaaagaatttggtgataaagtgcggctggattatgagcagggctgttcattggatggaaatgatgaatcgggtttctccgctgccttgaaaacggctgaggcatccgatgtagtagtggtatgtttaggtgagtccaaacagtggagtggagagaatgcttcacgctctacaattgctttgcccgatattcaggaaaagttgcttttgcatttgaagcaggcgaataagcccattgtacttgtactttccagtggccgccctcttgagttgatcagattggaacctcaggtagaagctatcattgagatgtggcagcccggtgttgcgggaggaactcccttagcgggcattttatcgggcagggtaaatccttccggaaagttgtcagtgacattcccgctgtctacaggtcagataccggtctactataatatgcgacagtctgcccgtccattcgatgcgatgggggattatcaggatattcctaccgaacctctgtatccgttcgggtatggattgagttatactacctttacttactctgatgcaaaactttcttccttgaaaatcaagaagaatcagaagataacagccgaggttacagtgactaacgcgggtaaggtggaaggaaaagaaactgtgctatggtatgtgtccgatccgttttgtagcatttcccgtcctatgaaagaactgaaatttttcgaaaaacaatcgttgaaggtcggtgaaagcagagtctttcgatttgagattgatcctatgagagatttgagctatacggatgcaacgggcaaacgctttttggaggcgggtgaatttatagtgtcggtaggtggtcggaaactgacttttgaagtggtggactaagttttccggtgaataaacagtctttgataaaaatagatatgacttatgaatagaataagaataaatatcctgttgctgttgttgtgcatattccttccgggagtggcgcagaatgtatctgacggatggaataaaaatagaacggcaagattgaccaaacctgtatttgtctataacaattggtccgcctatgatgaattgtctgataacattcctctggatgaggcattggcaatgaaagagttggatcacattgtgcgtttgaaaaaattgggtgtacaggtggattattatatgatggacgcattctggtttgatgtgaatgaaggatatcgtaagtggaggccggactgttggccggaaggtcccaaacgttggctggatgcgtgtaaaagagaaggaataaagcccggattgtggttttctacgaacctgctgcgcataggtggagaggcaaatacgatgaggattattccggaatgggaaagctctgtggcagaagacggaacaactctttgtctgttcaggggaggatatttgcaccatcttatgcagaccctgcaaatgtacgcggatatgggtattaagatgttcaaatttgattttgcttattttgatgcggcaactcctgatgccaaatgtacgatgttgcctactgatattgaggaacagaataaaaatgcctttatttctgccataaaagaatttcgttataggaatccggatgtactttttattggctacaatggttttgggggtgatatggaaaatacgattaccccgtttcgaaaaacggtagacctgcgttggctggaaatatttgatacgatgtattgcggtgatccccgcttatccgatgtgccgatgatgaacttctggcgttcacaggatttgtattcggatcacatgacctttcaatacttgtttaacggagtaccggtccggcgcattgacaactgtgcttttatgattggtaccacgggtacttgttataacagggctttaaatgcttggaaaggcatgatgattctgacgatggcacgcgggggctggctgaatgtctgtcatggaaatattgatttgctaagtgatgatgatgcccgctggatggctaaagtgcagcaattgtatatgaaggtacagcagtatggaagtatttcagcattcggggctatccccggcaaagcgctgccatacggatacatggctttcgctgaaggaggaaatctttatactgtggtaaacgcatcacaagagaaagccaaagtaatgttgcctgaagcgacaggaacggggagggtgctttttacggacagtggttttatgcctgttttagaaaagaatattgtggaattggggccggaacagatggttgttgtcggatacggcaagttcagtacccgggagtatgatttaggtattgagaaagatatcgttatccctgcaacaattcaaaaggtaaaaatagatgtgcaaaagaaaaatgagcataccttgcaggcacattacaccccttcgaaagggaaaactgtacggattctctttcagcaattggatgagcatggaaaagcattccgttcgtggggcggtgctcctcctaccgggattaaaatggaccatttcttcaatatagaagtaaagcagggcaagcgttctgttccgataaagaaatcgcatgataagatgatctggtgcggcttgtcatgggcggtaggagaggtttctgctgacgacataaaagaaggacgtccgttggaaataagttgtaccgctatagatgggaatagcgaacactgcttattggaagtttacgaggttgaatattctgctgaaaagaaataagattggaaaagggatgactggaacagtttcacagtcatcccttttttgaggttatcggtctccttttttcagatccctgaaattcttgggtgtttcattatatacttccttaaagcacttgatgaaataatgtgcttggttaaagccggtcaggtaggctatttccgctattgacaaatcactgtttatcaatagctcggatgcttttcgaagccggatagcccggataaactgattgggtgtctgcccgataagcattctgaacttcttatgaagcactgtcttactgatattcatggctattgagaattcctcaatgttgaagtccgccttatccagattctcttctatcaccttcatggcctgttgcaggaatacttccttggaattgaactcaatggtatcactgtctttggctatcaggttctttaggagttgttcttttcgtttctggcgcgtattcaggatattcatgatctgattgatcaatgcttccgtatcaaaaggtttcttgatatagatgtcagcgccttctttataaccccttagttcatcttcagatgaagttttggcagtcagtaatataacgaatatatcggcataaagggaattttcctttatatggcggcacagtgtcagaccgtccataccgggcatcatgatgtccgatattacgatttcaggaagatactcacctactaatttcaaggcttcttctccacgggtggctgtcactacgttgaagtgctccgccaatttgcccgcaaggtatttaagtatctgttcgttatcttctaccagtaatatggtggcactgttctctatattggttgcctgtgctttaaattcagtaatatcagttgtttcctgatattcttctgagttctctaccggtagtttgatgcacagtgtggtgccttgtccgggttgtgagtcaatagaaactgtgccgttcattactgatacgaatttcttcacgacatataatcctatgcccaatccgttgggagtgttttccttattgtattggggttcccggtagaatttattgaatacggttgcctggtataactgattgatacccggtcccgtatcttttatgaatacactcaattgtccatctatatattccagtgccaccgatacactgccttgatcgggggtgtacttaatggcgttactcagtaagttatataaaatcctttcaaacttcacactgtcaatccatatgtgtatggaggggatgttggcctgataggatagctggatttttttagagcttgccagataattgaatgcattcactatgatgcggcagaatgatacgatttctatgtttctattgtttatctttacttcagagaattccactcgcttgaagtcaaggattgtagaaaacagatcggataagaatgcagcattcttggtgataatggacagcctttcatactgaatatcatcttctttggtttcacgcaacatatcattggcaggtgccagtatcaaagataaaggcgtaatcaggtcgtgcccgagactttcgaagaaactttccttttcttttaatagttcttctttcttcaaagtctccatctcctgtatcttttgtatactcttttttctgtagtgtctgataatcatatatattatgagtgcgatgctcaacaggataatcaggcaggaaatgaaatagaacaaaggtgttttccaccagggcggagcgacaataatgctcatggaccagcatggcttggtgcctgactcttcgttatatttcataatttccaaggtgtatgtgccggggttaagttgtgagaaggtcaggggtacggacatatcgagatattgccagctgtcggtaaaaccgatcatcctgtataggtatttattgcagtagttggcttcccctatttcagtaaaggacaaggatatccatttggaggcataagacagggtgatggaaggaatatattcggtattctcttttaaaatcacccggttgtttatcgtatcgcctacctgtatcttttggtggttgatctccagatcagtcaatatgagtttggtcttatcatactgatgcagcgccttttccacatccacaaccatgagttgttcggtattgccgaacaggatatattctttgttttcataggttattttttcggctgaaaggatagaagagttgccccaatagctgatattcggttcgcagatgcgctgttcactgtttatgtagcagaatatcttctcaccgataaagaaccatagattctggttatcatcgagcaacaatgacttgatggccccttgcggcaatgggtatgtagggaatgcggtagaaacttgcagtgaatcattggatacttccatcttcaacagattgtttgatgttcctatccaccagcatttattacttttatcttctatgatagagtacacaatctcctggtcgatgattttgtcttttagagtgacctgatctgatgcattgaagatggagagcccgttatgtgaagctataaacaattgattgtcacgataaggtatgatagcgtttatcctgtcccgactgaaatagtcataatggatataatcttttatttgccggttcttcttgtccaggcatagggacatcagaccgttttgtttggtgcctatccacactttattgtcttttatatagaaagtcgtaatcttttctaattcagtgcttgccgtaaattctttccattgaattccctgcgaattattattctggaaagaatatagtaatcctatgccatcgtgccccactaatgtaatatccttattttgcccgatagataagatatggtccttgaatttgtctttgcttttataattctccttttcagtagaggtacgcatatcgaaatgatacataccgtcgcctaaggttcccaacaatattttgtcttgtaaaagggcgatagaagtgatgggagaatgcgttttacgaattgagagcaactggctgattcccctgtctgaggaggagtacttatagagtccttttccgtatgaacctatccagatgttatcaaggctatctttataaatggcattgataaaagtggtacccagatgttctgtgccgggtagtggataaatacgctcttgctctttatcatatacttttattccttctccccaggtgccgatcagaagtttgtttgcttctccttctatgcggtatatgggggtattgctgttatgcagatggatggtccgggcttgttcgggttgttggctccaggttaattcatagagcgcattatcccatgaagagtaatacagtgtattgtcttctccggtgtcgtgtagttgtgtgatggtctggttcttgggggtaatgtctgtccatgtttgttttcgggagttgtacatcacaagtcctgtataggtgctgatccatatatgtcctttaggcttttccacaaaactggagacaatggctcctgaatggctacgttcggctgtgaaactggtacgttctgtattcttgggagttaatttgcatataccttcttcccagcttcccaaccagatgttatgatcagagtcttcgaatatggaaacaatccggttagggatggggtcggaaacctgctcattgaggtggatgaactggtcggtccgcggattgtatatatctactcctccggtcttaaagccaatccataacaagcctttggaatcaaggaacaaggtttctatattattattcttaagactgttgtttgtcgctttccccgatttatagactttaaaccgatgtccgtcgaaacggttgagcccatcttctgtggcaatccacatataatagtcattttcgcagatagaagtgatttcagaacttgataatccatctgctaaatcataatgtaatagcttctgtgctccggcagtggaagctaaaaagagtacgaatataaataatagctttctcataattttaatgtttagggcaatacatcatatattgttcgagtaaatcctccatttcttttgcaggtaaagactctattaaacggatatgctttcctgtttttgtagctctccatgtattattaccctcagagtctacagatataattccccgttcgctgatataataaggtgtatagtcttttatggctacccaaacagttgcctgatcccaactccatctaccttgtggttctccctgcgacatgcttagtaaaaacacatcttttataggatgattttctacaggcatccggctaacccggcgaccggttattatgttgtagccaatctcgaatccacagaaaataatttctgtaggccaatggttcacaacgaaagaggaggaggaagcgtcacaatatatattatattctcgtccttcggggaatattcctgccatggaaactaactttttaacctttctgcgtacaagttctgttcctgtttccggtgaaaattcgtctccttttgattgtagtagttcttttaggttggagaaagctccgatggtgcagattgtgacactattatccggttgcgtgcataaaacagagcgatataccttgacggcattgggggcatctgatgatttggctatccggtggggatatttctgaggcaagacttcagtccatttcttgttgtgcgggcattccaatgtgactgcactttctcctttggcaacgccaagaggaatatcaggtcgtttgaagtatgtattaatgatttcaatgcaaggaattgttaattcggacttattagaagatacagtagccagtatatctacatatccactatcagctaaggcatgcatcactgccatggcacccacgtcatcgtagtcaggtcccaagtccgtatctaaaatcaatcggaccttatgagcattagttatatttgaagggctgcatccacaaagaagaagcgataagaaagagtataaaataaatcttattctagtcatagcgtactgattaaaattcaatattcaaaagtaggaaaaaataagcgatccccttctttttgaaggcgcttaaaaatataagaatcgtgccgattgataacaaattcctgtttttgatagcggatacaggaatttgttattcttttgtgcttttctgttatcctgtttataaagaaacagggacttttgcatcagtaactttttaattaaaaatattatgaataaacaacatgttttgcaaagacgaatcatcttcggattgctattccttggtggagtaactttctcctatgcatcaacggaaaaagatctcggttcttcaacatcagccgttacacaacaggctgtaactgtaaaaggttctgtgaaggatgctgccggtgaagcgataattggagcctctgtagtagtagaaggtactacgaatggtctgattacagatgtagacggacatttctctattcaggcatcagtaggacaaaatctcgtgatttcttatataggttatgaaacgcaagtcgtgaaaatagcccgggcaaaccagcaaatcaatattgtattgaaagaaagctcggagttgatcgatgaagttgtggttgtagcctatggtacgcagaaaaaagccaatctgacgggagcggtatcttctgtaaaggtcaatgatattaaagacattccggtatccaatacttccagtttgctgcaaggacgaatgagtggtgttaccgtgagctctttctctgcgcaacccggtgctgagggagatgtggaaatccgtatccgcggtataaacacttttggtgacagtaatcctatggtgctgattgacggtgtggagggaagcctcaacagtgtttctccgaatgatattgaaaacatatcagtattgaaagatgcggcttccgcttctatatatggtgtacgtgctgccaacggtgtagttctggttacaacaaaacgaggaaatgcagacaagaagacactatcttacagcggatcctatggtgtacagaaagctacggttctgcctacatatattaattcatgggattgggctactctttataatgaacagaatgaagctatgggagatgtaactacgaattttactcctgaaatgattcagcaaatgaaagatggatcaagaccggatttgtttgccaatacccgctggtcggacaaaatattccgttctgctcctatccagacccaccatttgtctatgtcgggtggtaatgccacttctcattatatgggttcggtaggatatatgggacaggatggtatcatggaaggtacaagtactgaccgttttaatttccgtctgaatgctgacagcaagttcattgatataatcactttaggactgaatgtttctggtaaccatgaagaagtagaggaacctactattggtacttactatgtattcgaacagatgaaatggcattcacgtccttcggtaccttataaatacagcaatggtgaatggggatttgtggatggtaacgataaaatgcaggctattaagaatccggcttatgccactaccataacctcaaagaagaaatacagccgtttcgacggtaaggctttcttggaaatagaaccgattaagaacctatctatcaagaccagctttgcttatcaatataaccaatggaacagtattggtgctgaacctgcttatattcctcaggattcgtatggtaaccctgtgggaggtagtggtaagaattacctgaccgatgcttattattccgaaactcagtggatcaacgaaaacattattacttatcactttgatgtgaacggccatgctttcaacttcttgctggggcagtctaaccaatataataatttccgttctaccacggcaacaggtgaagatcttccgagcgacaatatcaccgtattgaatggtgctttaagtacttctgctaagggagatgcggccgaagctgctttgagatcattctttggtcgtgtgaactacaactacaaggatcgctatttggctgaattcaacctccgtcgtgatgagtcttccagaatacctaaaaagaaccgtaccggttatttcccttctgtatctgtgggctggaacattgctcaagaggctttcatggagaaatatagctttatcagccagttgaaactaagaggtagctggggtgaactgggtaatcaggagatcggttactatccgtttgcacaatatatcggtttgggtaataactatgtatggggtgacaacaaagtttcgggtgtggctatttcctcattggctaatcctgacattaaatgggaaacaaccgctactacggatataggtatagacgccgctttcctgaataacaagattacccttactgctgactatttctacaagaagacttctgatattttgctgcaattgcccattcccggaattgtgggtatttctactgaaccttatgtgaatgctgcatcagtaaagaatgaaggttgggaattcgctttaggttataatgatcaatggggcgactggaaattcggtgcaaatgtcaacttcagtaaggtgaagaatgaaattctcgacctgcacggtaaagattcatggattacagactggtctattaatctggaaggacatcctatcaattcttattatggttatgtagccgatggattgtatcgcacacaggctgaagtggatgaagctaatgaaaagaattctgttggcggtggtgctttgaagttgggtgatgtccgttacaaagatgtcagcggtccggaaggtaaaccggatggagtagtggatacttacgaccgtacagtgatcggtaatccgttccctgattttacttacggtttcggtttgaatgccgcttacaaaggatttgatttctctgctttcttccagggtgtagccggtgtagaccgtattgtgatggattatcctaccgtttcgggtaacgttacgacggcattcctggaccgttattctgaaagcgctaaccctaacgggaacttcccgcgtctgggtaatggtgactataacagccaaccctcttcattctggttgaaagatgcttcttacctgcgtctgaagaatattgaattgggatactctttcaaacaagaatggattcgcaaggcgaaactggaacgcttaagaatatatgtttctgcacagaatatcctgactattaccggcattgacgattacgatcctgaaaagtatggaaccgatactcgcggtcatgcttatcccaatgccaagacattctctgtgggcttaaacattacattataatttaaaataaagaagatcatgaaaaaaatatattattcagttattttgtcattagccttttccctcttttcttgttcagacttcctggatcgtgaatctttgtcagagttgtctaacggtaatttttggaatacagaggctgatgcgactaaagcgttggtaggttgctacgatgctttgcaaagtgaaggtagcttgggattttgctggccgggtggaaatacttgtagtttgcgtgaattggaatttgctacggataacggctattttgcctggattccgtgggtgggccccgatgtgatcactaccaataccatgagccccacagcagctgttactaaggctgtatggaatgcttcttatgcaggtattgcacgatgcaataatgttattgaaaaagtaccgcaaatgctggagaacggtaaaataggtgaagaagcaggtacaagaattgtttgtgaggctaagttcatcagagcgttgttttataatcacctgaccagtctgtaccgtgatgttccgaaggtgtttaatgtgttgactactgaaacgagccaggtacctaagtcgcagaaatcagaaattgtagctgacataatcaaggacctgaaggacattactgccgaaggtatgttacctgttacggctgatagaggccgtgctaccagaggtgccgcattgggcttactgacccgtgtatacctgtacaatgagatgtataaggaggctgccgatgctgctttacaggttattaacctgagccaatatgaaatagacccgaattacagtaccctgtttacggaagctggtggtgccagcaaagaaatagtatttgccattcgctttaaaaataccgaccaacaaaatggtgagggtggtttcttagcttataactacggttatccgatggaatggcagttgccttatccgaatttagcaaacgatttttattgcaaggatggcaaacctattacctcttcgggaatctatgatccggatgatgattcaactcgcgacccgcgtctgacgtatacactgatgacgaaaaatggtgatacgtatgacggcaaggtaagtgatgcatggtggtcctggaacagtccattccagttgtttatgcgtaaatatcagaatcagcctactacatgggctgccgataatcaggatatgtatgtcattcgctacgctgatgtactgttaatgcgtgctgaagctttggctaagcaaaatacgggtaaagacgaaattatgtcaatggtgaaccaggtgcgccagcgtgccgatgtgatgatgccgaaggtggaagatgctgaaggttccaatctctcttatgatcaattgctcgacgtggtgaagcatgaaagaagagtggaactggctttggaaggtacccgttattttgatcttatgcgctggaaagaaatggataaagcatatgaaagatgccgggcagacggtggggcaggttctcatatcttcgattcgtcaaaaggatatgtatggcctatacctcaatcagagttagacaacaacagagctttggttcaggcaccggaatggggtggtaaataattgaaataaattccagatagaggctggccggatgaagatcctgtctgaaggccggcctttgctctgctaaatataatgatatgagaagtatatacagcctattgtttttgttaataacgttgggattgagtagttgcagtgaaaagaaacccacccttcgggaacaatctttcgatgaggagtggttgttctatcgtggggatattgttgaaggtgagagatcagatttagatgactcacaatggcgtcaggtgaacctcccgcacgattggagtattgaagatatccctggaacaaattctccttttactgcagatgctgtcaccgaggtttcgggaggttttactgtgggtggaactggctggtatagaaaacatttctatgtggatgcagctgagaaagggagatgtattgctgtcgctttcgatggaatttatatgaatgcagacatttgggtaaatgatcgccatgtagccgatcatgtttatggatatactgcattcgagctggatataacagactatgtgcgatttggagaaaaaaatctgatagctgttcgtgtaaagaatgaaggtctgaactgtcgttggtatacaggttcggggatctacaggcatactttcttgaggataaccaatccgctgcattttgaaacttggggaacatttatcactacacctgttgccacagcaaatagagcggaggtacatgtacagagtattctggcaaatactgagaaagcaaacggaaaagtgattctggaaacgcagattgtagataaggagaatcgcactgtagcccggaaagagcaacaggtaacattggataacaaagaaaaaacagaggttggccatacattagaagtggcttctccgcaattatggtctacagacaccccctacttatatagagttgtaaaccgtcttctgcaagacaataaaataatagatgaagaatgtatttcaataggtatacgcaatattgcatttagcgcagagaatggtttccaactgaatggtaaatccatgaaactaaaaggcggatgtatccatcatgacaatggccttttgggtgcaaaggcttttgaccgggcagaggaaaggaaaatagaactactgaaagctgctggtttcaatgcgctgcgtttatcccacaatcccccctcaactgctttactcaatgcttgtgaccgtttaggtatgttggtgatagatgaggcttttgatatgtggcgacgaggtcattacaaggatgattacggacagtattttgataagttatggaaagaagatctgtatagcatggttgcgcgggatagaaatcacccttgtgtcataatgtggagtatcggcaacgaaatcaaagacaaagaaactgctgaagtggtagaggtatgcagggaattgacaggttttgtgaagacgcttgatacaacgcggcctgttacggcgggagttaattctattgttgatgcaacggatgattttctggctcctctggatgtttgtggttataattactgtttaaaccgttatgaatcggatgccaaacgtcacccggaccgcattatctatgcttcggagtcctacgcatcccaagcttatgattattggaaaggagtagaagatcattcatgggtgatcggtgattttatctggactgcttttgactatattggtgaggcaagtatcggctggtgtgggtatccgcttgataaacgtatttttccttggaatcatgccaattgtggtgatttgaatctttcgggcgaacgtcgtccccagtcctatttgcgtgaaacgttatggagtgatgcaccggtatcccatattgttgtgacgcctcctgttccttctttccctctgaatccggataaggcggattggagtgtatgggattttccggatgttgtggatcattggaatttcccgggatatgaggggaagaagatgacagtatctgtatactccaattgtgaacaggttgaactgttcttgaatggggaatctttaggaaaacaagaaaatactgccgataagaaaaatacgcttgtctgggaagtaccttatgcccatggaatattgaaagccgtaagttataataaaggcggtgaagtgggcactgcaacgttggaaagtgccggtaaggttgaaaagatcagattatctgcggacagaacggaaatcgtagctgatggtaatgatctaagctatatcacattagaattggtagatagtaaaggcattagaaatcagttggctgaagaattggtagaattttctatagaaggagatgctacgattgaaggagtaggtaatgccaaccctatgagcatagaaagtttcgttgctaatagccggaagacgtggcgcggaagtaacttattggttgttcgttccgggaaatcttcaggacggattattgtaacagcaaaggtaaaggcactgccggttgcgagtattactataactcagaaaaaatagagactgcctaaaaatcaaatttaaaagaagtatgaaattgagagcattattaaaacgatctatatttgtcatcataagctcgttgattgtcacagcatgcagtcagggcacggattgttccgtacgaaagattaaatttgatcaggattggaagttccatcttggccaaatggaagatgcgacaaaagaatcttacgatgattcggagtggcgggtattaaatctgccacatgactggagtgtagagcctcttcccggttcggatggcttatcggtaggccctttctccaaagaaagtgccggaggttttgctaccggacaaaccgtaggtggtgaaggctggtatagaaaatcatttactattgaccgtaaagatgctcacaaacttcattctctttattttgaaggagtctatgcgcagtccgaagtatgggtgaacggacaaaaagtgaatttcaatgcgtatggatattcgtccttcaaatgtgatattacttcatattgtcatccggcaggtgaagtgaacaccattgcggtgaaggtaacgaatgaggggaaaaattcccgttggtatgccggttcaggtatctaccggcatgtatggttcataaagaccgattctgtccatttggatgaatgggcggttgccgtacgtactgcaaagatggctggtgatgaggctacattggctatagaggcggatgtgcttaatgaaaagacggagaaggcaggagtaaatatgatggttacgattatttctcctgatggtgaagaggtaggaatgaaagagcagacagtgagtgttgacgcggctggtaagcagacagttgctttctctttgccggtgaaacaggcaaagctatggtcggttgatactccgcatttgtatgaagcgaaaattttaattcgttccgggcatgaagtgttggatcaaatatctgttccttttggcatccgtactatatccttcagtgcgaaggaaggatttaagttgaataatttgcctctgaaactgaaaggtggctgtgtacaccatgataatggtttgttgggggcggcttcgttggatagggcggaggcgcgtaaaatagaattgttgaaggcaaatggatataatgcagtcagatgtgcccataatcctccggcagaagcttttctccgagcttgcgatgaacaaggtatgttggtgattgatgaggcttttgatcattggcaaaaagaaaagaattctcaagactatcatcgtttcttcgatgaatggaacgaaaaagatatttcggcaatggtgctgagagaccggaatcatccgtctgtcatcatgtggagtatcggaaatgaaattcaggaacgttcggatgatgccggtatagagattgctgaaagattaaggaatatagtgaagaaattggatccttcacgtccggtaactgctgctatcaacgattattgggataatccgcagctgaagtggaaggaagatgctgcaaaagccatgcaacatctggatgtggcaggatacaattatatgtggtacgaatatgaaaatgatcatcagaaagatcccttacgtatcatatatggtagtgagactgttgcacaggaagcggctgtaaactggaacctggtggaaaagcatccgtatatcattggtgattttgtatggacggcccttgattatctgggtgaagcgggaatagggcatacactggaactgagtaaaggcgagaagaatccacagtttatgggttggccctggtataacgcctggtgtggagatattgatatctgtggagagaagaaaccacagtcctattaccgggatattatctggaaggaaagggaaataacaatggctgtacagcctttgccggctgtcgggaaaacagaagatgtgagctattggggatggaagaacgaatctcttagctggaactggaaagggctggaaggcaaaccggtaaaagtaaatgtttatagtcgtgcacctaaggtaaggctctatcttaataatgaattgctgggtgagcaagaagtttcaaagaaagactatacggctacgttcatggtcaactatcagccgggtgaattgaaagcagtggctacctatggcagcagtgaatcttcatgcgctattttaagaaccacaggtgctccggtacagatacgtttaatcgcagaccgcaaggtgattaaagcggatagggacgatctggcttatgttactgttgaattgattgataaagaaggcagggtagtacctgatgctgatatgaaagtgactttaagtgttgtggggaatggtattatcaggggatcaggaaatgcatgtcctacagatatggaaagtttccgctccttatcacctaaaacttttaaaggtaaagcaatggctatattgcaaccggatggaaatgcgggtgagataaccttgaatgtttcagcagaggggatgaaaggagcatcgattacaatcagaacggtggatcggatgtcggctaagcaagagggaaaagatatcgtgactcccggcagtatctggaaagatatggatggaaatccgataaatgcacatggaggaggtattctctaccatgaaggtacttattattggtatggtgaatttaaaggtgattccacctatcgcctggactgggttaaaacctgggagtgctggcgggctgaagccgggggggtggcttgctattcatccaagaatctgacagactggaaatttgagggtaaggttctgcctacggtagatgatgatccgacttcagatcttcacccttcgcaagtgatagagcgtccgaaggttatctataatgagaaaaccggtaagtttgtgatgtggatgcatattgaaagccctgattatgaaaaggcacatgccggggtagcggtctgcgactcaccgacaggaactttcacttatttggggtcttttaaaccgaatggggcagatagtcgtgatcagactatcttcaaggatgatgatggaaaggcttatcatatctgctcgtcagaatggaacagtaccttatatatcagtttgctgactgatgattatacaaaaccttcaggaacttatgtccggagatttatcggacaatcccgggaagctcctgcggtctttaaacgaaacggtcattattatatgctctcatccggttgtaccggttgggatccgaataaagccaaatgggctgtatccgattcaatgatgggagtttgggaactgaaagataacccctgtctggggcgtgatgccgataagacattttatgcccaaagtacctacgtactccccattgaagggatgcaggatcaatttattgctatgtttgacagatggaataaaacggatttaataaattcacggtatgtctggttgccgattgagttcgatggagacagaccacttattcgctgggcggatcagtggagcactcagacaatggaagcggtttattaacctaatgatagaatacaaatgaaaaaaatagcctgtttatttatcggtttttgcctgtttacgaacttatcagcacagaaagtttataggctggatgcttcggacgtcatggagacaccttcgtgtggtcatctgaagatgggaaatccggggcctaaggagaaagcaatagaagttaatagtctatatatgactatgggcgggaagccaatcttacccgttatgggagagttgcatttctcgcgtatccgtaaggatttgtgggaagaccgtatcttgaaaatgaaagcttgcggtatcaatattatctctacttatttgttttggaatcatcacgaagagatagaaggtcagtttgagtgggagaatgagaaggatttgcgcagttttattaagttatgccggaagcatggattgtttgtagttccgagactgggaccctggtcgcatggagaagcgcgtaatggtgggacacccgactggatcttacaaaaaaaatatctgaaagaccgctcaaatgatgtggtttatcagaattatgtaaaacgttattttgcccaaatagctaaccagttgaaagggctttactataaagatggcgggaatatcataggcatccagttggaaaatgaatattggtatggaaaggagggtgaaccacatatccaatggctgaaagatacggctctggaaaatggcattgatgtcccgatgtatacggttacgggctggggagacggttcagttcctccttttgaggtaattcctttatggggaggatatgcagatgctccatgggtggaacatgtgggaaaagaataccagccgggaaacttcttgttcgattcgttccgtgataatgagaatataggtaacgatcagataaagcggcaagatgtgtatatgacgtacgaaaaatatcccttctttacttgtgaaatgggagtgggtgtacaaaatacctatcacaggcgactcagcatcgatcctttagacgggttgggtatgatgatagccaaacttggttcaggatctaacctgctgggatattatatttttgccggtgccactcagtttacgggtaaactatggtctactgaggaagagcaattgaaaactgggtattggagccgcttaccggtgaaatcttatgattttcaggctgctatccgcgaatcaggagaaatagcggaatcttataagaaggtgaaaaaactgcattactttgtcaatgagtatgaaaaagacctggctcccatgatgcctgttatcccgaagtgggaagaagatgggttacaagtagctgtacgctctaataatgaaaccggctatatgtttggaatcaattattcccgttatcatccgaagaaggtacaaaagagtgtgaagtttgaggtgaaactgaaagataaaacgcttcgtttccctcagaaaggtattgaaatgcaggatagtacggtctttatctggcccttgaatgtggaacttggtgctatgcgcctgaattatgccacggcacaattgatgggaagtgttgataattgctatctgtttttccagaacagacaaattccagtggagctatcttttgataaatcgactgtgaaagaagtggaggtaaaccgggctaagataaaggaagaaagtgatagttgggttgttagcggacttaatccgggaaaagattgtgtgcttaaaatacaattgcagaatggagaagaaaagtatgttgtcattctgactgaaaaagaggctgataactgttggttattggaacaagatgggaagaaagtatgctatatttctgatgcggatttatacagttcacttggagatgtttatattttctctactgataagaaggctgcttattataagttgaaaacgggtatgaatccgggatttgaacagaaagcggttattttcaatcagccgcaaatggatattcgtattcagtctaagggcattctggaagaggctaaatggttggaaacagcaaactttcatgggattgaaccttatcagcagcgttatcgtcgtttcttctttaaggaattcaatctggataatccttcagagattaagaaagtcactttgtttatgtatccggagtcgaaatgtatactcaatctgaatgatacttgggtaaatcaggaagtaaaaccaaaccagttaaatgaaatagaccttacaggatatgctagaaaaggtgtgaatctgttgtttgcaagttttccatttgttgaggggaagaagcaatttgctgcacgtgtcattgtggaatactataattatgacaggattgaatttagtaccgactcttcctggttgacgacggactattattccaacccttcactcacacgggtgtttccgcaaccgatggctccggtggtagtagataaaccgggatatgccgagggtattgcttataatacattcaaagagtggaggatacaagtgccgacagatgcattggagaatttgaataacatctatatgcgtatcaactattccggtgataaggcggaaatctataacggatatatgctttcagatgatgattataacagtcatgccacctggacagtaggtttgaaccgacaggaacattctgtagaggggaaagagttgacgcttgtgatttataaactggataaagacgagaaaatcttttttgacttaccggcaaacggaactgatgagcaggctgatgtgaaaaagattgaatttgattttgaatgtttacaaaagatagactgataaaatgaaacgattcaatattatcttatttcttctggctttggttgttttgacagttgaggcaaaggatttgcgggttgccggtattttcggtaataatatggtgttgcagcaaaagacgaccacaccgatatggggatgggcggatgccggggcaatagtcacagtgacttcatcatggaacgacaagagttattccgttaaagttgggaaagatggtacgtggagaataatgctgcatacaccggaagcaggaggtccctatgcattaaccataacggaagataagactataactttcagcgatgtatatataggtgaggtttggttggcaagtgggcaatcaaatatggctatgcagctgaaagaatgttatgaatctaccaaagctattctggcttctcaaaaaagtaatattcgttttataaatgtgcctccacttggcagttataaaccgcttacggatataaaggcggattgggtggtggcagctccggaaaatgtaggagattgtagtgcggttgcatggtattttactcattttattcaggagaatcttggagttccggttggtattattaatgccagttttggaggttccattgttgaaacttggatgagccgtgaaacttgtcagacattgggtgatatttctgttccggaagtgagcgatggtaccacagggtgggaggctaatatacctactactatgtataatggaatgttgaatcctattgtcggttattgcatacaggggtgtatctggtatcagggagaatcaaatgtgtataatgtttctcaatattcgaatcggctggttgctatggtagctgaatggagacggaagtggggaagaaatttcccgttttatttcacgcaaatagctccttttgattatgctacatggaatgttccaagtgaggtaggtgagcatgtaggtgcttatctgcgtgatgaacagagaaaaagcatggatcgaatcgagaatagtgggatggcggtcattttggatgtaggggaagtagagcagatccatccggtacgcaaagagaaagtcggcgaacgtttaggattgatggcattagctgaagtgtataatatgaagggatttgaatataagagtccggtttttgaaaggatggaagtcgatgatgataaagctgtgatctattttaaagatttatattatggactaacgagttatggaaaacctctgcatttatttgaaatagcagatgagagtaaggtttttcatccggcggaagcgtatgtagatgaagaaagagatgttgtagtagtgtcttctaaatatgtaaggaagccgaaagctgttagatatgcctttaaaaattatgtagaaccggaattattcagccttagtggccttccggtatcttctttccggacagataattggtaataataaacttaaaaataatatgtatatgaaaaatataaagacaatactatgtggaggtttggttgcaatgttagtttcctgctctccacaggtgacaacgactaattattattttgattctgtaaatggtgacgatgctaataacggaacttctgtacgaactccttttaagtctttggcaaagcttcagtctttaactctaaaaggtggagacagcattttgttgaaatccggtgctgtatttacggagaaacttttgctttcctgttgtggagaggagaataatcctgttgtattgggcaaatatggaggactggaaaaaccgcatatcaaaggaaatggagttgatacggccgctgttcatatattgaattcagagaatctggtgatacgtgatctggagatttctaataaaggtgatgccccgaaagccggtttgctggggctatgggttgaattggataagtttggagaatcacataatatggtcattgatgacttgtatgtgcatgatgtatatggaagtacggtgatagagaaaggtggtggtattggaatttgtattcagaatggccgggataatgatagtattctgaatagatttgttggaatgactattgaaaattgctatctgaaagattgtcaaagggatggaattaagtttaagggatactggatcaggaaacaatggaatcctaatttgggagtggtcatcaggaagaatgtattggatggagtgccgggtgacggtattgtactggctggttgtgatggtgggttgatagaatataacgtgatgaagaattgtccgaaaacgttgcccgaatccgaagcttgcgatggaatatggccttggtgtagcgataatacagtggtacaatttaatgtagtaagtgatcacaaatctatcatagacgggtatgcttatgattcggactggggatgtcggaattcggtattccagtataatctgagttataataatgatggcggcttcatgttggtaattggtacagatggttggcctgaagactggtgtgtgaatggcaatattgaaacaaaagtacgttacaatgtcagtataaatgatggactacgcaattacctgactaatgcaagccataaagatgcttattttagtcctgcaatgcatttcaccggatatactcagaacacattggtagagaataatctgttttacctgtttcctaaaccggagccgcagatagaccgtacacttttccatttcaccaagcatgattcatcttatgggaaaggagatgtcttcaagaacaattatatttatgctccggaggtgactgtagctgtaaaagaagaaaaggcagtgggtaaccaatattccggaaatgtatatgtcggtagtttgaaaacccctgccaccggttttacaaaacaggatggaattttcaataaatcactttggtataatgcggaagataagaattgggatattcttcttgatttcttgaaagataaaactgtacctgtcaatggtgaagaactgaaagtacttgatatcatcggggcgaattaaaatagaatcttaaatcattaaaatactttagatatgaatttattcagattatgtgtagcaaatctagtggcattattctgggtggtgattcctactgccatgggtgccaatattatacctcagccttcttatatacaagagaagcaaggtacgttcgatttagctcataacaataatattctttatgtcggtaaacagccggaagtaaatcagataattgataactttatggagcagatgttgggagactatggtttgagtttgcaaacaaataagtctaaaaaggccggcatattactgcaagataaaaagtccctgggtgaagaagcgtatgaactttctgttgctgccaataaagtggtaattaaggcatctacacctgccggctttttttatgctctccgcactgttaaccagttgattctggcggatgaaaatcatacttcacttccttgtatccttgtgaaagatgcacctcgtttttcttaccggggattcttgattgatgcgggacgctattatttacctttgaaagatgtgaaaaaggctattgatctggcagctaattataagttgaatcgttttcactggcatctgactgatgatcagggatggcggttagagataaaaaaatatccgcgtcttactgaaaaaggctctgtacgctctaattcggctattggcacttgggatcaatattatcctcgtcattatgatggaaaagaacattcaggatactatacacaagatgaaattcgtgatattgtgagatatgcagctgacaggcaaattacgattgttcctgagattgaaatgccggggcatgccttggcggctttgagtgcttatccggaatatgcatgcagttttcattcttcacttgatttgatggcaggagctggcatttctgaccaggtgtattgtcccaaacctcagacattccggtttataaaggatatccttacagaagttgcaagcttgtttcccggagaatatattcatattggcggtgatgaatgccctaaaacatcctgggaacaatgtgaggattgtcaggccttgataaggaaagaaaatctgaaagacgagtttgaacttcatgcttattttattcagcaggttgagaagattgcggaaggtcttggacgaaagctaattggttgggatgaggtgttggaagggggacttcctctgaaagctacggtaatgtcgtggagaggggaagcgggaggcataaaggcagctcaattgggtaataatgtgattatgactcctaatacttattgttatctggattattatcaggagaatccggaatttgctcctttagctatcggtggatttatatcattggaacaggtatatgattacgaacctattccggaggcacttactgcggaagaagctaagcatataatggggattcagggaaatatatggggagaatatgtcgctactattgagaaatttgaatatatggcatttccccgcctgcttgccattgcagaagtagcttggagccaacttgagaataaaaaccgggaactgtttatttctcgtctgaagaaagagttttcttttttccggaaaaggaatgtcaatacatgccgtgaatatttcagacctcgtattcagggaggttgggatagtgagaaaggaatgtatgcggttacacttgagactatatgccctgatgttgatattcgctacacattggatggttcggaacctacggtagaatcggatatctataaaggtccggtttatttgactgagaatacttgtgtgaaggctgtggtgacagataaagataatcagatattggaagctccgacggttaagaactttctggtgaataaagcaacgggatgtacctatacactttcgaccgatgcctggagtttagattggtatccggtaaagcctactctgtttacggatggtgtgcaaggttttactccttcaaattacgagtgggctgctatcgcttccggcgtagagattgtgattgatctgaaaaagaatacgacagtatccggagttcgcttcggtactatggttgctcctataaacagtacacttccggctaagtctatgatatgctatctttcaaaagatggtaaggaattccggcagataggagaaagtaccttctcatatcctgtatacaaaggagagaaagagatctatcataattatgtgaagacggacaagaaagacggacgatacttgaagcttgtgataaacgggcaaactgagttacccgaaggttacccttatccgaatgctttgccttcgattgcattagatgaaatagaagttttctaataagaagtgtggttatgaataaattgttatttttgtctatactgctattgacttgtgtaacaggttgggctaacggtatacgaaatttttatgtggattcttttagcgatagtcaagttgctgatggtagtatggaatctccatttaaaagtctggatgctttgaaaagtattaaatttttgccgggtgattgtattcatctggcagggaatcagatattgaccggaactattcatgttaagggggtaaaggcgacgtctgagaatccgcttactatcacttcatacgggacgggagtttcacatatttattctgcccatagttctgccattgtaatagatgcctgtgagaatattcatgtaaagaatgtagtggtgaaaggttcggggcgtaaaaagggcaatacggggacaggcatagaggtgattaattcgaggtttatagaggttgatagagtggaagcttccgggtatcaaatgaatggcattgggataactggtggaggcgatgtgcgcataactcattcgtacgtacatgataatggttataacggtattgaagtgacaggtaaatggggaacaaaatctgtacataatatttatataggccattgtgtggccgaaaataatgccggaaatccagctattctggacaatcatagcggaagtgggatattggtaggccatgtaaccaatgcaacaatagagtattgtgaggctatggggaatgggtgggatatgccgaggcccgggaatggaccggttggaatctggggatacgaatcagatcgtttgactattcaatattgtttctcgcatgacaacaagacttctccggaaggattagacggaggtggatttgattttgatggaggaatcacgaattcattaatgcagtataatcttgcaatgaataatgagggagccggttatggcttgtttcagtttggcggtgcaacggaatggaataataatatagtacgttataatgtgagtattaatgacgggattaagaattctcatgcgggtatctatgtttggtgtgatccgtataataaagatgttcctttatgtgaaactaaggtacacgataatctaattatcagtaatcaggggtattctatctcttttaacaccggattttcttcgggactggaatttgcgaacaatacatttattctgactaatggaggagtagaacatttgcatggagatgaaacgaaagaaatggcgatttataaaggtaatcgattttggtctgaaacagccggacaaaaaggagaacgacagcctcgggtacctcaggatgcaacagcaaactatgaggcggttggatataatcttcctgtaagtgtagatatacttcggctgaaagaaattataactgatatgatacccctaaaaaaatgagggctatgtataaaagaagtcttttctggtggacactgcttagttttataagtggttattgttaccgggcaaatgcacagtctgcatatcagattaatttggatataccggataaaataatagaaaccggttatttggatttgggtggagtggctcctgacggaggttctatatctgtaaatagttattatatggaattgaatgagtctccttttatccctattatgggagagatacattatacccgtattccaaatgaacaatgggaagaacagatactgaaggttaagtcgggaggagtgaatgttatttgcacttatgttttctggaatattcacgaggaaacagaaggtgtttttgattgggacggtgataaggatcttcggaaatttatctctctttgtcagaagcataatatgaaaacgcttgttcgtataggacctttctgtcacggagaaatcagaaatgggggtataccggattggctttatgggcgtccgttcctgattcgtaccaatgaccgggagtatctgaaatatgtagatcggctttatgctgaaattgcttctcaactggagggatttttccataaagatggtggttgtattattggtattcagttggaaaatgagttgcagcactctgctgctccttgggccattcgctatcctgatcagccaattgactatactgttgctgattatgatgtgcaaaataccaaatttggtgtatcggtacaagaacaggatatccagagtcctgaagccggtaatcaacacatgaaaacgttgaaagaaatagcactgtctcatgggatggaagttccgttgtatacggctacagggtggggcaatgctgcgatcattcctcaggaagttattcctgtaacggcggcttatacttatccgacatgggcggatataggtatgtctccattctatttattcagggatattcacactactcccgattattctccggtacgatatgaaggataccgatatccttctttttgtgcagaaatgggagtcggtattcagatgacttatggcagaaggccacgcattccggccgaagcaggtgaaggattaatggtacgttcgttaggaagtggcgccaatggcataggctattatatgtatcatggcggaattactcctcagggaaaaaggggtttctttagtgatgaaccttcaggggtgccaaagatgtcttatgattttcaagctcctatcggagaattcggacatacgcgcgcttcttatcattcattacgcattattcatcattttgtaaatgatttcggtcatttgttggcacctatgggagtggtgttgccggaacacagtgatacgattactccttcaaatactcatacccttcgatatgcagtgcgtaaaaaagaaaatgctggatttgtttttattacgaacttccaggatcattgtaaacgagaagatctgagagatgtcagtcttactttgaaactggccagtgaaacggttcgttttccacaggatggaaccgtaacggtagtgaagaatgccaatataattcttccttttaatatggatttagatggtatcttattgaagtcggctaccttgcaaccgctggcaaggattacttccggaggaaagaaacattatttcttttttgcacccgaaggaatgaagccggagtatatattcgcagagaatacggtgaaaggagggactaaaaagttgattccagtgcctggacttaacagtacggtaagactaaaatctatagcaggaaaagagattcttattacaactttaactcgggagcaagccttagcggcctgtaaagtgacggtgggaaaggaggagaaattactgataacttccgcagatgtgctgcaagaagatgctaaagtacggattcaatctacggatactatattaaaggctgttgcttttcctgcgggtcgttttataactgaaacttctgcgaagatcaataaaaagaagtattacagtgagatattatttaccaaggaaggggtacacatttctcccgaagtctatatggcgagtgagaggcgttttcaggttcatttgccggaaggtgctttcagagatgtgagtgatcttattctttctattgattatattggagatacaggtgctgcatttattaatggagagatggtagcggataatttctatcatggaagcccgtggcggatagggttgaagcgatatgctgaggctattcagaacgatggtatttatttttatttgcaacaattgtttgctgatgctacttacctgcaagatttacctgaagggcttaggctggatttctcaaaaggaggggtatgccaactgaataagatacaggttatccctgaatattatgcaacttttactattggagattaaaaagaataaaaaatgaaacaaatcgatttttacctgaagtttgtaattctaatattgggtgtgaacgcctcttctattgtctgtttagctcaagaggcatttcccgtgacctgcaaggaatataatgaaataattctgactcatgtgctaactcctgcagggcctgttccgactgctatggatgctgacggggtttatccgtatattagttatagtgagacttccaatcggccgattcctaaaacttatcgaatgatttcacttgaaaatgaatttgttaaagttgtaatttgtccggacttatgtggtaaggtgatgtcgatgatacataaagggagcggtaaagaggttttgtataatccacatctcgtacgtcacacacgtattctgccacgtttctattttgtggccggcggtatagaagtaagcttccctatttcacatacccctactcagaatgaggcggtttgttataagatagaccggaccgctgaccggatttatgttacttgtggtgagcgggagatgcgttacggcatgcagttctctgttgaatattctttgggaacaggagattactttctgacacaacgtgtcagaatacataatccgggtacaaatgcctatccttggatgtcgtggacaaatgctgctattccttgcatgcctgatactgaatatagctttccgcaaggagaagtattggtacatgcttctgcattagatacaataaactggaaaaaaaagggacctaaaaaagaaaaagatatatcagaaatgaccggatatttctggaagacgaaagatgtaaacgcttttggtgcttatactccttcattgggatatgggctttatcatattgcagaggaacaaagtgcaccgggaataaaattatggagttatggagtgaaagaagataaagagtggtcattgctcagtacaaataataggcagacttatgcagagctgcaaggaggacctatcagcgaccagtctataaagctggaattgcagccgggtgaatatagggagcatactgagttctggatacctgctgataaacgaatggacatttataaactttctgtgccggaagttgcgttgcgtccaatagaagaactgccgttattcggttgggcaagagagagtgagattgctccttggattgcattgcttaatgcttttgagtatggaacgaatattcctcaaatagatccgactatcactttttgggcaccttccgggatggaaaatcttgatgatgcttttcaatgggctattataaaatgcaataaagatcagcaagattattggaagtattattacggtgcatggttggccgggcgtgaaaggagtaaagaggctattgcttgtttaagtagtgtaaaattggggttggcacaggctttattggcaagattgtatgaagtaaataaagaatataccaaagcggaagcagcttatggtgctataagcgaagaatgggtggcattgcatccgcaggtggttgtggctcgtgataaattgctgcgtcagttggggagtaggactcttgctaaacgcgaggaatggctgagtaaagttgatgcgtctgcagatgaatgggttgccgaaaggcgggtacaactgcttattgataaaaaacaatataaggctgctaaagatttgttgttgtctattaaatttcagaaagtacatcaaacttataatcgtacggatatgtggcatcaaatatgcaaggctttaggagagtcttcatatataactccggataatttaggtgaagaccgcttagcgcgttttggagcatatcgggaatttgaataatcaattctataaattaagctataaaaccatgaaaaagaatttactgataacagcaactttagttctgtctttatttacttcttgtgcccataaaatgggtgatgcgatagctattacagtatatacggatagtattgtcagtgatatctcaaatcatccggtaggaattaatctgaattttataatggatggcgggcgttttcccaaggcaaagaagaatgtaacagaagcagtaaaagaattaggaacaaaatatctacgatatccgggaggtgagaagtcggatttatatcttttcggcataccgccttatgaagaatcacatacttcattggcgagaacaattgggttggatgattatcccggagtttttaaagatggagagtttgtttatgaccctttggatttcgatgaattcatgaaagtttgtcgggatgttggcgctgaacctgtattggttgttgctgctgataattatttgcgtaaacctgaaaaaggagaaagagtctccggtcgggaggcattaattaaacatgctgctgaatgggtgaggtatgccaacattaagaaaaagtacaatgtgcgttattggatgataggtaatgagagttggaataagaataatgagaactccactgttgatatctatgctcaggatgttattgacttttcaaaagccatgaaggcagtagatccctctatcttagttattccaaatggcgatagtgatgaattctttaaagcggttataaccaaggctggggactatattgatcgtttatgcgtgagtaactatggcatttttaattttaatgccggatatgaaagctataaagatactgctcgttgtctgatatggcctgcgcaaacagcactcaatgctatgaataagtacgccacaccggaacaactcagtaagtggaaattgatagttgctgaatatggaacaattgattgggccggactttggcatggaactaatgatatggggcatgctattgtgaattttgatatgaccggtcaattactgttagaacctcagatagagttttcttgtttctggaatacccgttggctgaataatgaagaacagcctcagacagatcacgacgctattgattcaaatgggaatatcaatcctacagggtattcattgctgatttggaataagtttatgggcgataaaatgataaagtccgaatcaaaagggtatattatatcttatgcgagttattctccacaaaaggatcaattgtttgtgtaccttattaataaaggcgacagggaagagagtgtgaatattgttattcccggtaagggtgatgctaaagtagttcaatgctgggaatatttcggtaaggatgataaggatttggctcctgtgtggcaacaaagagatgtgaaagataaagatataactttgaagaagtattcaataacagttatagaatataaattgacggagggataatagtacttgaattgatacattgtagtataagggacgcttatcaggaatactgataggcgacccttatgtgttatttagacaaactgattatgaggcgtatttaggtggtaatttctcctgccatcggagtacgcattctttttcgtacctcatcaggcgtataaccgtggcccagtagaaacatcagtttagtaacggcagactccgttgtactatcatatccgcaaactactcccgcctgcattaattgatagcccgtttcataacgttccatttctacggttccggcactacactgggtgacgttgacgatgactatcccttgctcgcaagcattccgcaaacggcgtatgaaccactccttgcggggagcatttcccgaaccgtaagtttcgagcacgacagctttcaatccctcaatgctcaatatacttgatactacattctcctgaatacccggaaagagttttaggacagcaacattggtatctaaaagataatgtggcttcagttcccgttcaacttccttaaagcggatttgcacattattatatttaatatgaatacctgcttctgccaatacgggatagttgaatgaacggaatgcattgaagttctctgcattcatcttgatggtacgattgccgcgcatcaggtgattctcaaaaaagatgcagacttcgggtacaagcggattgccttttgcatcacgtgcactggctatttcaagactggtaagaaggttttcttttccgtccgtgcggagtactccgatagggagttgtgagccggtgaggatgacaggtttgctcaacccttctaacataaagctaagggcagatgcggtatatgccatcgtatccgtgccgtgcagaattacaaaacctgtgtatctatcgtaatggtcactaatgatatgtaccagtttgcgccaagcttccgggtccatatccgaagagtccatcggaggatcgaactggtaagtatcgatatggaatgtgaaattttgcagttccggtacgtgctttttcagctgctcgagattgaaattctctaaagcacccgtttcggggttttctatcattccgatggttccaccggtatagattagcaaaatggaagttatatttggactcatatgcattctcttacgataatttagtgcaaatataatgatatatcttggatttaatatcaaaatgttataaaactgtgccgctgatagtggaatattgtatggttatgtgtgaaaatgacacttcgctcttttgcatatttctgcctcttttgaggcctttctatatttttattacaaaaaaaccacaaaatgtgatagattgaatgtttttattattacttttgcgacacttatcaataatgaaagaaacagagagtatgaacaagtactatcaccatacagtcacatccatgtgcatgaccatgacccttaggggttaatggatagtatttgtgtttctacgtgttacactatttttcagcagtttttcttatttaattcaagtcaatacaggtatatacgtcctgtttccgacacattgtatcaaccttatcaatagtaataaaggatatgaaagtaataaaattcggcggaacgtccgtaggttccgcgaacagtattttgagcgtaaagagaattgtagaagcagtagaagaaccggtaattgtggtggtttccgcgctggggggcatcacagacaagctgataaacacgtcgaaaatggcggctgccggtgatgctgcttacgaaaatgagtttcgcgaaattgtttaccgccatgtggaaatgattaaagaagtgattcctgctggtgaggggcaagtggaactgcaacgccagatcggtgaattgctcaatgaactgaaagatattttccagggtatttatctgataaaggacctttcgcaaaagacctccgatacgattgtcagctatggcgagcgtttatcatccattatcgttgcagagttgacaggagccgaatggtttgattcacgcaagttcatcaaaactgaaaagaagcactccaagtatgtattggataccgagttgacgaatgaattgattcgtgaaacattcagcactttgccgaagcgtgcgttggttccgggtttcatctctactgataaggtgacgggagatgttacgaacctgggtcgtggtggttccgattatacagcttcggttattgcggcggcattggatgccgaccaattggaaatctggacggatgtggatggtttcatgactgcagatccgcgtgtgatttctaccgcttataccattaacgaactgagttatgtagaggcaacggagctttgtaacttcggtgccaaggtagtatatccgccgactatttatccggtttgccacaagaatattcctattttaataaagaatacattcaatcccgaaggaacgggaacgattatcagacaggaagtatccgatccgcgtacgaaagcgattaagggtatttcttctatcaatgataccagtctgattactgtgcagggtttgggtatggtaggtgtgattggtgtgaactaccgcatctttaaggcactggcaaagaatggtatcagtgtgttccttgtatctcaggcatcttcggagaattctacctctatcggtgtgcgtaatgcggatgccgatctggcatgtgaagtgctgaacgaggagtttgccaaagagattgaaatgggtgagatttctccgatacaggcggagaagaacctggctacggtagctattgtaggtgaaaatatgaagcatacgccgggtattgccggaaagctgttcggtacgttgggacgtaacggtatcaatgtgatagcttgtgctcagggcgcctcggaaacaaatatctcatttgtagtggattccaaatcattgcgtaaatcattgaacgttatccacgattcattcttcctgtcggaataccaggtactgaacctctttatttgtggtattggtacggtaggcggtagcctggtggaacaaatccgctgccaacagcagaagctgatgatggagaatggattgaagctacatattgtgggtatcgctgatgctgaccgggctatgtttagccgtgaaggcttcgatctgacagatttccgtgcagaactggcagagaagggcaaaccgagcacgctggaaactttacgtgacgagattatcggcatgaatatcttcaactcggtatttgtagactgtacggcaagtgcggcagttgcttccttgtacaaagacttgttgttacacaacgtttctgtagtggctgccaataagattgccgcttcttcggaatatgagaattaccgtgaactgaaacagattgcccgtcagcgtggtgtgaagtatctctttgaaacgaatgtgggtgcaggacttccgattatcaatacgatcaatgaccttatccatagcggtgacaagatattgaagattgaagctgtactgagtggtacactgaattatatttttaataagatcagtgcggatattcctttcagtaagaccattaagatggcgcaggaagagcgttactccgaaccggacccgcgtatcgacctgagtggcaaggacgttatccgtaaactggtgatcctggcacgtgaagccggttacagactggaacagtcggatgtagaaaagaacctgttcgtacccgatgatttctttgaaggttcgctggatgatttctggaagaaagtgccgagtctggatgcggactttgaagcccgtcgcaaggtactggaagcagagaacaagcactggcgttttgttgctaaactggagaatggcaaagcatcagtcggcctgcaagaagtgggtgtaaatcatccgttctatggtttggaaggtagtaacaatattattctgctgactacagaacgttataaagaatatccgatgatgatacaaggatacggtgccggtgccggagtgacggcggcaggtgtatttgcggatatcatgagtattgcaaatgtttaataaaatgaaacatataatcatattaggcgatggaatggcggattggcctgtggagtcattgggcggtaagacgctgatgcaatatgccaagacgccttatatggataaactggcgagcatggggcgtacggggcggttgaaaactgttgccgatggtttccatcccggtagtgaggtagcgaatatgtccgttttgggctatgacctgccgaaagtttatgaaggacgaggacctctggaagctgccagcatcggtgtagatctgaaaccgggcgagatggcaatgcgttgtaacatcatttgcattgaaggcgatcatattaaaaaccattctgccggacacatcacaacggaagaagccgatgtattggtgaagtacttacaggaacatctgggcaatgagcgggtgtgtttctatacaggcgtgcaatatcgtcatttattggtgatcaaaggcggagataaacgtattgattgtacgccaccgcatgatgtgccgttgaaacctttccgcccgttactggtgaaacctatgccgggtacggagaatataacagttcccgaaggcggtgcagaactgactccgcaacaaaccgctgatttgattaatgaccttatcctgcgttcgcaggagcttttggaaaatcatccgttgaatcagaagcggatggcggaagggaaagacccggctaacagtatttggccttggagtcccggctatcgtcctaaaatggaacgtttgtctgataagttcccacaagtgaaacggggggcagtgatttctgctgtagacctgatcaatggtatcggatattatgcggacttgcgtcgcctgacagtggaaggtgcaacgggcttgtatgataccaattatgaaaataaagtagctgctgcactggaagccctgaagacggatgatttcgtctatctgcatatcgaggccagcgatgaggccggacatgaagggaatgtggatttaaaacttctgacgatcgagaatctggatagccgtgctgtaggtcctatatatgaagccgtgaaagattgggaggaaccggtagctattgccgtattgcccgatcatcctactccatgtgaactccgtacacataccaatgaaccgatccctttcttcatctggtatccgggtatcgaaccggatagtgtacagacctttgatgaagcgtctgtttgcgaaggtagttacggattattgaaggaagatgagtttattaatgaatttatgaaaagctgattatgaaatattacagtaccaacaaacaagcccccgatgccagcctggaagaagccgtagtgaagggacttgctgccgacaaaggacttttcatgccatatagcattaaacctttgccacaagatttttatgatagtattgatactctttcttttcaggagattgcctatcgcgtagccgatgctttctttggagaagatgtacctgccgaaacattgaaacaaatcgtttacgatacattgaattttgatgttcctttggtgaaggtgacggaagatatttattcactcgaacttttccatggcccgacgcttgctttcaaagatgtgggtggacgtttcatggcccgtcttttaggatacttcatcagaaaagaaggtaagaaacaagtcaatgtgttggttgctacctctggtgatacgggaagtgcggtagctaatggtttcctcggtgtggagggtattcatgtatatgtgctttatccgaaaggaaaggtcagcgaaatacaggagaaacaatttacgactctcggacagaatatcacagcccttgagatagacggtacattcgatgattgccaggcgttggtgaagtctgcttttatagataaggaactgaatgagcatctgcaacttaccagtgccaattccataaatgtagcacgcttcttaccgcaggctttctattacttctatgcttatgctcaactgaagaaaataggcaaggcgaacgatgccgttatctgtgttccgagcggtaactttggaaatatcactgccggattgtttggtaaacgtatgggattgcctgtgaagcgtttcattgctgccaataaccgtaacgatatcttctatcaatatttgcaaaccggagtttatactccacgtccttctatagctaccattgccaatgctatggatgtgggcgatccgagcaactttgcgcgtgtgctcgatctttatggaggcagtcatgcggccatttctgctgaaatcagtggtactacttataccaatgaacagattgccgaaacgatgcgtgaaacgtggaaggaatgtcattacctgcttgatccacatggagcctgtggtttccgtgctctgaaagaaggactgaaaccaggtgaaactggtgttttcctggagacggcgcatccggcaaaattcctcgaaacggtggaaggtattatcggcgaaaccgtagagattcctgcgaaactgaaagcttttatgcaaggtgaaaagcaaagtctatcgatgacaaaggaatttgctgattttaaaaactacctattgtcgctataagaagcggaatttctttaagcggaaagaaataaagacccgaaagcttgactttggtgtttcaatatagtatatttgtaaccgtaattttaactcagattcaagtttaaattagcataagaggaggagcattgcttctcctctctttttttatcccatctgaaatgccacatttgatcttcccgaatgccatatcttaatgactaaaatgccacactctaacgggcaattagtgtggtatttacccgattgaagtgtggcatttgcctcattcaactgtgggaaacacaccatctacttgtggcaaaggcatcatctgtttgcatgaaatacatgatgcgtttgggagattcagaccatctgtttcagagatatgctactaaggacaacagtgataaaccacttgccagagttaagaatgcataaatctgctcttgacaaaaaatcagtaactactcaaggataatattattataacatgaaaaaaggcctctgctaactatgttggattgtttttttatacctttgtacccatattcattaatattgcgaacaaggagttgaaatagacttataatggaaaaggaatgaataagactcaccacagattacacatattcacacagatttattaatctaataatcagtaaaatagaatctgtgtcaatctgtgtaatctgtggtgaattaattcataaccgaaaagaaaggcatttattcaatttctggttcgcattaaccataaacaagataaaaacatgtttgtatcgtcaatgtcgtccgaagagttatgtgctgaagcaatgaaagatttttcaatattgcagaccaaaatcgatttatttatggatcgttgtggaaagcgctacaggcaagaacactttatcggaagatttattaaaagaatggtagtcacaacaaagcggaacaattcttggaccattgcctttcttgctctcaatgaaggttttacatttcttatttacgctccgataaccggtcaggaaacttgtggatatattgcattatcgagcaatagaaatcctcttgttctggagtatactccacattttatgcagagatacagagaacgttaccttaagtattataatctggacactggtaattataatgcattagagtattttagcttgaaaaataataatactctttatgtcaggcaacctgataattcatactattttatatcagagcaaggtgtcatgattggcagactggtgtcagaacgcatgataagtcacaaaacctatatcggagatgataacctgtctctccgtaaaaggattattcttgatgaagaatataaaactctttgtgctgcaaacgcacttctccgtttgcctgataatttgaatttagagacagtgcgtaatgttgccagtcgatacaacttgggtgatgagttcacacaaagatggtatgcatggcatgcgatggaatttgttcaatcataatccgttacttttttacatctcattcctttttagggattaccttcagttcccccatttttagtcggttgtcccatagtacaacaacttctattttcttgaggctatgtcgatagaaaagtgtatatcccgggtgaggaatgatgtagcgtatattttctacttctgttgtttgtccgatgaacggattcatgctgatgcggtgtaatatgttctgtaattgtacatagagcacttcactaacctcattattcccattcttcaattttagtatctggaatgtttccttcaactgtttcttggcgacgagtgaccatattacttgcttagccattctgctacctccttgtttattgttaagttattttgtccttcgcggttatccaattggcggcaggcagtttcaatctcccggcgcagttgatgagagaatgtgagcacctgttctttgctcttaggttcatcttgggtttcgctacgcagtgtgtctttttctttacttttcatagggctattcatttttgtttttcatagaacatcctaaagatacgaatagttttggaatatccatgcacgttgaacaattttcttctccctgcgttctctgccttgaaaccaaaattgtgatatccgaatgaaagataagaagctggaggccaatttaagtttggtagtctcgcgaatatttgcgggattgaatatgaatgccctgaaattcctgctgcccgtgtggatgggtgcattgacgggtgtcacggtgcgttgtacttttgctgctatagcgttctgggtgacaggctggtttgtgaaagaagcacctatcacacggcggcagcgtatcgggttactttgcctgggggcattcggcatgtatggttttatgttctgctatttgctgggtatcagtaaaacgacacccgtcagtagtgccatattcaattccctacaacctatctgggtatttcttatctccgttctctttctgcacgagcgggctacactgatgaaaattatcggtatttccctcggtttcggtggtgcattgctgtgtatattgactcaaggcagcgatgacttggcacatgatgcctttacaggtaatatgttgtgcctgctcagttcggtgttctttgccatttatctgattctgagtaagaaattactggaagagatcggcttggtgaccgtaatgaaatatgtgtttgggggcgcggcgctgtccggtctggtgatatctactatcctgggctgggacgcgccgttgttcaccgacgtagcacatggaacctggcattggatgccgtgggtggttctggcattcatccttattttccctacttaccttagttattggttgatgcccatcggattgaaatatctgaagacgaccgtggtggccatgtatggctatctgatactgattgtgacgaccgtcgtttcttatatcgtgggacaagaccgctttacctgggaacagggggtggctatcgggatgatatgtctgagtgtgtattttgtggaggtagctgagaggagaaaatgaactaatagtttatcactaccaagtattccccttctgcgtgaatggtgaattctgtttccgtgctttcgttcagtgtaccttgccaccagttggtgaagtcactgagagggtataccaagcctttgcctcgcaggttgtgggcaccaaagtttatgattgaaatctgttgacctggctggctgggaaaagaacaggtatcatggcagggaatgaaaataccataatcggtcagcatgcggacatgagctccagtacgcatataatcaatgagcaggctgatatttcctaaagtatggtcttcccgtttgcctgtggctcctacgatagcgatgttctttttgccttgtgataaaaggaagtttacggctttggtctggtcgttggtttcctggtcggagacacaatgaagaatatggctatatttccggcggttttcttcactcagggaatctccgtcaccgataataacatcaggtacattgccgcgatctatataagcatctgcaccgccatcacaacaaacgatataaggagcgtttgccagtatttgcaaaggtataggatgggttggataatcaccattggctaaaattactgcttccggttcaccacagagaacacagagttccactgaattcttattattattttctttcatcattgtttcttttatcaccttatcactctaccactctttccatcatcctcttccatttgaagtagccaaagatagcgattattgtataaagagcatacagtcctgccgtgaaattgaggtctttgtaaacatagagtcctgcactgacaatgtctaccacaatccatgcccaccactgttccacatatttacgtgccagcatccacatgcctacaatactgagggcagtggtgaaagaatcaagccaaggtacattactattggtgaaacgaatgagtatccaggcaatgccgacaaaagtaacggcgaatacaatgccgaggggcaggtaatatttcattggcatacgggtaatgggaagttcctgcagtccttctttgatatgcagatgcagttttcgtcttacaaaactgccgtatttccacatcatccaaccgtagacggctgcccccagataatagatatttattccgaagtcagcatacagtccggcatcgtaatagacgaaaatgtagatagcaggcatgatgatgcccgctatccaaagatagatactcgcccggtattctaaccagaggtagacaagcccgacgatggttccgataatttcgagagtttgttccatgctttaaaaactcaatgtgatatgtgccagcgcattgatacctgcattaggatagtaggctgcgtaattggaagtatagagcagtttactgtctttgtcctttatctgattctttccatgcccttcgtatacggcacttcccgatgcataaccattgctttcgtatgtttcgtcaaacaggttataaatcgtcacgcctacattaacagatttcaatcctttcagtttgaaagtatatccgagattcaggttgctcacacaataagcatccagtgtacagtcctcttgatgagcattgtttaaatattgcttgctgacatattgcgtctgcaaagatgcattaaaacctttatagtccaaagaaatgagactatttgccataaagtccggtgaaaaggagatgggagtagtgccaatatatcgggttgtctgagagataccccagctttcactatacatatctttccagtcttcattcacatcacttagatattctgtataattcttgatgcggttacggctccatgttgcgtttatatcccaacgcagccagtttgtgatgcgtgcacctgccatcagctcaatacccatacgataactgtccttcacgttctctgctacggcttcgccaatttcattcaattgcccgttcagtaccaattgattcttgtaatccatgtagtacaggttgacgcctgcattgaaccaacctttacggaacgtatatcccacttcgtaatcgaacatccgctctgatttgggctgtgcggcaaataagttatcagtatagttattgcgtgtcggttccttatttgccacactgaaagaggcataaagattattattgttgtttatcttccagaatatgccggctttagggttgaagaagctgaaatcttcgtcaatattcagcggttgcagatgtgccggatcagcagtccagtcccatttgtcattattgccgtttatcttatagcgcagataacgatattgcatatcggcatagaagttaactccatccagtatttcataatttatcttagcgtagatgttgccatccgttttccgtccgatattacgataatattcatggtcaggattcagttcacccagataattctttacccatactaccttaccgttatgggtgtttttgtaataattcaggccaccgccgatggatgcatccaatttgtcccctttataatcgaaagagaatactccaccaccgaaacggctgtctaccagtttacggcgtacaaggtctgatttctctatggtagtaccgtttgtttcaaagggtaccaagccatattctaccagcgtacgcttattcttatattcctcataataaccgtagccgtctgtatagtgtagcgctatgttcaatttccacgaaggagacaatatttgatttaataataattgataatgcgtttggcgataataatctatctggttatcataaaatccgattacatttccattatcatcttctatggcgccattgggattatatttgcggtcgtttttcagtgtttccttatccaggccatcccaagcatgataggtttcttcttttcctccgaaggtgatgaatttaatagtggtcttgtctccataatatccgccttgtacaaagtaagacttcaagtcagcactggcgcggtcacggtagccgtcactgtggatattagataaacgtgcatcgaatccccagcgtccattaataagccccgtacctacttttacggtttctttatgtgtattgaatgagccgtaagagccggaaaactccgcgtacggtgtgggcgaaattccttgtgttttcatattgatactggcaccgaacgctccggcaccattagtggaagttcctgcgccccgttgaatctgcaagtcctgaagcgaagaggcgagatcgggagtattaacccaaaagatagaatgactttccgcatcgttcatgggtataccattagtggttacgttgatgcgtgtagcatctgttccgcgtacccggatactcgtgtaaccgatacctgcacctgcatcgctcgttgtcagtactgacggagtaaatgacaacagatagggaatatcttgcccgaaattctgcttcttaagttgttctttactgacattggtaaacgccacaggtgtggttcccgtggcacgggtagagataatttctacttcctgcaggcttatcacccgcaagctgtctttctcatgcgtctgcgcacagacacccagcgttgccattaacaggcaggccgccattgcatgttttctcattacaattttaactattaaagatgaatacagaaaaagggagcttttcttcttttccctccgccggcactacccggatcaggtcaatgggtatgatctcagcccgtcatattagggcaccccttagttgaaatcggggacaaaattaagtgttttcgctgaaacacgcaaatcgagtgaacgataaccggaaatatttgttaattttgtaggccggtgggtattttttaatcctgctggtaaagtgtaattattaacttcaaacgaacaaatattatgttattattattgcaagcggcagctcctgctgccgaaactgttgtagaagatggttttagtaaattgcaggtctttctccaacaactgatagactggggagtaaatgcaggtggtcatatcatcagcgctgtgctgattttcatagtaggacgtttcctgatatctttccttaataaaatggtggcccggttgttggctaagcggcatgtggatgccagtatccagagttttgtaaagagtttggtgaacatcttgctgactatcttattgattattgccgttatcggtaaattaggagtagaaacaacttcatttgctgccttgctggcatccgctggtgtggctatcggtatggcattgtccggtaacttgcagaactttgcaggtggtctgattgtattgctgctccgtccttataaagtaggtgacttgattgaaagccaaggcatcacgggcacggttcgtgagatccagattttccatacgattctgactaccggtgataataaaattatttatatcccgaatggtgcgttgagcagtggtactgtgactaattacagtcgtgaagctacccgtcgtgtagaatggataatcggtgtggagtatggcgaaaattttgataaggtggaagaaactacccgtcgtatcattgccgaagacaagcggattcttagtgatccggctccttttgtagcccttcatgcactggatgccagtagcgtgaatgtgattatccgtgcctgggtgaagagtgaggactattggggagtttatttcgatatgaacaagaccatctactctgtattcaataaggagggtataggtttccctttcccacaactgacggtacatcaggcaaaggattgatagtggtctggaattgataaccataaatgaataaagggcataacaacaatttgttatgccctttattcattatagttaatactcgtgatgttttttattgtaaatcacatttcatatactccgagttcttcctctatggcttcacattcatctttctctatatgcagtaagcgattgatttcccttcgcttttcgaggtcagtgaaataactttctactacggtatacaggtcgaatcctttggtggaacctgctgccatgtctaatgactctaccattttctctacttccctgtgaatgcgttccttgttgatgaaatgcaactcattactatgaatcagatacttttccatgatcgttggtatttaaagttctattaatataacgtctgttatgaacggttagttcatacaaaaaataataattcctctctgagttaatagagaattaatagctttattaatactcctcgtgtattattgccgaataatagcgtaaaagtaaatttaaaaagtaataataccatgaaaaaagtaattagtatgaatctgataaatgtaattcaaatgaaaacacaaagcttttggttgacagcactattagtgctgttaggtgttttttctacagtgaataccaacgctgcagaaaagttaatggctggtaccggcaaagtgaatataaccccgcctaatcccagctatccggttcacgattcactctatgcacgaactcttattcttgaagcgggagcttcgcgtattgcttttgtctctctggatttggttatgtacagtaatgttccgttagccgagaaactaaaaaagcaatttggtttgcaggaagtctatttctgtccccagcatacacattccggtgaggcagggcccaaggaatggctcgatgctcagataaccaaagctttgaaacaggcttcttcttctatgttcgaggctcgtatttcagccggttatcgtagttttcctcaattaagtttcaaccggttgcttcttcgtgaagacggtcgcgcccgcgaatcatgggtaggagatgaccactacagggcggtgaatccggagcgtattcctcatgggcctgttgataattctgtaggtgtcattaaactggaggacacgaaaggcaatccgaaagtaattctaatgaattatgcctgccatccggatgtggcctggaataactttgaaatctctgccgactatgtgggctatgccactaaatatacggaagaagcttttaacaatcaggtatattgcctctttgtacaaggcggtgcaggaaaccaggcacctttatttaaggatggcggacgtaccgggccggatgaccctcgcccgtccaattatgatttgatagaccgtatgggtaaattgctttctattgaagccgttaaactggccaaagaaatatatccgaacccgtatgatgtacccaatatcaaggtgaagactgactctctgcattttatcggcagacatgacaagaacctgaagtataatgtgcatttctccgtaatatccattaataaccgtattaccattgccactgttcccggtgaacctttcatcaagttccagattgattggaaacgggaaatgcaacccaatcatgttattcctttcttcttcggatatacctggaacaacggaagatggccgatgtatctgcctgatattcgatcggcagcttatggtggcttcggagcagatgaaggatcgtggcttattgaagtcggagcaggtgaaaagattttcaacaagctgatagagaattattatcggatgatgggagtattccgttgaggatgctctgagtaaatagaaagaagaagatgtatcgggaaatttccaaatacatcttctttgcttttattgggataacagtgcaaacaatgattgttctcttttatatactaaaagtaaattttataactgatattcggtatcaatcccgatccgtcttttttctctatcttatgagttttttcgttgtactggtaaaagtgcattcctgtgcgcatacctacatttagcattttaatagaaaactcatgagatattttctttttattaattctataactgaaagagatgtcaccgttgatggagggatcaaacttcttgctgtaagctctggtttcatcaaatttaatatcatgttctatcatacttttaccttcatctacaggggtatatcggtcaccaccttggaaaaagatacgcccattgagacttagtacattttgtttattacgtcctaccatccattcttttccggcaagtatgttcaggagatagtttttgtccaaccgtgtattacgccagatgttatctccggctttgtattttgatttaaaaagagaagccgttatcatatagtaaaaaccatttttcatgtattgctctaatgtaatgtctataccgtagttcactccggagcctctattctttaatatcctgtccagatagaaactctgatggttgatgatggaaaaggaagaattctcttcaacaggtattcggaatagatattgataatagggttccacttttaagtgcatgtacgagttgatgttccagtcgtatgtaagcccgaagtgatgagcctttgaaaaatccaggtatctgttggattcggtttttccgttggcttcctgttccacaaagtagtagtcaagcttttccctgcgactgtgcagaccgtatgccagtgccaaggcatgtttcggattaaagctccatttaagggctgctctgggttctacggtccagttcttattcagggtgaagtactgtgcggtgatgcccagactggtagtaagatggttacttaggttgatgacagaactgctgtatgccgagagcacacaacttcccccattcccttttgaaatctgttccataggtatatctaaaccgaaattaggactgattttgtaatccaagtcatattggagccctgtaactgtgatacctgtccggttgatatggttggaattgaatttcttgttcagataggaattaaagactatatcccatttggaattccggatatctcctacatggaccagtttgtcatcttctgtcatctgatcagctctcgtgcgatctttcgagtaagtggcggctaatgaagaacggatatacgtatctgcattgataagatacttgtgtgtaagtcctcctgccgctttgtcaaaagctgtatttccggactgccggtcaccttgtgtctcccattcatcacggtcgatggcttccggtttataacggtcaatcagcccgattccccagatagagaaagttccggccttccgggtaggaaaatttaatttgaatgataagtcctgatatttcagattcatatcatttcctgtagccaaggaagtggtggagaagcggtaattgaagatataggaacttccatgcttcctgcttatcgggccttccgatgctaggtcaatacccagaatacctaactgaaatgtatgttcatacttctgattgttgccatttcgtatttgcatgtcgaagatacctgatagcgcattgctgtattcggaagggaacgcaccgttgtagaaatcggagttaccgatcacctgtgtactcagggccgaaagaaagcccccacccagtccggtaaggtcggcgaagtgagtcggattgggaatttctaccccttccaacctccattgggtaaactggggtgaatttcctctgatagctacagcgttggttcctacatctcctgccacacctgcaaatgcggaactcagacgtgccggatcatcaaaaccattggcaaacctgcctgcttcttccatgctgatcatgcgtccgccggtaatggccattgcattcagaggtttatctttctttatctccggttgtatgacgacttccgccaacgagtgaatgttttcatccagagtgatttccatatatacttccttggaagaggttacaggtatctcattgaaaatattggtattatatcctacataggaggtttgtatattgcatcgtcccacaggaacattgtctatccgaaatctccccagactgtctgttgtgctgcccaaagaaccgacattcataattcttacagtagcaaactctatgggtgcattggttttggaatccagtacaattcctctgactgtttgggtaggtttctctgttttttccttggtggatttctgtagttcattgccggatggagtgataatgatatggtagcctgttattttgtacgaatagcgggtgtctttcaaaatttgcgctaacgccttgtcaatgctttgggattctaaggacagggatatttttctctttacatctacggccgataattcataggctatgctatatccggtttgttgttctatctcggtaaaagcttcttgcagtgatatgtttttattctgtatagtgattggctttctgtcattctgtgctgtggcattcaatgagagaaaggcaaaaaataaaaaaaggagtatcttatctgtttctttattaatggttattcgattcattgttgtatgtttttataagataagctgcatttcggcataactttttcatgcaagcatgaaagttctgcactcaatttgcattatctttgtatagttaatactttgttttactttacggtttgatggagcattagcatttcagaaccgggttgagggtctcaagctgcaatccggttccttttcttcataggcagtttctttttattgttttttgattagttctactttgtctctctgtatctgataactgaagccgatcatctcactcaatacaggcagaacttcttccagattttcatttttcaggaaccggacggtatatcgtttggaggcgggaacgttcattgtatgattgatagttacattataacgtctctctaatgtttgcaggatttcggtgaaaggcgcatcggtaaatatcagttttcccgtgatccagccatctgcatcggttggagaaacttcggtaatgttgacagcagatgtttttttatcgtacgtcaactgttcattaggtttcagtatctgtgagccttgaacgggaggggtgacttcaactttgccacttgtcagggtagtggtcaccagttcatcatcagcgtatgcctttacattgaattgggttcctaatactttgactgaaagttgggacgtttctacaataaacggtttcgctgcatctttccgaacagaaaaataggcttcaccgtcaaggtacacaaggcgctgtgctttcgagaacttttccgggtatttgattgctgttcctgcattcagccatatttcggagctatcaggcaataggaagtgttttttatcaccgtatgcaacagatatctcaacccatttatccttcgtggaagtatagtacagataacttcctgcaataatcagtagcggaatcagggctgccgcgatgctcattcgtttctgatagaaaggtcggggcaccattttcttataacctatcttttggtttactctgtttaatgcaagtttagtgtccgggtctgtttttgcctccaattgatcccaatattccaatgaagctttttctttttcttcagtgtctttatctttaatgatccatttctgaaccttctcttccgtttcgggagagaagcggccggataaatatgttccgatgattctaacaatattatttttctccattctgttgcatttactatatatacagtcaacggacgaaaaactcagtaagcaaatgaatcttttttctattttttctttttagaaatagggggttacctgaataagcgagaaaaagaacagaactatctgcctcgtacctggcttgtatcttcttcgtaccctcctcgtaccaacttcgctattttgttcctcgtataggagcgaaggaagtgcgaaccgggtataaggaggaagaacttttgaccaaaaggtaatattgtatgttgtttgtctcttttctgttatgaatttattcaccacagattcattaccatatcattatgccagtaataagaagaagtatgaaatagttttccgtatctctttcagagcgaggcttaactgactttccacatttctcttggtagtattcagtcgtacggctatctcttcattgcttaggccctcgttgcgacttagcatgtatatctttctccgttgttccggcattttttctaccgtgtcgtctattagtaatccgagttctttggctatcagatcttcttccgaagtagaactacattcctgctgctggacactactcagataagtatcctctacatatttgtgcttcagaaagttgatggcagaatttctggcaattgtatgcaggtaagaatcaaatgatctggagatatcgacagagtggcggttcatccagaggtttacaaataaatcctctgtcagttcttcagcatccggactcgacttgatgtagccctgaataaaggcttttgttttaccgtaataagtgataaaaacctcctcgaaggcctcatgactatcttgccgtaaagcctccaaggtttttatatcaatcttattgctcatttatggtccggttttgttttttgacgggagcaaaagaagtgattatttgtttgatgaagctattcttttggattaattaaccttgtctattttattttctattcttagtttttatttccgacacttcagcaatgtttccgtatcgcttttatttcagatacttcttcagcgggcagtccgtaacttttaatccttcggctatactttgggcattcattcgcgcacccttcaaagatgtatgtgtatgatctgtattatagaaaacagctgatttcttgggccccatcttttggagtttatctgcggatattttattcagatcaataaagcaggctccggttgcttctgccgcttcacgtgtccatttaccgtaactcttgctattgcgttctatttgtccgtctttccacttattgcggggcgtgtgactcaatacaatcgggattgctcttttttcttgtgcatccctgatgaacttgcggagataccagccaaaagtatagactacctggtattttccggtcttttccatcagaaagactttgctttcatctcccgaaccgtgtaattcaccacgggcttttccgatattgatatctcctccgtcattatgtccgaactggatgagtacgaaatctcccggtttaagtgcatcatacactttgtcccagcgtccttcgtctaagaaagtgcgggcactgcgtccggccatggcacaattttctacagataccttctttgaattaaatatctcagttattacacttccccatccccacataccgtctttatcatcatctttattctttaccgtactgtcaccgatagtgaataccaccgggcatccttctttccggctggaaccggtaattgtatcctgctcaaccggtttcaaatagttggccagttctaacctttcatagtttcggataccttcagttgcagattctgcgttcacttttgccccgaaggcactggtgtggatgcggtctaagtagaacatatatttcactttttccttgccgaatttctcaaatttggatgcggtgatatcattcaggtctataaaaggtacttcttgttcttcggctatttgtttggcccacaggccgaaagtttggttgacgcgtgtgataattgtactgtctttatcttcccaagcattgcggggagtcagtgagaacaggatagggtgggcacctttcgcctttacatcctgcacgaagcgacgcatatattctccataggaatatacagtttccttcactccggtttcctggatggttacattcaggctatctttaccgattcccggtatggaagcgcgtgcgcgcccgctgtcataagggccattgtcattatgtcccagttcgatgatcacccaatcgccagcttggaccccttttataacatccggccagaaacggttgtagaacgtacggctacttgttcctcccaatgcatggttttctacggtaatccggtctgaatcgaaataatcaccggcataatatccccagccccattgaccgttgttcccatttcccaaggttccggtacgcatggtagagttacccaccagaaacagaatgggattatttcctttccggcttgaaccggctacaggtcttgctgtacgggccttattcaaactgtccagtgtattgtcaatcacctggttgacatccttcatcggtgcagataccttattctgagcctgtgccgagaaaacaaatgcgaatgtcattcctaaaatcagatagctgtaaaatgtgtgtttattcatctttctataaccttaattctttgttggtgcaaaaataggtgaaatttgagtctctgcgaatggaatatcattcagaattgctgtctttttgtgcaattgagtgggatttctttaaaattcaaacattaaagctttttacgatgttatattaataaacttcaatctacatgcttactacgttcttaaatgcattagccactataatcagtgtgacaagtcttctcatcgtcacttatggggcattaattgggataatttcttttctggtcaatgagttcaaaagattcacgggcaagtactcaactaccaatatccggaagctacgggctactttcggaacttatttgctacttggacttgaatttcttatcgcatcagatatcttaaaaaccgtactggaaccaactttgaatgaactggcaattttaggtggtatagtcgttctgagaactatcttatccgtctttctaaacagagaaatcaaagatttggaggctgaaggtgaaaaagagcaatgattcttgggaagtaaaaagcattattagatctcttctttaacatattatttgaattatgttaatcgttaacataatgaatctaaatagttaacaacctcctttattctattaaaccatgttataaatacccctgtctggacctgaaaatttggagatatcctcaaagtccgtatctttgcaatgtgtttttcatagtattagatttaaggttaacaaaagattggctgtctgggatagatagcctttttttatgttgatatgtttactttatcctgtctctatacaattttccatcgtaatccttatatttaatgttgctgtagatgcagaccaacatattgctatattccaaaatcgtggtattggattcttgagataaatttgtagctaagatgccactacctagtattcccggattacagataatcgtatctttccttattgaattcattattagctcaacgcaagtatattctttaatatcttcttctttgagtctgtttatgatatattggttgatgtgcattttgtcatcttcagtcataaaaacataccataacaagcactttatgaaactgggctatttcttttaaagaaagtttttcttgcaaatcgggacatcgtttcattaatgactggtaacgttgttcgggactatcgcaatagaaacctaataagcgttggtatatctcggcaaacatggtttaagctaagaagataaacttcacattcggtagtagcctgtatattgaccgtagaagttgcctgttttataaaagaaggatagtcacagacgaaatcgttgacgaagctataaccaacaatccattcattggcgtctgcatctatatgtgataagcggaacatgccggacatgatgaaacctatctgatttgttttttcattttgtcgtaccagatattcattcttcttgaatttagtaagtaccccttcttccagaaataatttttcgagcctggaaatattggggtgactgtcttttatattaaatttgtccatagctattgtattagtacatatgacaaaggtacaaagattgcagaaaaaatcatctattaatcgaaaagtgctgaaatatggaggattaatatgtttttaattcaatattaattctgtttcggcttactttttaatgctgccccgtttactttgcaaacaggaaaacaaatatgtctaatacctaattaatagtattcttaaatgaaacgaaatgcaattttattaagcttgttgacggctttgttcttgctaccgggaaaggcagtggggcagaccacatcgagcgatggtaaattggtgtataatttcccgtttgcaccaagtgagggtcttgtaaataggacagaaaaggagtataggaaagaagtttgcctgaatggttactgggacttccaacctgtggctttgccgggtagttacgtgcaaggtaaggggatagcaccggaactgccgttacctaaagaaggggcttggagcaaaacccgcataaaaataccttctccctggaatattaattcttttgccaaccgagatgtggaaggtcccgatcatcgcaattacccgtcttatccgaaagaatgggagcaagtgaaaatggcatggatgaagaaaactataacgattcctgctgactgggatggtcaacagataaaactttattttgaggctgtatccggatatactgaaatctatattaataaggagaaggtgggagagaattttgatattttccttccgttcagtgtagatattacggataaagtgaatgcaggtgagacagctgaagtatgggtgggagttcgcagccagtctttgtttgaaaacaattctacgattggtcgccgcattgttcctgcaggttctatgtggggatatcatattgccggtatctggcaggatgtatatttgctggcattgcccaaagtgcatgtggaagatgtatatgtgaaaccgttggtttcaaagaatatgcttgaactggaagtgactgtgcagaataatacggaaaagaaagctgacttacagattcaaggtaaaatcaatgagtgggtgaatctggcaggaacagatataaactcggctcctgtaccagcatggaaacttggtcaggaagctttgaaagtagctcctgtaaaggtggctattcccgctaatgcttcgagcaaagttgtattgcaggttccggtatccggtgagttgaattactggactcctgaacagccgaatctttatgccgtattgctttcattgcaggctaagaaagaaacccttgatatgaaatatgagcgtttcggatggcgtgaatggacattgcaaggtactacacagtatttgaacggtaagccttatcagttaagaggtgattcctggcactttatgggtattccgcaaatgacgcgcagatatgcgtgggcatggttcactgctattaagggaatgaatgccaatgcagtccgtcctcatgcacagatttatcctcgtttctatatggatgtagctgatgaaatgggtatctgcgtattgaatgaaactgctaactgggcgagtgatggggggccgaaactggattccgagctcttttgggaggcatctaaagagcatctgaaacgttttgtactcagagaccgtaatcatgcctctgtctttggttggagtatcagtaatgaaaataaaccagtgattttgcatgtttacaacagaccggaattgatgcctcagcagaagaaagcctgggaagactggagggatattgttcgtgcaaatgacccgactcgcccgtggatttctgccgatggagaagatgatggagatggcatcttgccggttacagtaggtcactatggtgacatgaattcaatgaaacattgggttggaataggtaaaccttggggaatcggtgaacatagtatggcatactatggtacacccgagcaggttgctaagtataatggtgaaagagcttatgaatcgcagttgggacgtatggaaggattagctaatgaatgttatcatctgcttgctaaccaacgtaatatgggggcttcttatagtacggttttcaatatggcatggtatgccttgaaaccactgccgttgggtaaaaaggacatgactacacagccggatataagtaaggacggtgtcttcttcacagaatataaggaaggtgttccgggggtacaaccggaacgtgtaggtccctactgtactacattcaatcctggatatgatccaagtctgcctttgtatgatccgtggcctatgtatgatgctatgcgtgcagccaatgcaccggggcatcctggttggtctgcttatgctgatattgacaagaagcaatatgaagcgccagccgctactccggcagagaaatataaagaagtcgttttcattggaggagatgacagtaaactgaagaatattctggatgcgaaaggtgtgaaatttgcgactaaagttactgttcctgcacggatgctttatattgtggatggtacttatactttgtctgctgctgaaaagaagagtatgttggctaatatagctaaaggtgctgatgtttggatttggggattgacacctcagactgtgaatgtgtacaatgagattctgcctcttccggtggctctggataaccttaaacgttcttctttcctgccagttcagaaatcatggatacgtggcttgaacaattcagatttctatttctgtgaacttcaaagagctgacgcttcagagtactcgctgacaggcgctttagtggaagaaggagaggtattgctgaatgcttgtaaaactgattggagagcttggaataaacgtccggaggaacttaaaacagccagtacggtacggagtgagtacgaatgtacagcagctactcctgtatttgtgaaatatcggaaagatgcttcctgcttctatatcagtactttgaaagagtttacaaactcagaaaaaggttataatacgttaggggtaattctgaagaatgccggtattgactgtaatgagattgaggtgaaatcaaatgaagttttcttcttgcgtgataatcagctaatattcccggttgctacaaaggacaagttagtgaaaaaggcagatggatgggctttggatatttatgtgttcagtccgcgtcctttggatgatttgctgattgaaccgaatatgccgaaacttacgttagtggtgaaagctaaagaatgccagcttgccattaatgataaagcatacactgctgcttcacaaaacagacacgaggctacttataaagaactgcctttgttgcaaggttggaataagataagcataaagataggggaaagagataaaaatgaattcagtggtaactttaggtgtgataacagaaatgaattcctttcttctctgaaagtaatgtttatcaatcccgaagcaaaataaaaaataggtttatctcgcctctaaggtatctgggctgtacttgatttgtacggctcagatacggctttgatacggaccgggtctgttatttgaggtgaactgaaaaaggtaaatggattaagggaaaaaaacaaagtttttgaataggtgtttttcaataggttcagttatacactctggtattatgcaaataattagcataataccggagtgattataactgaaattacttttgtatagagaatagaatcgtttttgatgattttgtcgaatactggttactttttattaatcttattactaattttatcttttttttatacctttgtcatgtcttcttgaactagaaatatgaaaaactgttgcagatatatattgcttgtactcttcctgttcacaggggctgatttatttgcctctgtatataacgggggactctattttaagtctcattccgctcccagtgttgataggacttctcttactctgaatgatgacaaacctttcgacgttagtaatgagtttaccatttcttttcagatgtgggtacgaaacaatgaacccgactttggatcaatattgcatttatatacgaatacgaaccaattagtgcgtttttcatttgttgcgggagggcgtagacattatccggcattggtatttaatgaaggaatggtcactgttgatagtcccattgaacgagagaaatggatacctgtttccctgcgaatggatatgaataataattccatcgctgtgaattacaatggaaaggatacgactataatggtacctttaagtggttcaacacatgtaagagcattgtttggacatgctcctgaatatctggcagacgtagcgcctgtgaatataaaggatgtaaaagtgtcgcaggacggtgaacaaacttgtgaatggaaactttggaaacacaataataacatttgttttgatgaaatgaagggagcgatagcacgtgctgagtctccttattggctgattgatgatcatatagagtggaaacaaatttataagggtaatatatcaggaagattggatgttgcctttaatgcattggatgcttcattttatttggtaaaaccggaaatggtggaagtactggatgaaaatggagatatagtagatgaaataaaagtacagggaggatatcctgccatggaatttacggatcatttgatgtatgacacattgagtaatagattgttatcttattcattatcccaaaagtgtgtgtcttttttctcttttgatacaaaaaggtggagtcttgcggagcgtcatatagaagaaccgaattattataatcatgctcgtacttttaattctgccgattcatcattctatttttttggagggtatggtttttacagatatcagaatgatctgtttcgtatggatcttactacgggtgaattggagaagattgactatgaacctttactgaatcctcgttattcgtcggccataacagtggtgggggatgagctttatattttgggcggtagaggaaataaatatggtaagcaagaattagtttctcatttctatacggaactttgcgctattgatttgaaaaagaaaaagtcgcgtgtggtatggaggaggcaacagacagatgcctatatgctaatggcttcatctatgtatttcgaaccctcggatagttctttttatgcagttgcactgaaagatggtggagttctatggaaagtttctatgaaagatacggtttggacagaagtttctaaaccaattcataatgatgtagttcatcaggattgtgattttagtttttattcttcgccttctcatcagaaacttttcttggtaatggataagatattgacagatcgtacgcacgatgtgtctatctattctatcaatactccgttgatgagtgaatctgatattatgcaggttgaagaagaagttgtagccgattcttttgcatggtattggattgttgtggggatattggcattgttggggcttggatatgttatatatttctggttatcccggaataaggcggtaaaatctctgtcagaaaatgtttcgactgttatgggagatatgccggaggggagtaagaaacaggaaaatagaggaactgaattagagggtgaaaatatacttgtggctaagcccattgaaaactatttcgatcgtagtcgttcggcaatatctttgctaggaacatttaatgtgagagataaggaaggaaatgatattacttctaattttactcctcgtctgaaaagtctcttggtcttattgattctttatacggaaaagaacgagaaaggtattttgacgcggaagatgacagaaatgctctggtcggataaagatgagattgctgccagaaataatcggaatgtaacattacgtaaactgcgtgtattactggaagaagtgggagatgtagaagtgataagtgatggtggattcttaaaaatacgttggaatgaaaatgtattttgcgattattgtactgcgcttcattgtatggacctattacagaaaaacggagctcagaaagatgaagtacttttgaatcagatattggaattgttgctatatggtccgctactctccaatacgattgttgactggttggatgaatttaaggatgcttattcaagcctttctattgatttgcttagaaatcttctggatattgaatatcggaaaagtgatcgtgaaatggtgcttcgtattactgatattatgttcctgcatgatcctttaaatgaggaagctttggcggctaagtgctcagttttgtttttggaagggaaaaagggcattgctaaaagtgtttatgaccgtttctgcaaagagtaccgtgaatcgcttggggaagattataagataccactttccaaattatgcgaataactcaatctatttataattaagcgtttaattgaaagaattaagcgcttttttaatgcctaattaagtctgttttttatgctttattaatctgttcagtgtacttttgtggcaagagttatctatcaaaaactctagtaatttatgaaaaaactttatgctacattcctgattattgcatgcacattggtatcattgctttgcaatgcacaggctgaatggaaaaacgacttttccaagcagggagaaacactaaaaacggtaggaagaggaaaatgtgctgttaccgatggggtgttccgttcggtagatgcttactcttgttttggaaatctcgagtggaaaaactatacgatgtcttttaaggctcgtgcacctaaagatgccgaccaagtacaaatatgggcaggtttccgtgcttataaccgtttcgaccgatatgtactggggcttaaaggtggattgcaggatgatatctatctgatgcgtttgggatacatgggaacagatgagtttctgggggtacgtccgcttgggtttcatccggtaccgggagaatggtataatataaaggtagaagtatgtggaagccgtatccgtattttcttgaataatgagaaagaacctcgtatagatgtgacggataaaaatggtaatctggctccttcaggtcaggtcactttaggcggtggctggatagaaacggaatttgatgatcttgttgttactcctatgaaagaggatgccttgaaagatgtaaaggtggtagagtatcgtaaaataataactcctcaggagaaagagaataagcgtcaacaggagcgtgccaattataggactgttaaggtaaatgagctagtggatagccgaacggatgtatctttggatggcacttggctttttatgcccgaatatcaattgaatgataaggataaagcgatttctgtagctacggatgataagaactggcatgtgatgtctgttccaaatttttggaatcctatccgtatctggttacatggagagacaatgccttcgcccacaggacctcaacccaaaggtgtctcggatacttattatcagcaggaaactgtgcgttgtgaaggatatacattcgattatagaaaaactaaagcagcttggtacagacaatgggtagaattgcctgcaaatgttgagggtaaaaatatgacgttgacttttgatgctgtttcaaaggttgcggaaatttatattaatggagagcttgccggttcacatatcggtatgtttggcgaaatacaggttgatggaagtaaactgttgaagtccggtaaaaatctggttgtggtgaaagtgatcagtaaaacagatggcagttcttccgaatctggtagtgctgcaattgatttcttctattcttctgttcgtgagagtgaaaaggaagatggaaaagtttctgcgaagagtaatcttttgaaagatatagcccatggtttttatggtgacgagcctgctggtatttggcaaccggtgaaactgacgattaccagcccgttgaaagtggaaaatgtatttattaaaccgagtttggacggagctacgtttgatttgacagtgaaaaatcatggtactaaaaagaatcaatttaatctctatactgatattgtagataaagaaactggttcgctactttatagtaagctttctctgcaaaaactggtgttgaatgctgacgaagaaaagatgttcacttataacataaatgggttgaaaccccgtctttggactcctcagcatcctaatttgtatgattttcgtttccgtttggttgctgcaaaaggtcacgaattggattgcctgacggagacttccggtttccgcacttttgaagtgaaagaaggtttgttttttctgaacggaaatcgttattggttgcgtggtggtaatcatattccgtttgctcttgccccgaatgacttgaacctggctaatactttcatgcaattgatgaaggctggtaacatagatgtcactcgtacccatactactccgtggaataaactctggatgggagcagctgataagaatggtatcggtgttagttttgaaggcacctggccttggttgatgatacactctactcccttgcctgatgcaaaactgatagagatgtggaaagaagaatttcttagtttgctgaaaaaatatcgtaatcatccttcactactcttctggactgtgaataatgagatgaagttctacgacaatgacaatgatttggaacgtgccaaagaaaagtaccgtgtgatttcggatgtagtgaaagaaatgcgtcgcattgatcctacacgtcctatttgttttgattctaactatcaggcaaaaggtaagaaagaaaagtatggtgcggactttatgaatactatagatgatggtgacattgatgatatgcacgcttactataactggtatgattattcacttttccgttttttcaacggagaatttcagaaaaggtttaagatggttgatcgtccgcttatcagtcaggaaatgtcaaccggatatccgaataatgaaaccggacatcctacgcgttcttatcaattgattcatcagaatccacaatcactgattggatatgaatgttatgatttctctaatccacaatcattccttaatgtacaggcatttattaccggggaattagctgaggcgcttcgccgttccaatgaccaggcctcaggtatcatgcattttgcattgttgacatggttccggcaagtatacgattatcaaaagatagagccgtatcctacatattatgcattgaaacgtgctttgcaaccaatattggtcagtgcagaattgtggggacgcaatctttatggtggtgagaaattgccgacacgtatttatgtcgtaaacgaccgtgaggatggtacagatctgaaatccactttattgagatgggagatacaggatgaaacaggaaagaaattagtttggggggatgaagagcttccggctgtgaagcattatgggcgatgctatattgaacctaatattcagttacccgctaagttgccttcaaataaggtaaatgcaaagctggttttgaagttgacagaaaatggcctgccggtttctgaaaatgaatataatctgttattagctgacaaaaaatggaatatcggtcaggtagcgggaaacaagaagattgtattgttggataacgatggtacaaaagcagtttttgatttcttgaggattaattaccagactgtatcatctgtaagagaagctgttaattctaaacaaaaggctgatctttgtgtcatttccggtttgacgaactgtacgaatgaagaaaaagaacttcttcgtggctatcaggcaaaaggcggtaagcttcttttgttgaatagtaaagaagctgccaagattatttatcccgaacatattaccggctggacaatgccgacggaaggcgatatagttaatatggagcgcaatgatgcccccgtatttgatggcattggtgtgttagagttacgctattttaataataacaaacgtgagattcctaccgcttgtaatgctactcttcatgtgaatcgtaatgaaaatctgactgagttggctggtcagatgaaaatccatgcttacattgatggtggtgctccggaagatcggataaatcgtattaattcaatgagaggttttacattgattcagattaaagatggaagaggaattgctactgtttcaaccatgtgtaccgaaaaagcagagacggatccgattgctgggaaactgcttgttaatatgattaatgatcttatgagataattaataggaaaaaacggttaatatggaaattaactgttttttaatactcaattaagagtgatttccgcttttaattaatcttgtggaaatacttttgcttttaacatttttgcgcaacatatgtataataaataataaccttttaataccaatacttatgagtccataaagagatacgtttgatacagatatgagagaatagagttttttatagcctttatttaatacattatatcatgaatattttattagaagaacaagcaaaaattggcagaattataaagaaaactatttggggaattctgcctctggtatctcttagttttgtcatgcagtcatgtgacgaaaataagtttccagtaactccggttccggatcaatttgaatttattccacccaatgatgttaacatgttatctgctaaaggtggtgatggacaaatttcgttgacgtgggatgcagctgtagaaaataccttgaaagctgttcatgtaacgaatcagaacaccggtgaagaaaaagtattaccaggtacagctaatgaagttactttcacggggctgactaattatgaaaagtatacttttttagtgaaaacagaaagtttgcaggaacaactttcttatggagccactatcagtgctaaaccttttgtggcagataatataaaaccaggtgtagtggttaatctggttgggtataaacttggagataatacggcttttgtggtgtgggaaagtcctgaagacaatgacattgaaaagtttattattgcattgggtactgaaacgattacagtggatgccgagactacttatggtactatatatggtaatttaagtcagcctttaaaagtttatgcggtagactactctggaaacacttctgatgcggcggagactatggctaatgcggcggtagtgactattgacggatttgatgatggtgacacggaaactgttcaggttcataaagatcctataatctcggctgttgatggatatgtcattacatatttcggtcaagaatacaggagcgaagtatcgccacttcccgaggtttactcacaaactatgccggtagataatgaccaaccgctgtggttggatggtgacaaaacacagggatcatggcttgagcctgtaaaagtgacacttctgtctggtggtaaagagatttctacttatgaatatctcacttataataatattcctggaacagtgatgttgactcatgctacggagctttatgatgaaggagtcacagtgaagcgtaataatgatgggaagagtttcaatagtaaccttggaaattttgagaataaaggtacacctatttatggagtatacgatattaatgtacttgaggatggtgagtatgaggcgtatatttactttgccaatgagaaaggtaagactttcactattactattgatgatgaaacttctgtggaaggtcagaccggaccagaaaattctgctaattgggatacttatattccggcacccgctgtcattgttgcccttacgcaaggaacacataagttgagagtagactttccggcaggtggttgtaattttaagaagattgtttttaagaaaatagataaataaactatgaaaacactatcgcatactacaggaaaattaatgcggcttacgtggataggcatgttgctgcttattactggtattgcccaagcacaggtgaagactatccagggtttggtgttagatgagaccgatcagcctttgacaggtgcaactgtatatacttcggataagaaatcttctgccataacagatcttgatggcttattcaagttgactaatgtgaatgtgggggataccttggttgtctcttacgtaagttaccaaactttcaaacaggtaataaagagtagtgataatttctttagagttgctcttgcaccggatgaaagaatgttggatgaagttgtaattgttggatacggacaacagaaaaaagcatcagttgtaggtgctattgcacaagtttccacaaaggaacttacgcaaagtccggtatcaaatgtttcgaatgcacttgcgggaagactgccaggcatgattacagtacagcgctccggtgagccgggtagtgatatggctaatatgtatatccgtggtatcagtacttttggttctaaccaaagtccactgattttggtggatggtgtggatcgtgatattcgtatgatggatgtttcagagattgaatcaatcagtattttgaaagatgcttcagctacagctgtgtatggtgtacgtggtgctaatggtgtggtacttgtaactaccaaacgtggtaaagtgggtaaagctactgttacattctcagccgatgcaggtatacagtctccgacttctatgccggaaatggtagattcctataacatggcagtattggtcaacgaagctttagtcaatgatggtatgtctcctaaatatacacaggaacaaattaatgcttttaggtacggtaccaatgaatttttgtatccgaatgtggattgggcagaagagtgtctgaaaaaatcggctttaatgcaacaatataatgtgaatattacgggcggttcggagaaagtgaaatatttcgttggtgctaatatcctgatgcagggtggtttatttaaacatggcaattataatgaaaattatagtacaaatgtgaaatataccaaatataatttcagaagtaacctcgatttccagttgagcagtattttttctgcaaagctgaacttggctggtgtgataggtgacaaacaccgtccatctcccggtggtgatgtgaatactatttttgaccgtatcaagattgccaatcctgacatttctcctattcgtaatccagatggttcgtggggagtttttgagacgacaagtcttaatgcgctggcttatctgacagacaccggatatgctgatgaaaaggaaacggcggttcaggctacagtaggtatgaaagctgacctatctaagttggtgaagggactttctgtcaatgttgatttctcattcgattttaacaatgtatatgtcaagaagtatggaaaaacaagtgatatgttcctgtttaattcggatggttcctatacgcataaggcctttgctagtgcattaggctttggagatgaattaagtgtgtataatagtcaatatgtatttgagccttctatcaattataataatacgtttggtgatcatgaagttagtggtcttgtattgtttaatgctcaggaatatgtgaagaaaggtgatgcattgacacgtttaccttatcgtcgtttagggcttgtgggacgtgccacctatagctataagaataaatatttgggtgaagtaaatatcggatataatggttctgagaactttgctcctggacatcgttttggcttcttccctgctttctctttgggttgggtagtgtctgaagagagtttcttcaacactagtgtagtggattatctgaagttgagagcttcttacggtcttgttggtaacgaccagattggtggagaccgttttctttatttgagtctttggcagagtgctgatgatggtcagtttggttatcctaatccgacaggcggaggcggtggtgttaatgaaaaacgtaccggtaacgaaagtttgacatgggaaaaagctaagaagtttaattttggtgttgatactcgtttgttccgaagccagttagagttgactgctgatgtattttatgaaagaagatcaaacatcctcactaatgtagatatcgttccgggtacttatggtggcccagctattcaggctaatgccggaattgtagaaaacaaaggtcttgagtttgatgcaacatggcgtggtagaattggaaaggatatagagtattttgttggaggtaactattcttttgcccgtaacaagattattgagaaacctgaatctccacaggcatatgactatttgtatgctaccggacgtcgtgtagggcaacctttcggatatgtagctttaggattgttccagtctgaagaagaaatattggagagtccgtcacaatttggagttcccctttatcctggtgatatcaaatatatggatgttaacggtgatggagttattgacactaatgaccgctatccgattggttttacggatgttccagaaatgttctacagtttcaagtttggctttaattataaacgttttgatttcagctgtctgttccagggcgctgccaatgtaacttataatttccagacttcgacaaatattccgtttaacaacgaaagaagtacgcctattgttcaatggctagaccgctggacaccggagaatcgtgatgcaagtttgccgagaatctcttattccagaccgggtaacaataactatcagactaatactttttggcaaaataacggtaattacttgcgtctgaaaaatctagaggtcggttatcgtcttcctgaaaattgggtgagtgtcataggagcagaaaatgctcgtttctatgtcaacggaactaacctgcttacttgggatcatgttccggtgtatgaccctgaaaatacgaatgccagatatcctctgatgcgagttattaattttggagttaaagtaacattttaaaaatggaatcgaaatgaaaaagataaattatctactgttaatctttatatcgccacttttgtgggcgtgcgaaggatatctggataagccggatagcgatgatatcaccgtagagaaggcttttgaaagtgtgcggtcggcacgaaaggttctgaataacctctattctgaggtacgaggagctgcttataatatcagtacgcgcaatataccttatgctatggcatgtgatgacggtattgctggttataacttgtggactcagaaattccaaagtggttcttggacagcggatgataacagaggtgcgggagatgatgcagagacagatcctcctactgtaagtttttggaataacacttacaagagaatcagaaaagcaaacttgtttatggaaaacttgtatcgcgctacaggtgatgaagctgacaaagctcgaatgatggcagaagccaagttcttacgtgcttttttctattcagaacttatcagacgttttggaggtgttattatattggatcactctgttgaccccaatgattactcttcattgacgaatcaacctcgggaaacatttgagaattctgtagaatgggtttgtaatgaattggctgaggctgcaaaaggccttccggctgtttgttcgtcggctgatgtaggtcgtgctaccgatgcggcttgttatgcggcaatcgcaaggttgcgcttgactgcggctagtcctctatttaatacagatagccctgtattaccggattatacgactacccagtattatggaaactacgataagaacagatggaaactggctgctgatgcctgtcgttttgtcatggaacagagaagtcaatattatgggttggatttgagtaatgtggatactgcggaaccggatagttgggaaaactactatcgccgtttcataaacagatacttcatcgtggggaaggagtccgtttggatcgcttatgagaaagaaaactggggcggagtcaagatcccttggaacaatcgtcagtctggcggttggaactgggtaaatcctagctaccagcttgctttagaattcgaaatgtatcccagtggtaagatgccgatggatgaagagagcggttatgacatgcagaataatgctaatggtaaagatagagatccacgttttaaggcaactattcaggctcctaatgccacgtatgatgcctatggatttgaaccatgggcaggtggaaaagcctctgaattgcagagtcagcgaacaggtatgtgtttgcaaaaatacatagaccccttgtataatgatgtgacagcagagacacgtaacgtgcgtaagaatatcatacatattttccgctataatgaaattcttctcaactatgctgaagcaatgaatgaatatactggacctacatcggatgtttatagtgcaattaatgctatacgatcccgtgttggtatgcccgatttaccttctaatcttactcaagaccagatgcgtgagaaaatccgtcatgagcgccgtgttgaactggcatacgaggatttccgtttctttgatattcgtcgttggagaatagccgaagatgtttgcaatgaatatatccaggggtatgatgtgaccaaaggtaaagatggtggtttttataccattgttaatgtgggcgaccgtatggtatttgagaaaaaacactacctgtttccgctcgctacggcagagattctgatgaatccggcacttgagcagaatccgggatggcctaaattatcaacagcaacgaattaataaattgaatgggaattatgaaaaaatatatctatttattttttatgctaatgtgcatagtaagttgcgaaaagcctgaagagggcctggtagctgagaaaagcgtgaatgctgatattgtccgtttccggatttaccagaatcagaatgtcttttttgatggcacaattgaccaggaaggaaataccgtacaggttactataccggaaggtatagacaagtctgctatcagaccgcaagttttggtttcagcaggagccgtggtgactcctaaatcgggggaactgcaagatttcactaaccctgtggaatataaagtggtctctgagaatggagagaatacaaaaacgtatatgattacagttaattattaaagagcaagcgatatgaaacgatattttatagcactgttcattttgccattgttactggttgcatgtgacgatgataagcttgaaatgatgccaccatacattttcttcaattatgatgtagatacgtatgtgatggatattgataatcccaatttggcagatttcaccgttaaaggaagtatttccgctcaaggctctttcggctcattcgttatgggagatcaagagttgggaaaagaagagttgggagatagccttaacaggccgtttgagtatattgttccgcttaaaggtaagacagcggattttgatgtaccttttgtgctgactgataggatgggaaatacagtaactaaaccatttcatttcctggcttctagacctattgagtcttatcaggttagcatgggagctcagtataatccttatttaggattcttcttttcctttgaagatcagaaagtttattctgtatctgaaatgatgaaaatgcctaatcctgacggattctgttttggctacaatatcaataagaagcaacccatgtttgtttctccgacagaactcattaatcagactgtcctatctgattataaaggaaatcgtattgctagctttgttggggttgttgctgttgatggggtgaattttactaaagaagtttttgataatatgaagaacgatgctttgatgtgtaatctgaaccctattgaatatggtacatttactaatgttgttataagtgaggggaaagcttacttatttaagaatgaagatgattctctcagaggtattatatttgttcaatctctggaatcaggggtaagcggacaagtacagttagcaataaagatgcagaaagttaattgatagaggtaacagattagcaatttattgattaaatggtagtgagagtcattttcggcttataaattaagttgaaaatgactctcttttgctatttctttggttataatcgaatgaatgtatgaagaaaagatggataatattgtggctgagtgcgatgactttaaatgttaccgctcagaatgaaccttataagaatcctgaattatcgccttctgagcgtgcatgggatctactgaaacgtatgaccctggaagaaaaagtaagccagatgaaaaacggttctccggctattgaacgcctcggaatacctgcatacgactggtggaatgaagcgttgcatggagtggcacgcgccggcaaggcaacggtttttccacaagcaatagggcttgccgctactttcgataatcaggctgtttatgaaacttttgatatcgtctctgatgaagcccgtgccaagtatcacgactttcagcgcaaaggcgagcgggatggttacaaagggttgactttttggactccgaatatcaacatttatcgtgatccgcgttggggacgtggtatggaaacttatggagaagacccttatctgacttcgctgatggggctgtcagtggtaaaaggtctgcaaggtggtggtaccgggaaatatgataaaacacatgcctgtgcaaagcattatgccgtgcatagtggtccggaatggaacagacatagttttgatgccaagaatatttcccaacgtgatttatgggagacttatctacccgctttcaaaactttggtgaaggaaggaaaggtgaaggaggtgatgtgtgcctataaccgttttgaaggggaaccctgctgttcgaacaaacaattactgattcgtatcctgcgtgaagactggggatatgatgatatagtcgtttcggactgtggagctattggtgacttttattatcccaatcatcatgaaactcatccgacagctgccgctgcttcggctgatgcggttgtatccggtacggatttggagtgtggcggtagttattcttctttgaatgaggctgtacggaagggattgatttcagaagaaaagataaatgaatcggtctttcgcctattgcgtgctcgttttcagttgggtatgtttgatgatgatgcacttgtatcttggtcggagataccttactcagttgtagagtcaaaagaacatgtggccaaggctttggaaatggcgcgtaagagtatggtgttactgactaacaagaatcatacgctgcctttaagtaaatctatccgtaaggtggcagtgctgggacctaatgctaacgattctgtgatgctttgggctaactataatggttttccgacaaaatctgtcaccattcttgaaggcattaagagtaaactcccggaaggaacggtgtactataagaaggggtgtgattatgtaaatactcaaactgtatttagctatttcgactgctgttcctataatggcaagaaaggctttaaggctactttttggaataataaagaactgaaaggcgaagccgcagcaacggggcatttcagcgagccgcttaattttggcaatggaggtaacacggtgtttatgccaggagtaaagttgaacaacttttcagcacgttttgaatcggtatatactccgaaggaatcaggtgaagtatcttttataatctctgctgatgacggttcccgtttgttcattgacggaaaagaagtgtactcagactggcatgacggacctgcgaaagagcaaatgtatcgcttgaatgctgtgaaagggaagaattacaaagttgtattggaatattttcaagctggtggagaagcctcattgaagtttgatataggtattaagaaagaaattaattataaagaggtagcggataaagcagctgaagctgatgctatcatttttgtaggcggactttctcccacattggaaggtgaagaaatgcctgtggatctacccggtttcagaaaaggtgaccgtactaacattgatttaccgcatgtgcaagcggaaatgctgaaagccttgaaaaagacaggtaaaccggttattttcgtattatgctccggcagtacactggcgttaccttgggaggctgagaatctggacgcaatcctggaagcatggtatcccggtcagcaagggggaacagctgtggccgatgtcctgtttggcgactataatcctgccggacgtttaccgcttaccttctatgcttcgagcgatgatctccccgattttgaggactatgacatgagtaatcgtacctatcgttatttcaaaggtaaagccctgtttcctttcggacatggtttgagctatactatttttgattatggtaaggccaaagtggacaaacaaaacgttcgtgcaggtgaaggaatgactttgacaatacctttgaagaataccggtaagctggatggcgatgaagtgatacaagtttatttacgcaatcctgctgataaggaaggaccgattaagactttaagagcattccgtagagtttcccttccagccggtcagacggaaaatatccggatcgaattacccgcttcgacatttgagtgctttaatccgtctaccaaccggatggaaattcttcccggaaagtatgagttgctctatggtggaacttcggatgagaaagccttgcagaaacttacgattacagtaaagaaataaaaatcagaacctactaatatctaacacgaatatttatgaaaaagtattttcctttattttgggtcttctacctgctttgcgctttttcggctcatgcaggagaaggaagatatactattccgttgacgggaggtggctggtcgctgtggctcgataaagaagcgagctggcagaatgaccgcctttaccttcctcatgagataacagatttgtcattgttgccggtaaatgtccccacaggtggttggcaaaccctgagtcataatcccgatgcagttcctgtcgaggtaccgggtacggtggaagaatatctcactgttactgataatcctcgtccggagaactttcggggagtgagctggtggtatcgtaaaattacgattccggcagatcagcaaaagaaacgttttataatttactttgaatctgtccggatgcgcgcagaggtttatcttgacggtaagcttgtggcctatgacctgattggtgaaacacctttccatgtggatattaccgatgaagcaaaacccggaaaagagcagttgttggcgatacgtgtcaccaatcccggaggcaatttccactggcaggatttcgacataatgaaatggggagaatacaatattcctccttcaagaagcttcaccggaattatcggcagagtcaagctggagagtgtgaatccggtttttatttctgatatctatatgcaaaatacgcctgagctgactaaggtgaatgccattctgtctttcactaatgaaacatcttccagcgtgaagcaggatgtggagctgatagtgaatgaaaaaggcaatcctgataaagtcgtattccagcaaaccttgaaggctatttcgttccccgcgggaaatcatgaagtgacaattcctgtcaatgttcccgatgccaaattatgggatctctctactccggaactgtatacttgcaatgtgttgataaagaagggcaagaagacgctcgaccaggataagaaagattttggtttccgctggtttactgtagacggtgtcggtaaggatgctgttttgcgtctgaatgggcggcgcattatgctgagaagtgcgatcagttggggttactttccggtgacgggattgatagcaacaaccgaaatggctgagaaacaagtacgtactgctaagagtctgggcttgaatatgctgaattttcatcgttgcataggtagtccggttgttcttgaaaaggcggacgaactgggattgttatattatgaagagccggggtctttccactcagccaatcatgatccgtttattcgtaccatagtgaatgagaaactgaaacgaatggtatatcgggaccgtagtcatccgagtttggttatctttaatctgatcaatgaatttggcgggccgttgtcgcaagataaagcgcttgttgccaagcgcatgaatgatatgcgtgaggcacatgccattgatcccagtagaatcatgtcattcacatccggctgggcaggtagtgaagataaagaagaagactccaaggcgcacatgttaccgtttgatactactctgtatcggaaaggatggtatgataatcaccgtgccggaggtcctgaaacctgggttgagaattattataaaggtcctaaagacaatattatgtacaccagcaaccgtacggaagtttatctgcgcggtgaagagggtgccatatctactcctcctcgcatccagatgatatacgatcaaataaagagtacgggtaaaacaggttgggacggtctgttctggcagagccaatataaggctttcactgattattttcaaaagaaaggacttgctcctcactttggtagcctcgatgctctgacacgtgcaatgggtaatgtctcttttgaacatcagggaagacgtatcgaaggtatgcgaatgcagaacctgggcgatgcctatatggtgaacggttgggaagcgatgccctatgacaatcattccggtattgtggatatctatcgtaatcctaagggagatgcttctgttttggcatactataaccagtcgctgtatgtagccgttgcttcacgcaatcaggttgttaagcttccaggcatagcaacggtagacttttacatagtgaatgaggaaaacttgaaaggcgctcatacgcttgacatcaaactgattgctcccgatggaaaagtggtttataccagaaatgaagaagtaaacattaagggtggcgagaactttggccagcttttactggagaatgtagagattcctatcaatggaatggcaggtacttatcgcgtagaagccggcctgaaagcaggcggtcaggagatctttgctttgggaaatgacgaggtggttgctgtaagctggcaggcaagtgatttggccggaaagggtgcttattatggaagcaataatgataaagtagccgctttttacaaacaagccaccggtaaggaacttccggcgtttacttctgaaatgggaaagctggactggcttgttgttaatcgttcatcactggatgaaccggttgtgatcccttcggcttatttcaaggataaagatggaaagtccagtttgaaggctacttggtatagtgaggcagatatgaacattgtagcagctgtaaagagtgctacagaaattaaccggactttcgtagacggtgcgcaacctgatgagtcggttcctgccaatcagcctttctctgttgtatgggagggagagatctatccgcctgagtcggggcagtatctgcttggtgttgaaacggatcgtggagtacgtatgtatgtggacggccggcagttgattgatgaatattataatgaatctcccatgaagcaggatagacctgtggtgatggaagcgggtaaaccggtaaaagttaggctggtgtatcgacaaacccgtcagtccggtcagatacagttgaagtggtctcaacccagtgctgccaccatagctccgcagaagttgtttgagcgggtaaagaatgagggtaccacattgattctgcttggctccactgaaacctggatgaagtctgttgctgaatatacgaatacggtatacaacggttattataatgttgggaaagactggattggaggaattcattttgtgaagaagcatcctttatttgaaggccttccggtggacgatgctttgaattggccctatcaggtcgtagtaaagaatggggatcgtagattcggcttccgtatgcaaggagaagagttagtggtgggctcttatcggagtactccgtttgaattgggtacagcagtgggagttattccttgcggaaaagggaagattattttctcttctctggatattgctgataatttgagtgatccgtcaggtccggcagaagtggctcgaaagattttgtgtaactatattaaatactctttgcgttaggaatgtaagttcaccacagataatacaaatcaccacagattacacagattgacacagattcatggatctaataatcaacgaaataattcatcaatctgtgttaatctgcgtaatctgtggtgagtcttaatcccttttagaacaatcaataattatgaatcgaaataacgaaactacagaaacgttttctaagttgtgggtaacagctatgataaccctaacgatgatgcttcctgtgaatgtcgcctgttcgcaaacaaagcagcaggtaccacagcaaagtatcaaaactatttatcccacaaaagactgggccatatccgactttgttgtgactgcccctgaatttggagctaaagctgaaccgggatttgataatagagctgcttttcaagcggctattgacgctgcatatcaaagtggtggcggagtagtatatataccagccggaaattatgagttccgtagtacgcaggtcggtactaaaaacgtcagagttcgtcaaggccgttcggaaacaaagaaagattttcattttgagtatgttttgcgtctccaccctggtgtgcagcttcgtggtgattgggctgatccggcatcccataatgggaaagtccttggaacaattctcgaagtacgtgtcggtaaagactcaccgaattacgatggaagtgttgaaagctggtggaacgacggccaggcagataatgcgcttcgtaccacctataccagtatagctgatagattcatagagatgaacgcgggcactggagttactaatctctctatctggtatcctgaacaggatatccatcatgtaaaaccatatccgtggacgctgttccaaacccagggagattgtgctacgatagaacgtgtcactcttgtaaactcttacaatggttttaattctgctccgagtgagttacattatgttctgaacagttatatgactgctcttaataaaggtatcgaagtgcatgtatgtaccgatatcggacgcattgagaatgtcaggataagtcctgaatactgggcaaattccggtcttccgggagcaccttctcttgaggatgtaacagcttatacaagggcaaatggcacgggatatcaaatgcaccgttcagactgggagtatgtttcttatctgtatatatcaggttataaaacaggtgtgtggatagggcgtgaacccggttttgccgatgctcccaacgctcagttgtatgaggtgcatgtaggcgactgcggtaatgggttgtacgttgaagatgtcaatccgtatggcatacttatatccaactcatccttcggagcgggtcaagatggtaatgcagtgtatttctataaggatttcagcacttctgtacaattcaacggtgtggatttcaaaggttctgtcgtaggcgatggcgacggaggagtcgtatcgtttgaaagttgtacattcagtgaatataatgattatgctcttaggatgaacaggggtaatgtattgttgtcccagtgcgaatttaaaaagaatgccgggcatgtctatctcggagtgaatatgcataccttgaaatcggttaattcgggctataaatctaagctgaaggtggataatcacagtacttccgctaaagtggaagttatcacagggaagaaatacttctttgagcccattcctaaaaatgtgaaaacaaatatagacgtgcatccaagaccagtatcggatagagtattgaaagcggatttagcgagggcgactggctttaataatgatcgtcccgtaaaagacgtatcggctgatttgcagtctgcgctggatgctgtgaaagccgctggcggaggtacgctctacctgccggccggaagatatttagtgaataaccctataaaagtgccttcgggggttgaattgcggggatcatgggatgtacaacatcacacacaaagtggtggaactgccatatttaccaattatgatggcggaaacgcaggagaaagcgggccttcgctcatacagcttgaagcccatgcaggtatcagaggtattacgctggcacagcttaatatcgcttccgatggttttagtgttgaaaacccgagaaagaccccgttcctgatacagggacaaggtccgaaggtgtatattataaacgtaaccatagctgtaggtgacaaagggatagacttggcttcatacgacacgagcgggcattatgtcgattatttgggtggtgtacctttaagggcaggtatctgggttggcggtggcgccgaaggcggattcatccgcaatatgcagttgaatcctcattacggatcaaggcttccggaaggggggcaaggatatccggaagtatttatgatgcgcttcgtacagtccaattgcagtgcgcttaaatttgcagatgtcaagaatcagactattttcaataatttcgtttatggctcggtatatggaatccattttctgaaagatgcaataacaggcaaatatccgggggaaatgaccgttataggtcatggttctgacgggtgtacttattctctgtttgtagaagatgcggataaggatactaagatagttgccattaattcagaattggtcaatactaaaattccaaatgagccggtcaggtcttatgttctcatgggagataaggtcaataccgataaagttcatcctgatgctaaattgattttgtacaatagtgcattttggggcagccctgtcatcggggcgataataaataatggtattgtatctttccaacaagctaatttctcacgttccggtacgcagggtgtagatgttagaggtggtaaagcgcatgtctatacttcttatttcgctcaaaaaatggcggagacaactgtcaaagatgaagggtacgccagactgggagcgcagggtaaatcgatagagtttactaacaactactatatttccggtttccggtttaataagtcgggagagggattgatttatggatctgataagaagtagatgttggatggatagattcttgtgaatgtgacattgtggaatggctacacccttttacccggatggtgtagccttgaccacaaaagggtgtagccatccgggtaaaagggtgtagctatcgcaagatgtttattataagtaagttatatcagagctgtacatgttctgtactaagattctctcggtcaggaggtatctcttaatttatctttttaccagttatctgttcggaaaggaatcagtggcagaccatgaatattgaaaacattggcttctgcatagtttttataggcataccgaactgctaccggatgaggtactttatcactggatattgtcagacgggtagtgctggtttctatttcagcaaatgccggatagaatactttgtcttctcctgctatctcaaaccccttgagagaagtccacatcgggcacaatccccgttgggcattttcaacattgatgtatattttgttatcggatatctccatggatttataaataggtgatgcatatccgaatcctttcttaccgtaagtctttgcaagtgcccagagcgccagacggtttccgacagtctctttatccatgggatgtataaagacgggatggcctatgtctaaagttgaaaccataccgctattcggaatatctttcatgttttgcagttgtacttcgcgcatccgtgcagctgaagttccatctgctccttcataattgaacggggctatttccacaaaatagaagggaagctcacctcggttccatttgtttcgcaagtcttttacaaaggccggcatcagactctgatacagatcggcattgtctcggttactttccccttggtaccagaggaagcctttgatagcaaagtttgtgaaaggggctactttggcattatacagtacacagggagtagcggttatattctttatctgctcatcattgtcaaggatcgacagattgatacttttgaaaggagaaatcgcttcccggctcatccatgcttccactttagaacctcccagggtagaaacgataataccaaccggtacctccagaacttcctgtatatatcgggcgaaataataagcggcagcactagtgtttgctacattcaccggagtgttttccaaccattcaccctgacagtctttttgtggggccttgctgaattggcgcacccatttaccttcttgagagtcagtattgtatatgcggataggggtagatggttttgctttggcaatcagatcattggttcctttggtaggttgacggtcgaatcctcccatcggcatttccatattcgactgtccggaacagaaccagacttcacctatcaatacgttttttaaagtgagcggttcaccgtcattgaaagttatctcgtaaggtccacctgcctgtggagtggggatctgtagttcccattggcctttattgtcagcgatagccttgtatgttttgttgttccacgaggtctttactgtcagggttgctttggcttgcgcttgcccccagagtttgacgtctgtctgttgttgcaacaccatattatctgcaagtacggaggggagttttactttagcttctgcgttgacagaaagaaagaggaaagctaacagaaatgagaagtgtatcagtgagcatccattcatacggtttgaaaaaacttttttcataatattctttattagtagttgaactatgagttataaactatgtacaaaggtaagtccgggttgttatcttgtgattaatttcgtattaactacattcgaaatctgttttaataatctttaaaaagacacttttaagatgattttaatataggaaaggcaaacaatcctcatattaattgaaaattaagtgtaagctaattgaaatataact

SEQ ID NO: 6358 - DNA, 32630 bp, Unknown
  gut microbiota DNA sequence
ccgtgtaatccgcgtaatccgcgcctaaaattttcttatatactaatattctttcttctatgcttttttccgcttcatgcccaggaccctattccatcctgccctctaattagtaaagtcacagcaaattgtgacacactccgttcttattcccagcgtacggatactgttgctgttcctcaaatagcttttccttccggctttcagcaacttggtgaaaatgagttgacggatagccttggcatcctcaatcctttttgggaaaagttgcgtctgttacatgccggcttttctacagataccatccgtatcgtacatatcggtgatagccatatccgtggacgtatcttgccccgtaccaccggaacgctgctgacagaaacttttggtgctatctcttataccgatatgggtatcaatggcgctttttgtaccacctttacccgtcccgaccgtatttctgatattgccgccctgcatcctgacctggttatactgtctttcggaacgaacgaaagccataaccgacgttataacaccctgttacactaccgacaaatggatgaactggtgcgtatgcttcgcgacagtctgcccaatgtacccttactgatgacaactcctcccggttcctacgacagcttccggaaaagtcgtcgccgccgcacctattccattaatccccgtactgctattgccgtagaaaccatgcgtcgctttgctgatgacaacggtcttgcagtgtgggatatgtacgaagcggtgggagggagacagcgtgcttgtttgaactggcaggaagcaaaattgatgcgtccggaccatgtacattatcttcccgaaggatatgtgctgcaaggtgaattgttttatcaagctcttttaaaagcctataatgattatgtgggatattgactttaatcgtctgcgagatgtattcgtttatgacccgcaagcgccgatgatattcagtagcggcattttcttgtggttgtttgcagcatttatactggtttatctgctgttgcaacaccgtctgactgcacgcttgttgtttgttaccgcattctcctattatttttattataaaagtagcggaacttactttttcctgctggcacttgtcacggtaagcgatttctttattgctcgttttatggcaggtacttccgtaggctggaaacgtaaggcaagtgttgtgcttagccttgctattaatcttggtttgcttgcatacttcaaatatactaattttctgggagatgtcttcgcttcgctgctaggcggcacgttccatcattacgatatattcctccctgtgggtatttctttctttactttccagtcacttagctataccatcgatgtttatcgcaaagatataacccctcttactaatttgctggattatgctttttacgtatccttcttcccacaattggtggcaggtcctattgtacgtgcccgtgactttatcccacagatacgccgtcctttgttcgtatcccatgagatgttcggaagggggatattcttgattgcaagcggtctgttcaagaaagcgattatttcggattatatcagtgtgaactttgtagaacgtatttttgataatcctacgctctattccggagtagagaatctgatgggtgtttatggatatgccttgcaaatctattgcgacttttccggatacagtgatatggctatcggaatagccttgttgttaggttttcattttaataagaactttgactctccttataagtccgcttctattacggagttttggcggcgatggcacatttcgctttccagttggctgaaagattatctctatatatctttgggtggaaaccggaaaggaaagattcgccagtatgccaatcttgtcattaccatgtttttgggtggtttgtggcatggcgcttcctggaattttgtcgtttggggattgttccatggcattgctttggcggcacataaattctggatgacgttgactggaagaaagaagggagaagaaagtcacggcatccgccgtttcttcggtatactgatcacattccactttgtttgtttctgctggatattcttccgcaatgcggacttttccacttctttggatatgatcaaacagatctgtaccactttccgtccgcaacttttcccgcaactgattgcaggctattgggaagtgtttgcactgatggcattaggtttctttctgcatttctgccctgatcgttgggagaacgcttgctgtaaaacagtaacccgccttccccttatgggaaaggcggttctgatgcttgctttaatttacttggtaatccagatgaagagtacggagattcagcctttcatttatttccagttctaaagtttctcctctcccttcattgggggagaggtttctaatccacttctatttcgtcaatgaacatataagcagcttttccttcgcctgcatgtcctttcggcagggcagggctgcgcttgatgacaactttcacataccgtgctttcaccggatcgaaagttatctcatagttttccacacctttcttatcaatgtttgtttctgccggaatatccttaacggctacttcgcggaactctttgttatcgtcagatacagagactaccaaccctgtacttcccataatccaggcactcatatcgacaatggcgttcgtagctacccgcttgatttctgtttcctgtcccaggtcgatgatggcttccacatcaccacctacaaagcctaaccaggctccggtggcatagctatcatttcccttcataccatctactaaggtgatagcacctccgaatttatatttttccgaaggctggaaggtcagttcgatagggcaatatgtagccttattgaaagaaatctttttattcaccactttactctttccttccgggcggataaccactgcctggaaatctgctgtttcagtaatggcaacaggctctgtgtatttcaatgaagctgtagtcggttcggtcccatctaatgtataataaataggagcgtcatcaatagtactcaatgtgactactaccgctttcttggcaacatccggtgtgaagtcgaccttcaaatcgaatacatgcttggcatagttgaagccatctctttgatagaacttcatcaggcgagccaggcgtttagtgaaatctttgaaatctttcttttcgggttgcgtccattgtacttcggcaagggcagccatacggggtaataccatgtattccacatgttcggtggtagttatgtactctgtccataagttggcttgggcaccaataatatgttttttctgttcttcattcagatcgaaagtaggatccagactatacaccttttctatgggtacatatccaccgatacccagcggttcatccttggtgtctgccgtctgataataatcgaaataacaataggtattgggcgtcataattacatcatgtcccatttgtgccgcttctatgcctccggatgctccgcgccatgacatcactgtcgcattgggggctacatcgccttccagaatttcgtcccagccaataatccggcgtcccttgctgttcaggaacttctcgatacgtgtcatgcaataactttgcaggcgatcttctgcggtatgttttttatcagctttcagcccttccgctttgatacgtgcctggcatttcggacatttttcccaacgggtacgtggagcttcatcgccaccgatatgtacatattctgatgggaatatttcgatgatttcactcattacgtcttccaggaattgcatggttttatcattaccgatgcagagtacgtcttcaaatacgccccaacgaggacatacttcatatggaccgcctgtacatcccatttccggataagcagctaatgcggcaagcatatgtcccggcaagtctacttccggaattatcgtgatgtaacgttcctgcgcatacttcacgatttctttagcttcttcctgtgtatagaaaccaccatacggcgtattgtcgtactcttgtgtgtttcttccgattaccgtacgactgcgttgagaacctatttccgtaagtttcggatatttcttgatctcaatacgccagccctggtcttcagtcaggtgccagtggaaagtattcatattgtgcagtgccagcaagtctatatatttctttataaactctttggggaagaagtgacgtcctacgtcgaggtgcataccgcggtaactgaaacgcggttcgtccttaatttcacctgccggtatcaggacggttgctcctttggcttcggcgggaatggatttgcgtaaagtctggatgccatagaacactccgttttcggtttgtccgttgatgctgattccttcgggggtggtagtcagcacatagccttccttgtttgcaatgcccgggtcgagccccagtacaattgcatttttcacttgttctcctgccgcgatggcctttgttttcggtgcgtagttcgtggcttgttggatgtactccgacaggaactcagaattgcgttgcaataaggcattgttttccggataagcgatgagaacattttcgttcagtttgaacggatttccctgggttaaacttacctcttgggggagaggtatcacttggtagttagcttctttctccgcggtacacgaagcgcatgccaaggcgagagcacttgcaagaagtgcgtggttaagttttctcatggtgttagtatttaattgattgtacaaatgcaaatgtacgtgattatcttcgaattttcacataaacggacgcaaaagtatacttccggtactgaagaaaactacaaaccggcctgtctgcttaaagtccggtaaagttcgttcatcttctcatttctcaatgcgttgatctcttccgtttgtccgggtttcagataatctttgttgagtttgatgaaacgtttgtccagtttcccggcttcaccgatgatttttttaagttgtgtggcaagtccggaagcctgtgatacatcatacctcgaagattcgtaggtgaactccacttctttgtactgaagatagttgatgcgcaggtccagcatcaggcgataatgttcgaattcaccgccctgtttccggggaacgatcttgttgaagctgcttttcaactcttcacattcctgtatcacctgttctatcggctttcctttagcatcctttccgtgacggactaactcttggggaagcaggaaatagttgagaaaggtttgcgcttcgtcctccgacagcccatagcgttgctgtgcatactcttttatgaaagtttcggcatgaatcgcttttgatgaattgaccgctttacaataagcgtctatcagcaattggaatcctgacatgggatatacctgccggatgggttgcatactgattatttcccaaccgttatcatagtggaaaccataagttccgctggttgaccaggaagtttctatcattccctcatatccgtgagcacgcgcaaagggcaggaaagtagccaggttattgaaatgcttcatccactgggtcagatatgtattgtcgggtgccgaacgcagtgaggctgctccccacatctttacaccgagcttcagcagattatccagtttaccgaagcggtccggttcccaaccgtaattccagtcaacgtagatgagatctttgggtaactcttgaacggcttcggggtgcatcaggataatatccgcccagatgataggtttctttcccatttccttgaccacctcgcacatggcttttatgtagtcaacaaaaaggcgcgacttatttacttgggaacattgtgcgcaacttcccaacagataagtttcgtcagctcctatatggaaataaggtgacggatgcaattctgccacttcccggaagatttcccggaatacctttttagcttcttctatcttgaggggacatacttgcgacacttccttactgtcttcacgcaaatgtgcgtaccggtcgtgccttaatatgtattcgcaatgtccgaaacagttctgtaacgggattacttcaatgccgagcgaagtgcaatagcttacaatatcctgcacttcgctgcggctgaatgccaattgattacacaaagtagcatgcttttggaaagggaatgttgcttcatactctatcagcagagtatttatctctttctttgaaaggtcggacgccagttccttgattgccgaaaccgtcattacctgtgtacggcaatccagatagaaagccctgactttgaagtcggaaggaggggctgcgctacgggtcggaacacacaggcacaggaatacgcttactaaaagtaaacttttgtatatggaacgaagggtatgattcatggtctttattttttagatggataaaagtgacgcactgtcccggtcacaataaagcgtcgcatggggatgagtacgtaaaatagaagccgggcaagtggtgctgacagggccgtataatgtttctttcacagcattcgccttcggctttcccggtactatgcaaaagatacgggtagctttcatcataaccggtatcgtaatggtgactgcctgttggggtactttctccagactggagaaacaaccgtcgtgtacctgttgtgtgcgacatacctcgtccagtaataccacttttacctgctggggatcatcaaacaatgccacatgcgggtcattaaaggcgatgtgcccgttttcaccgattcccatgaaaacaatgtcgatgggatgcttttgcaaaacttcttcatagtgggtgcagatgttttcgggtgaggcgccttctatatataaataatgtatagacttgaagggaagtgcggcaaatatgtgttctttgagataattcccgaagcgttgaggcgcatccgcttgcagaccgatgtattcgtccatgtgcaaggcatggatgcggttccagggaagagcatacttctgcaaggcggccagaaactcgttttgtgagggggccgctgcaaacagaatattgatttcctctttttcttttaataattggttgatactttcggctgctgcttgtgcggcatcttcgcccataatctggcgggtagcgcatatccgtgccagtaaagcttctttcttaatttcttttatgttcatggttgttcaaataatgtttctccgttaatgaatacccggttgatgcggatatccgggtcgaatattacaatgtcggcatcatatcctttggcaatctttcctttcctgttcgcaatgcccattatttcggcgggggtgagcgtcatcatgcgcacggcttcttccagggggcgttctcccatccggtacatattccgtaccaaccggtcggccgtagctacgcttcccgcaaaggactggcggtcgggcatcttggctactccgtcctcaatgagtacttcgcgtcctttggaacgactgcccaatatgcttttcccttcgggcatacctgcaccgcgcatggagtcggtgactaaggcaatcttctccgcacccttattctttactgccagtttcataagcggtgccggaacatgtacgccgtccgttatcagttcaatggttgtttcgtccaataaatatccagcttctacacaacctgcatagcggaaggcgttccggcgggttactccattcatgcaggagtagaagtgggtgatatgggtaaaaccgtgtttcacggcttccaccacatcttcataaatggcatctgtatgcgctatggaaggtaatatgccacgtcggtgcagtatatcaccaaactcaagtgcccccggaagttcgggagcaatgctccaccggacgatatcctggctcctgtccaatatctccatgtattcttcgggagaagggttgcgcagataacgcggatcctgtgctcccctgaaggcataggcaaagtaagggccttccagatgtaaaccaccgaaagcggcacccgaacgctgatcttttacccggtcgtatatatcgaggaagcgaaacagttcctgattatccgaagccagtgtggtaggataaagtaaggtagttccgtgccgcaggtgttcgcgggcaatggtgaggcagtcttcttccgtacaatccatgaaatcggaatcacctgcgccgtgtgtgtgcaggtcgatgaatcccggggcgatgtagccgccgtgtgcatcgtgacctatgctgccgggtacttcatagtttcccggctctatgccgataatttttccttcggcaatgagtacggttcccactccgaagttacgttccggagtgatgatttcgccgttataaattctggttatttgtcctttttcagtttccataattcagaccaatgattgattttatatccgtagaatgcgtaaaatatcaaataaaggaagcagggaatcagcacgatatatccgatccgtaatccgtaatgatcggctatcagtccatagatgaccggcatgaaagcgttgccgcagagtgccatcaccatgaacgaggaacccaggttcgtccagcgtcccaggtcatgtatggcaagcggccagattcctgcatagatcagtgcgttgcatactcccatcaggctcaggcaccagatggaaagggaagtggcatgtccgtacatctgtacttctccgggaatcaccagtacacagaccgataatatcagtccgcctacggtgcagatacggaacatgcgttgctggctggcaaaccggggaatcagcaggataccgatgaaatatcctacaagagcacaggacaaagtgatgctggggaatatcttggcttcgtgcagattgaatcccatactttcggcatagctgataatcgtatcgatggaaatcacctgggccgccacatgaaagaagatggcgaatactcctaatataaggtatgggtacgagccgatagacttgtggtcaccggaagagtgggtactcttttcctgttcattattcagatcgggcagccggatgaaatgtatcgcgcagccaaacaggaacaagaacagggaaagtatcgagtaggggacaataaccctccgtatcagttcgtccagcaagaggtctttctctgcacctgccacactgttactcttcagcacttcgaacaattcgctatccgttgatttcaggatgacggcggcaaacagcaggggggcgatgattccggctatcttgttgcatagccccatgatactgatacgccgggctgccgactctatgggtcccagtatggtgacataaggattggctacggtttgcaggatagacagaccggtacctatggtgaatagtccggtcaggaagacgggataggcccgggtgcaggctgccggaacgaataagacggtcccggctgccataagccacaatcctgcgataataccccgcttggggccgatccgaccgatcagtttggcagcgggaatagacatcacaaggtaagcgatgtagaatgccagggctaccagataagactgggtgtgggttaactcgcaagccactttgaagtagggaatcaagatggagtttacccaggataccagtccgaagatgaaaaacagcgttcccagcatcagcataggcagcagattggaggaaggcttttgttgaacgttacctttaaacatacctttttacagttttatataaatacgtttgcgatagagaatgtatcccaatgcccatatcaccccgatgaagaacagggcatagaccagagatcctgcataatctcccagcaagggttgcagcgtccggttgtagataattccccggacactgatggttgcttcgccccacgggatgaatgacaatccgaacagtacgctgatgatccatgcaactacatacatgaaaagcggattcactccgaaggcttcgaagaagcggcaccagcgctttttctgcctgacgtcaatgatatctatcagtaaagcaagaagcagggaagcagttccggaagtgattaaagtgtaggaagccgtccacagtttcttgtttatcggatcgagatattgtaacaggaaaccggcgaacaacagaaccgtaccgaacagggcgatctgacggatacgttccttattctccgctatccccgtaatcaggcttccaacgaacgtgccgaacagtacatgcgcccaacaaggaatcgtactcagcagcccttcgggttcgaaagcaaagctaccgccctcagcggcctctttgattaaatgtcccgctcccagcagtttgacgtcaatcaccgcaatcaggttgtctgccgaatgtacatatccgttgaaacattgcagcaacacaagatatagcagcagaattcctcctgccgtggcaagataatacttcttcggaataagaattgccaggaatgctccgcctgcataagccaatgccaaccgttgcatgacgccgagaatacgcagatgttcccaggagaaagtgccgtaacaaagtttggagaaacaatccaatgctattcctacggcaaagagagctacggtccgacggatgattttcagactgacggtggtattgagtttatcgaacttgcgcaatgaaaagtggatggctacgcccatgataaacataaaaaagggataaaccaagtctgtgggggttaatccatgccatcgtgcgtgttgcaacggggcatagacagactgccaggaaccggggttgtttaccagtatcattccggctatggtaatccctcttattacatcgagtgcaagtaatctattgtttggggccgacataagtgctgaatgttttgattattaatagtttggatgctcttcattaaatgaaaacacccggatgctttattctactcttgcaaaaggtggcatcttttgtagcaaaagatgccatctttaacatcataagatgccacctttcgttgcaaaagatgccatcttttgcatgtgatgttttattgcttcatatcctttcctttaatgaaacaggtcttcggaatatggcttctgcaagaggatgcttaatgttcggtgaaagcgtcatagagcacctgaagcagactctcttctttgttgggagaatcgtgcgagatagcccatatcatgatacctccgtaaccgttgtcatttacatacccggctttggcacgcatggttggtttgccgttgtagaagagtagtccgatttcgtccttctccgtggcctgttcgttgggataattcgttagaatctccttgtacggcatgtgtgtagcccctaccggggtttcggcggatacgaagtgtacaccgtagaaaggcactccgaggataatcttttctttgggtactccgcggatttcactccaacgtttggctgccatgcggaagtgttccatgctggcgtgctgagctactttcgatgatttccaaccaccggtgaagtcgtacaccatgatattgaccaggtccagatattcaaacatcgagttggtatatacattatagtttccccagcccccgttccattccggatagtcggcactcacggcggcagtcagcagtttgcctttgggaagttccgtcctcagttctttgtagaagttttcaaggagggctactttttccttgtcgccttctccgtagccttccggaccgcctgcccagtgttcgtagtcgatgtcaagaccgtcgaatccccagtcttccacagctttcaacagttcctttttgaagcggttgcggtaagtatcattaagcagtacacccgccataatggctttgttgccgcctccacctgcggataacagaactttcacccctttcttttgcccttcgcggaagatgggcaaaagcttttcgatgttggcggcatcagccaggccaccttcttctgtggcgcgtccgaaggcgatgctcaggtgagtcagttgatcccagggaatctggtattcgggcaattgttcatattgcaggtatccgaagataatcttggatggtttcttgggtggttcttcctgggaggttcctccgcatccgaagaggatgcagagaagtgcccatagagtcagatatttcataggtatccgtatgtttttaaggtgctgttactactaaagtgaattctctgaaattagtggttccgtttcgtaccgcttcaaagcgcagcttgaaacttccggtctgggtgaatgtgtagctcagtgtaggggcggttccgatcacttcaccgtccagcaaccacttgacggacacgctgccgtctgccggagaaaccaggatagggaattccgtgagggtgcctgctatggctgatacactttccaacatgtcggtatagatatagagttcatcatcggcaaaggtcgggttgcttgccgagtcgtctttacaacttcccatggcgatgcccaggaagcacaatattagaaaaatatacttggttttcataatttatccgttctttttaattgtgtaaacttattctttatcccaccatacacgactggtccaactgtctgttcctcccatgcggctgagtgcttcttccagattttccttgttcttaatctgttcttccagcggatacatcatgcggttggggcgtttgccgtccgattcgttttctgtgggagccaggttgtagaacttggtgtacttgctcggcataccgctgcgccgtatgttagaccaggcttcaatcgggtcgaggatatagagcagccacagttgtttgttgatctcttccagcgcctcggtgtcgcctgcatccagcagtgaagactgttcttcggcgagggcttccagtgtggcgtcatcgggtacattggcgccaaacaggctccattgcttgatggcggctaccagacctttcttatagtgttccttggcactttcggaagatacattccaatggcgggcagcggcttcagccaggtagaattctgtttcggcataagtcaggtgcatataaggagatgccggatcagtcagcagtttagagggttgcatcttctggtagtggtgtgctacacttacatcttttccatcgatattgatggtaagagccggtgcccaggcattgtagatgaaatcttgtgccggcactccttgatacgaaccggtcttttcgtaaacaatggaggtgatatccgtacgtttgctgtcggtatagtaggcgcctccgatgtagagagtgcgcgggtcgttggtggaagtcagcgcttccagcaattcgttggtcatgcggtagttactgtaagtaggatcttccagcatctggttggcaaatccgttgcccggaccttcgtccagtctgctcgattcgtgcgccacataacagatatcgctgttagaggtcatcactcctgcctcataagccgctttggcttcttgctgggcaagtgtggggttaactttcagcaggcgcatggagatgcgcagccataaggaattggcaaaccgtttccatttctcgatgtcgccattgaagtaaaggtcgttctgcggagccatagccgatgcgtccagttgggcggaggcggcgcggagttcgctcaggaaatccatgtagatatcttcctgtttgtcgtatcggggtttcacgatgttttcattgtatatctttccggcttcaaagtacggaatatcaccgtaataatccgtcagtttaaggaaagcctctactttcaggatgcgtccgatggcattcagattgatttcttccgggttgtcggtggtctggctgaccagtgcgacggcattcttaatgatatcgggataataggctacccagaggcgttccatataggcaatgttctttttggcttttccgccgtactcctgcatactccagccgccaatccagtggttgacgaatgcacccgggtagataaagtagcggatggtgttctgcatatattgtgaatgagtcaattgtatggtcggaatcagcagatgcggggatatgctggttgccttggttggattctcgttcagttcagtcaggtctacacagctgcacaggcagatgaggccgataaataaggaactccattttatatttttcatgttgatatgcgttttagaatttgacattgatgccgaagccgaaggtgcggcgtgagggtaatgagccatactcgaagccctgtccgttaccgttgttgtaagaagattcagggtcgatgttgtctacttttgaatagatcagcagcaggttgcgaccgtaagccgagagggtgacggactcgataggagtatgtacgaaccacttcttgggacatgagtaagagagtgatacttcacgcagtttcacgaaagagttgtcgcagatgaacggttcgggggaagagttctgcaaggcttgccagtatttggcgggatctacgtacacatcgttgggcacatagcttacgttaccgtcggcatcggttacggcttttactcccttacctacataacctccggtcggtgtccagtctttggcatctacgttggccgacaggcgggcttgctcggaggcgtaccagccttcgcgtccttccagggtttctttggaagtaccgtttacgtgcgactgcatcttactcatggaataaacgtccgcaccgaatttcatatctaccagtacactcattgataagtttttgtaagagaaagcattgcggaaacctaaagtgaagtcgtagttgccgtttcctaatacggatactttatcgtcgaaagtaggcagaccgttttcataaatcacttcgccggcttctgtacggttcagtttcttacctacgatgacaccgtaaggttgtccttcgcttgcgtagatgaaggcgttggcccagcgggcggctgccagttcaaagtctttcacgtcttcgtgcagtttcactacttcattatagttcttggcgaagttgatattagcatcccaggtgaagtttttggttttcaccggtacgagtgacagagaagcttcgatacctttgttggaaatctcaccggcattgatcatggcacggctgtatccggtagattgtgaaaccggcaatgacaggatctggtctttggttatctgttggtagtaagtaaagtccagtcccagacggttatccaggaaacgcacatccatacctacttcgaaagagtaagtcgaggtcggtttcaggttggcattaggcacggaaccggaagtgatgtaacccagagaagttcctttattggtataaggtttcagaccgtattccaattgaagctgataggggcttgtgtcaccacctactttagcccatgaagcacgcaacttaccgaaggtgaaccattctttgtgctcaaagaggttggagaatatcaagcttcccgaaaccgaaggatagaaataagaacggttcttggggcttagagtggacgacacgtcattacggaacgttgcatcgaggtatgcaaactctttgtagcccaggctgacctgtccgaacagggagcgcacggctttacgcaccagggcatgttcggtttctatgctggaatagttggtgatgtcctgtaaaccgggaattacctgcgtttgtccggtctggatcatagattcgtactcatagcgcatcacattgccgccgacgaaagccgatacatcgaaatcaccgaaacgcttttggaaacgaagcatcatctcgaagttgtactgcatcacgttgttggtcatttccttcatcattccatcggtaaatccgggggtatacatcggagtgaaatcggtgaagcggaaggtgtaggagtccagaccggctttgaagctggctttcagataatcggtgaatgcatagtagaggcgtccctgtccgatgaggcggtcgcgtttggacttattgctcatttcattgattacccagtaggggttgatgcggtatttgtcaccgttccagtcattgtaacgtccggtttcgtccttgtagttactggataaccatttctggtcaaaactcggcgcgatacctatcagggcattaccaagattactcggactgtcggacaaggcggggcggttctgcacggattcgtaactgtaagtggcctgtgcttctacggtcaggcgtttggaaagctgggtgtttcctttaaaagagacactggtacggctcagttccgattcgggcacgatatcccagttgcgcatatcagatacggatacacggaaagccgacaactcattggtcttgctgaaggcaacggcattggtggtagtgataccggtatcgaagaaactcaggatgttgttgttcacattaccatacttccgtatctcatcattatagatatgtacatccatgttggggtctaactttccaccccaagctacttgcgaagtagtcgatgccgactgaccggacatcgagggacgcccgtcgcggccctgaccgtagacgcgctggtaatcgtcgaaaccagtcagtaatttaacaatgctcaggttggatgagaactccacacctataccctttttcttctgggcggacttagtggtgatgaggacaacaccgttggaagctctggagccataaagtgcggaagcggacgggcctttcaggatagaaatgttttcaatatcatccgggttgagggaggacaatacgtcaccatagtcgtaaccaccccatttgcctgcaccttccagttccgtattgtccaccggcatgccgtcgatgacatataggggctggttggaacctgtcagctgggaattaccgcggataatgacgcgtgtggaaccggaagggcctgctgttgtggaagagatatccacaccggctactttacccgagatggcagacattacattctgctcgttaccggctgtcagtgcgtcattgtttacggaagatacagcgtaacctaaagctttggcttcacgcttgatgccgagggcggttactaccacttcgtctatcttcacggcttcttcctgaaggatgatggtgatttgggaacgcccttctactttgatttcttctgatttcattccgatatagccgacgcgtaacacggcgttgcgcgaagaagcattgatggtaaagcgtccttctacatcggtaatgacacctgtctggttgcttttgtcttgaatggtagccccgataatgggttctttgtctactccgataacgataccggataccttgaaattgctttgagccagagtaatcaagctacagcacatacatacaatgaggaagatacttcgcattgaagtgttctttcctgacgagttaggtaaaagaataaaatttctcactgtttctcattggttattagggttaataatagtggttgttttcccgtacttatagtaattcctatattgggttggagtcatctgatagattcgcttaaaggatttggtaagattgatgtaatcttcataacccagttcaaaggctatatccatgatgggcaggtctgaggttaacagtttctcggcgaaacaggaagtgcggtaatccagtatatattggtaaatggaaatgccgacttccttacggaaatgtttttccagtacacggcgtgaaacacaaaggcggttcagtatttctgtgatgctgataaggccgttgttctccgtctcaataagtttcagggcaccaaggaccagtttgtcacttaccgagtatccttctgttgactttctgcgttcaatgcggatgggattgataacgatattgaattgtggcagttgcttatccttcacaatgctgtgcagcagtttggctgcctgatatccgccgttctttacatccagcacgatggaagaaaggggagggtcggacatattgcagagtatttcgtcattatccactcccaaaacagccagatcctgggggacttgaatgttgctgataccgcagacttcggttatgcgtaaggcgaatacgtcgtcgcaggcaaacaaggctgtgggatgggggagttgctgtaaccaggcttggagggtctgctggtcggaagtggagccataccggatgttgctctcttcattatagatataggcatgctgccctacttcggcgaggcgggtacagaaaccctcttcacgttcgcgtgaccagattgtatcactggtgccgtagaaagcaaaattagtgtaacctttccgcaagaagtagttggcggccatttcgccggtgccgtagtaatcaccggtaatattggatatgccgtccacacgattggtgtagttttgcaagatgacggggatgcctatggagcgcagccgttcggtatttacttcggacagctgtcccatgatggcatccgctccccagcgctgagcaatatcaatgactgtttcgattgctttttcgtcattgaagtcttcacggctcaatggaattcgataaaagcgccagttgcccacttccatggaatatcgcaggaaaccttttaataaaaggcggctgtacgcgctggtaaaatcggataatagcagtactttcagcatacggtattaaatttgcggttcgctttttaattgttcactgcaaatgtaaaccgtttgtttttgttgatatgcgtcagtatgcgtttatttattgttgatttgcgtcaatacaattgttttctatctattatattctttttgctctgtattctttcggtgacattcccgtatgcttcttgaagtaccgtccgaagaacgactggtcgggaaaattataccggtcggctatctcttttagtgagaggttggtggattgtagggcgactttgatttccagtgtgagaaactcatcgatgatttctttagcggaaatctggcctacctctttagtaatagcggaaaggtagcgtgtagaaatacaaagttgctcggcataaaaggctacatcccgttgcatggtacaattggtatgtaccaggtggatgaactttttgaacagctgtcctttccggttgcctccctccagttgttccttcgtgaaatatctctgtaccttatcataagtatccaggaagaatatctgaagtaggttctgggcaatgctttcgcgaaactgattttccttgtcggcatagatggcggcgcttgcctctatcattctcaggatggggcgtatggtttcgagtctggtatgtgtataacaggaattctctttcatgaaatgcatgaatgccgggtccagtcggaagcaggcaaccttcatcatctcgcccgaataagcgaaatagtgtatctggaagtccgggctggccgatctgagcgaaagaatagagccgggcaataacataatgttcgtattcggtataatgtgatgcttctccaggtctatggtgatttccgcttctccgccggaacagaataaaaggactccattcgttaatttgatgagtcggttgtgataaaactccaggttatcggtcccggatctgaaggtttctgctttcgtagttaataatggattcatactttatctttttaaagttttgctgggacaaaggtagaagttctttttggaatgtttagcaaagcgttccgaaaatgaacaaaggagtgcgacaaatgaaacaagttgttgttcaaaaacggcatacctttgccgccgacataacaaaagatgtttttaaaaagattgtagtatgacaacaaagaagagattgattagacaaatgatgacattcatttgtggagtaacattggtagcatgcggacaagctcctaccgtgcagaccagttctgagtatgaggtgatgagaatcacgacatccgacaaggaattgcaaacgacctattcagcgagtatccggggaagacaagacattgacatttacccacaggtgtccggtttcctgactaagctttgtgtggaagaaggtcaggcggtccgcaaaggacaagtcttgtttattattgaccaagtaccttaccgtgcggctttgcagactgcggaagccaatgtggaagcggcgcgtgcaagtgtagctacggctcaactgacgtatgacagtaaaaaagaattgtttgcccagaacgtgatttccgagttcgacttgcagacatcttataataacctgctgacggcgaaagcgcaattggcgcagacggaagcgcaacgtgtaagtgccgccaataacctttcttatacggaagtgaaaagtcctgccgacggtgttgtaggcactctgccctatcgtgtgggcgctttggttagtgccagcctgcctaaaccgttgactacggtttctgataattccgatatatacgtttacttctcgatgacagaaaaccagttgctagatatgacgcgccgctacggttccaggagtaaagcattggaggaaatgcctgctattgaactgattttgaatgataaatccacctatccttcgcaaggtaagattgaaacaatcagtggggtgatcgatacttctaccggaactgtcagtctgcgtgccgtattcccgaataaagaaggattgttacagagtgggggagccggcaatgtagtggttcctgttcaaaaacggaactgtatcgttgttccgcaagcggctacttatgaagtgcaggataaagtgttcgtatttaaagtagtagatggtaaagcacagtctgccccagtggaggtgacccgtgtgaatggtggaaaagagtatatcgtagacaagggtttgaatgtgggtgatgtaattgtggctgaaggtgtaggattattgcgcgaaggtacacctattcaagctaagtcagcatcctctgcaacacaagaaaccgctaatcaacaaacaaaggaggattaatccatgaatctgagaacatttattgaacgcccggtattttcggcggtcatttctataacaattgtcattctgggtatcatcgggttgtttaccctgcctgtcgaacaatatcccgatattgctccgcctaccgttatggtaagcaccacgtactacggtgccagtgcggaaactttgcagaagagtgttatcgctccgttggaagaagctatcaacggtgtggaagacatgacctatatgacgtctaccgctaccaatgccggttcggtatctattaccgtctatttcaagcagggaaccgatccggatatggctgccgttaatgtgcagaaccgtgtatccagagctaccggacagcttccgggagaagtaacccaggtaggtgtgaccactatgaagcgccagaccagtatcttacagatgttttcattgcatagtcccgataattcgtatgatgaaaacttccttgctaactatatgagtatcaacttgaaaccgcagttgctgcgtattgcaggtgtgggcgatatgatgattatgggtggtgactacagtatgcgtgtctggatgaagcctgatgtgatggcacagtacaaactgattccgtctgacgtgacggcagcacttgccgagcagaatattgaatcggctaccggttcgttcggtgaaaattcggacgaaacttatcaatataccatgaagtataaaggtcgtctgattacaccggaggaatttggtgaaatcgtaatccgttctacggaagacggtgaagtgctgaagttgaaagacattgcagatgtggaattgggtaaggacagctacgcctacaaaggcggtatggacggtcacaatggtgtttcctgtatggtgttccagacggccggttccaatgctacggaagtaaatcagaacattgacaacctgttggacgaagtgcgcaaagacctgccgaaaggtgtggaactgacacagatgatgagttccaatgacttcctgttcgcttctatccatgaggtagtaaagactttgatcgaagctatccttcttgtgatcttggtggtatatgtattcttgcaggatatccgctccacattgattcctttggtaggtatcattgtgtcactgataggtaccttcgcttttatgtccgttgccggattcagtatcaacctgattaccctgtttgcattggtacttgtgatcggtacggtggtggacgacgccatagtcgtcgtcgaggcggtacagtcgaggttcgatgtcgggtataagtctccttatatggcaagtatcgacgctatgaagggtatcagtaatgcggttatcacctcttcactggtatttatggcggtatttattcctgtatcgtttatgagtggtacgtccggtacgttctatacgcagttcggtttgacaatggcagttgccgtaggtatctcagctattaacgctttgacactgagtccggccctttgcgctttgttgctgagaccttatattaatgaagatggtacgcagaaaaataattttgccgcccgtttccgtaattcgttcaatgcggctttcgatgtggtggtgaataagtataagaatgcggtactattttttattaagcgtcgttggttgtcatggtcgttgctggcttgttcagtagtattgttagtactcctgatgaattcaacgaagaccagtttggtgcctgatgaagaccagggtgtattgttcgtcaacgtaagtacggctccgggtagctcactgaagactacggatgatgttatgcttcgtatagaagagcgcttggaagctattccgcaaaagttgcatattcagaaagtagccggttacggattgctttccggacagggaaatacattcggtatgattgttatgaaactgaaaccctgggatgaacgtacgaagaaagaagatcaggtgcaggctgtcatcggacagatttatgctcgcacggcagatatcaaggatgccacgatctttgcaattgctccgggtatgattccgggttatggtatgggtaatgcactcgacctgaatgtacaggataagttgggtacggatgtgaataccttcttccagactacccagcaatacctgggtgctttgaaccagcgtcccgaaatctccatggcttattctactttcgatgtgcgctatccgcaatggactgtcgaggtagatgctgccaaatgtaagcgtgccggcattactccggatgcagtgctctctacactttcgggctactatggcggacagtatgtatccaacttcaaccgtttctcaaaggtatatagggttatgatacagtccggtccggaataccgcatggatgagtcttcattgcacaacacctttgtgcggatggcaaacggtgagatggctccgctgagccagttcgttacgctgacccgcagttatggtgccgagactctgagtcgcttcaatatgtataattccatatccgtgaatgccatgcctgccgagggatatagtacgggtgatgccattcgtgccgtgaaagagacagcagaaatcagcctgccgaaaggttacggttatgacttcggtggtatcacacgtgaagagaaccagcagagtggtacgacggtaattatcttcggtatctgtattctgatgatctatcttatcctgagtgcgctttatgaaagcttcatcgttccgtttgcagttattcttgcggttccggtaggtctgatgggtacgttcttgtttgccaagatagcaggattggagaataacatttatctgcaaacaggtttgattatgttgatcggtttgcttgccaagacagccattctgttgacggaatatgctgccgagcgccgaaaagcgggcatgggattgattgcttccgcagtcagcgcagccaaagcacgtcttcgtcctatcctgatgacggcactcaccatgatcttcggtctgttcccgctggtggtagctaccggagtgggtgctaacggtaaccgttcgttgggtacgggtgtagtaggtggtatgaccatcggtacattggcattgcttttcatcgttccggctttgtttgtcaccttccagtggttgcaggaacgtcttcgtccggctcagtccatgccgaccaaagactggcagattgaggaggagatggaagtgagtaagaaagaaatagaagaatcacataaatgataggttggcactggatacaggagtattttcattctcctccgccggaggaggggaattgagatactccggttgtgctaattcatcattttctaatgaaataaacaatataaataatgaagaaacaaatcatcgctttagctgtcgcagccttgctgttgagtagttgcggcatctatactaaatatgaacgtcccgaagtcaagaccgacggactttacgggcaggatatagaggtggaagacaccacctctatcgcctctctctcctggcgcgagttgtttaccgacccgcaactacaatctctcattgagcatgcactgcaaggcaataccgacttgcagtccgctcagtggcgtatcaaagaagcggaagccactctgtcatccgcccgtctggcctatctgccttcttttatgctgactccgcagggaggtgtcagtagctttgataaatcaaaaggttcctggacgtatagcggcatagcgtccgctagttgggaaattgatattttcggtaaactgaccaatgcgaaacgccgtgcaaaagctttgtatcttcagagcctggagtacgaacaagctgtcaccacttcgttgatagccaatgtggcaaatatgtattataccttattaatgctcgatgcacaatacaacgtctctgccgaaactgccgccaagtggcgtgagagcgtgaagacaatgcgtgccatgaaagcagcaggtatgacggatgaggccggagtagcccagaccgaagcaaactgttatatggtagaagcctctttgctcgaccttaaacagcaaatccgtgaagtggagaattcactttctattttactgggtgatgtgcccgacgccatcgaacgtggaaagttacagggacaaagtttcccggaagaacttaccgttggtgttccgttgcagttgctctctcgtcgtcccgacgtgaggagtgcggaactctcgctggtacaggccttttatagtaccaatgcggctcgttcggccttttacccttccatcactttgggaggtacggcaggttggacaaactctgccggaagcatgattatcaatccgggcaagctgttactctccgcagttggttcactgacacaacctttatttaataaaggattaaacatggcacagttgaaaatagccaaagcccaacaggaagaagctaaactttctttccagcaggcgctgctgaatgctggaagtgaagtgaataatgcccttacccaagtgcaggtggcccgcggtaaaacagagttgcgcgacggacaaatcacttcattggaaaccgcagtccgaagcacgcaattgttgatgaaacatggcaactccacttatctggaggtacttaccgcccagcaatcgttgctctctgcccaactgacgcagatagccgaccgcttcgatgagatacagggaattatcaatctctaccaggccttaggtggtggcagggaataaagaataaatcatatactctctcttctctcgtttcttcatccccttttatccttcacgaagtggagtggtgagaggggatatttttagtggtcactcatcactaatcacttattgcaggtactggtcgatctgtgccaccgttgcatctttcagcagtactttcttgtctttatccaatagatacaaggtaggtatcgctttcaggtcatacagattcttttcctttataacaagctttttatcatacccgtttatccattctttggggaagtccggtaggtgtctttcccattcttccttatcttcatccggataaatagccagtatttttagacttcctgctgcaaactccttgttgatggcaggtgcttgtttcagtgcttctatgccttcttcacaagcatgacatcccggattgttgataaacagcagcgtatatttagctttcactccgtagagcgtaccgttttttccggacagcagtgtataggtgaaatcttctgccggccttccgatacgattctgttcagccagttcccggcgtccttgcggaagtattttctccgtatcattcaatactttactttccagcatggcgtccagtaccggaatgtaaaattcttcattccgcatcggagaattcggatcatacagatatttttctgctaagtcagtataatagaagaatacgactttcttctgatctgccatcttatacatttgctttatggcagctatcgcagtagtgtccggcactatcttcaggatatctataaagtccacccatgcttgttccgtaacatccggaaggttgatataagtggtgtcggtaaaatccatattgtcccaatagtgccgtactagatagtccgcacgcaattcgggagtgttcagcatggctggtataagggggagcgtgaatttttttacggtgtctgcctggactgccgtttccttgttgtcgtttgctttccggctgccgcatgaggcacacaggatcaggaataggaggaaaatgttgagagaagttttcataattcaactacttatataatgtattgagagacaaagataatgtaaatgttttaattaccatttgttaagtatcagcaaatttatgaagcctacctttgccccgctttttttaaaacaatgagatatgcaaagggataatttggacttcaaaaacatgagtgtgagtaagttgtttacaaaacaactcttccccacgttgctgggtatggtatcatccgcattgttcactgttgtcgacgggatattcgtaggacgcggaataggcagtgatgccattgccgcagtgaatattgcggcgcctatttttatgatagcggccgggttgggactgatgttcggtatgggtggaggaattcttgcttccattaatctgtctcgtggcaaattggtggtcgctaatatcaatgtcacgcagtcaatcgtcatgctgacgattgtcagtatcattatgggaatactattgactgtgttccccgaaactgtagtaaccttattaggagccgaagggcatctgacggaattgtcggcggaatatctgttttggttctccatatccattccgtccacggtcttgctggtggcattgccgttctttgtacgcctgacgaatcctaactttgccatgtgggccatgctggcggctactgttgtcaatatcttgctcgattatatctttatctttatttttgagtggggattgttcggtgctgctatcgctactgatttgggagaattggtggggacacttttactcttgggttatctgcttcgtccctccgtatcggttcgttttgccaagctgaagatgagtatcaagagtatccgcctgacactgaggaatacatggtatatgctgaaactgggtgtttcatcctgtttgagtgaaataacgattgccgtcatggctattgccggcaattatgtgtttatgagccatctgggaacagatggggtagcggcttatagcattgtctgctatctgttccctattattttcatggtgtttaacgctatggttcagtcggcacagcccattgtcagctacaattatggttgcgggcagttgttgcggtccaataaggcgctgcgtttatgcattatttccgcggttgtgtttgctttgctgattagcggagtgtttgtctgtttctccggtgatatcgtttccttgttcttgccggaccggacaagtcatgcctggcagtatgcagttgctggtctgcctctgtttgctgtcgattacatttttttcgggataaatgtaatcacaatagggtattataccagtattgaacgtattaatctagcaatgaggcttacgttgctgcgtggtatattgccggtcttgttcttctttgtacttcctgcatggttgggagtgacgggcatctggcttgctgtggcggcgggagatattactacaacaatccttattgtgctgtgcagaaagaaagtttagtatggctgtacctatgaattattttcaatacatttgcatacaaaaaatatatttatcatgaaacgcaactccttcttattatttgtagcgattctcttcacttctgtttcagtttcttttgctcaaaagaaactctccatccttggagactcttattctacatattacggttatgtcactcccgacaccaacctctgttggtatggcgtaccggaagaaaagagagagaatgatgtgaagcgggtggaggatacctggtggtatattcttatcaatgagcacggttatcagatggagcgtaataattcctattccggttcaaccgtttgccacaccggttatgagaaagcggattactcggatcgttccttcgtaacgcgcatggacaacctgggtaatcccgatgttctcctggtctttggcggtacgaacgacagttgggcgaaggcccctattggaagctaccagtatgcagactggactaaagccgatctttacagcttccgtcctgccttctgccgactgatggactatctgactaaacgctatccggatacccgaatctataatatcacgaacaccgaactgtcggaagatgtaattaactctatggatgaaatctgccgccattatggagtaaccaatatccacctgcgtgatattgacaaacagtggggacatccctccataaaaggaatgaagagtatttgcgaacaggtttgtaaagtagtggaagaataacatataccccttccacaccgctgcgtccctttattcatcgggcatagcgtgtggaagggtgttttttgtggacttatctcgttacgatccgatcccggctgactccataatatcctgccgccggcacatatatcggttgtgtctttcttcctatattttctatctttccttccgcattcagccgtttcaggtgctccgctgctttagaccgcataaagccgcatatacgctggaaatcggcacgtgtcatcagttggtgttctgcaaaatacgctttcagccgcatatctatctctacatcagacagtttaccggagtgcccgctgtgcctgaagtttttcagtttcacgttgcccacctcgtccttcagcgcacggtcggcacggaacttgatacctttcaatctcaccttttcatttttccggtccgtctccctcgtgattcctttttcacttttcagtgtggggtagaaatagccgataccatccaggtgtacttgccgcccttccgataattcctcgcccatcacatgagaaagcgcgtcgagcaccgccgacacatcagtttcagtcagcgagctgcgtttctgtatttttcggcggatttcgtcggttcctacttttccattgagggtgatgcgtgcatggattgttgttttctcagtttcgtccgtttcattgttcggtaccggagtctcataccattcaaaaagtattgccattgtttgtcgttttacaattgatgatgcaaatgtaccatatatataagggaagagcaaattttgaacggaccattcatatcgtttgattatagtcggcaggctggctgattgcaatcaacaagcttgctgacagtaatcagtaagcctgccgactataatcaaacgctgcggatgccttatgtaaaagacgatgatcccatatgtgaaatcacaacaagatatacctgctttattagtgctgattagttgaatggatttctctaaaacgtttgcaaacaggccttttatgatgctaacttcgtagcattaatcactaaaatagtaacagaattatgaagacaaaattaatgcgatttattacctctttttttgagagttggagagaagaaaaaaaagtactggcaaatcagccggaatctattgtggagcacacggatattaccgttgtgcgttccacaaaccatcctgttgcggaacgtgtaaagaccgtgccggttagtctgacggatcaggtaaaccgcttcctgcaatctacctacgattttcgttataatttgctgacggaagaaaccgaataccgtccggcagatgggagaggagagccttttgcacctgtgggcaggcgggaactgaattctttctgcctcgaagcgcatgcacggggcattgcctgttgggataaagacatcagtcgttatctttattctaccagtgtacccggttatcatcctttccttctgtatctggacgaacttccggcctgggatggcattgatcgtcttgaagcattggcgcaccgtgtttcttctgatccattgtggataaaacacttccatatatggttgcttgcccttactgcacaatggctgggcataacgggaaagcatgccaacagtgtggctcctatccttatcagtacggaacaaggctgtttgaaatctaccttttgcaagagtttaatgcccgaaaccctgtcacgttactattcggatgaagtggagttgacttcaaagggaaacgtcacccgtaaaatgtcggaaatgggtctgctgaatcttgacgagttcgataaatatcccgcttctaaaatgccgttgctgaagaatctgatgcagatggcggagctgaacctttgtaaagcctatcagagaaactatcgcaacctgccgcgtatcgcctctttcataggcacaagcaaccgttccgatttattatccgatcctacggggagccggcgttttctttgtgtggaagtgaaggggaagatagattgttcccgcattgtgcacaaacaaatctatgcccagttgaagcaagagcttctgaagggtgcccgatattggtttacggcagaagaagaacatgaattgaaggagcataataagatgtttcagcgtcgcagcataatggaagaggtgctttatgcctgtttccgtcctgccacagccgaagatcgggatgaaatagtgcaacgcctttccgcggcagacattttcaaggttttgaaaagacagaatccagccgccatgcggggagttaattcgaatgcgtttacccagttgttggcgccattgggattttcccgctcacgtagccgttatgggaattattatgcggtcatttctttgtccgaaaatatcccttccacccgctaaccccgatgaatcgggcgtttcagtagtgtggaagggtagggatactcgctatgaatatggtaaaagctggtttgactgaggaaaacaagaatagatgctcaacggtttttagagaatcttttttgatgaaattcgaaacaaatgaatgcttttgttgttgaatgtgaaaaaaaacgtatctttgcaactgaacacgtgacatgtgatatctttcatggtttacatgtcctcttccggtaccagtaaaatgtggaaatttgactaaaaaaccggatgagcgtagcctgtatcagtcttggtacgggcttactcttcctgtttttagaggtatccacatacctactggtagggaagaagtaagaccccgtacttttataatataaaccattatagccgtatagggttgatttgaaacttatttaatcaaacactatatggctaattggctttctatacaagcagctgccgaaaaatacggcgtaactgagggggtaatccgggaatggattcggctcaattatttgacaatctcttctttaaagagggatccttttgaagatccggatccgctggtggatgctgacgaactcgatagagctcttgagttaaaatcgatgcaatcctatcctgacgatgaaactattgagcgaattccgagagggcatttagactggatttatcaggagaattcccgattagcaaaaaagaatgatgatctgcgggaagagaattatttgcatgttcagtgggaggctaagctaaaagctgatttagataaaatgatagagcttaccgagcgtttgaactcgttgcaccagaaaatagcggaagactataagtctacgctcagtagccgatttgatatttggtcttctttctggcatttactcttctccaaaaagaaataaagacctaacttgataactaatacctcacctaaccagtatatattgtttttttaatccttttcatcttgtgagtacggagtttcgtgaggagctccgtctcttttttgtatcccccccctctatttctatccatttctcctcctcccgggaggaggagtaccccgtagggggaggtggtaggtgagttaatctacctccctacacgcgcacgcatatataataatgtacccccttccagctcctttcattctccctttcaaacttatgttctgcaacatccttatcaatcagccatttacgaaattgtttcaaaaaagtttcgaaaaaaagacagatatgtttggagtgaatagatatatcggctacttttgcacccgctaaccaagagacggtcagccttgaaattgacattctgacagaaacggcgtaggaactccaacgtttttctttccttttagcctttattccgatcaggaatacagcgttctaaaagaaaaaagaaaaaaaacttccggaaacatttggaagatatgcttaaaagttcttacctttgcacccgctttccgagaagaggctgacgctgagtcggcttccctgatagaggcggcgctaagaacttcttcttcttttatctccctttcgc

SEQ ID NO: 6359 - DNA, 103660 bp, Unknown
  gut microbiota DNA sequence
cagttaatagattcatatattcaatattggaataataatactttattgtttctttttggaagtggtttagggtcaggaattccaacagatgtaagaggaatagaataccttttggaaccaacttattttgaattaatacgtttttggggtgtgattcttactccagtgacattctcatttttattatttgttccttttttctttttttatatgtcccataaatcatctgcatttgtaaatggtaaatatttgtttgtagcctatttactgtatgtgtttatagagataccttctaatcctttattaatgagttctactgggatgattgtgtatgttgtagctttatcctcttcttttcagatatatcaaaataaaagcaaattaaaatattcaagtatttatgattgatattttgttatccacgtataatggtgagaaatatttgtatgcgcagattgtgtctattcaaaagcaaactatgcaaaattggaggttgttagtacgggatgatggatcaacggataataccattgacatattagaatcgtttgcattaacggacaaacgtatcttatttctcaaggataataagggaaacttaggggttgttagaagttttgaacaattactgtattattctactgcaaattatatcatgtttgttgatcaagatgatgtgtggttacctaacaaaatagaacatacgttgcaagctattttgaaaatggaaaccaaggaaccagataagtctttactcgtttttacagatgtttttgttgtagattctgaactaaaaaagatttcttcttctttcataaaacgtgaagggtatgatgttagtgttgttacagatgttaacaggttggctgtttctaattgcataatgggatgtactgtgatgattaactctattgctaaacaatttgtcttaccatttagtaaatatactttaatgcatgattggtggattgggttgataattgctaaatatggaaaagttacctatttggatgagccgacatctctttatagacagcatgctaataatcaagttggtagtggtaaaataacttttttgtattacctgaagcgattatgtcaccttaatgctttttttgaggtgaactataaatatatcagaatgataaaagatttgccttttaaagtaaatcttttcacattgttggtaagaaaatggaaatattcattgtgtaagtttataaatcaattaatatgacaacacctcagcttattgcattttattttcctcaatttcatgctataccagagaatgatgagtggtggggaaagggatttaatgattgggatttagtgagaaaagctactcctaattttgacggacataatcaacctcgtgttccaatagataaaacgtactataatccgtgtgatcgggatacgttgaaaaagcagattgaaatggctaaaaaatttggcattggaggttttatgttttaccattattggtttgatggaaagctattattagaaaagcctttagaatcatttttggaaaataaagatttaaactttcctttttgtatttgctgggctaatgagacttggactagggcttggagtggaaagccagaatgtattttaataaaacaatctcatactcctgataagcttttgtggaaatcgcattttaactatctcttgccttttttaaaagatgaacgtgctattcgaattgataataagattgttgtgttaatatatcaaccttcgttgattgaaaaaggagatgaaatgctaaagtattggagagaacttgcttttcaaaatggacttggagatttgtatattattgccgttaaaaatcatcagataattaatcatgaggcttttcaggcttacgatggaatcttgaagtttcaacctagagaggcctatacctcagcgaaattttcatctgaaaataagattaatcatttttcttttttgcgtaagctaccagagtcaatactgaaatatttcaggatgctttatatgaattttaataattatcatatatatgactctagaaaaatctgggaaataatactttctaacgcatatttaaaagaacaagggcttgaagataaacatatctttgagagtgcatattttgaatgggataatactccaaggtatggtaagaaggcgaaaatatttactagactttcaaaaagtgaattgcaagagaacttggttaaattactgtcaaaagcaaaaggaaataattctccttatgttttttttaatgcatggaatgagtggtctgaatctgcttatttagagcccgataataaaaatggatttgaaaatttgcaaatagtctcaaactctttaaagagttttgaaaaataggaatgtgataatatgtataaagtattaataacaggtggatcaggttttatagggacaaatcttttgctttttttaatagaaaaatatgaaatcctaaatattgatattcgtgaatctaacctaacggaacttcaaaaatacacctcgatagtagatataactaattatgagaatttcagaaatgtagtaattggtttttctccagattatattatacatttagcagctaggacagatttaaatgggaaattcatttatgattattcagctaatacagttggagtatcaaacttaatgaaaattatccatgaattgccaaaattgaaaaagcttatagtgacttcatctatgttagtttgtcacacaggttattaccccaaaaatcaatttgattatgctcctaatacattgtatggggagagtaaggttgaaacggagaaaatagtatgggataataagcctcaatgtgattgggcaattattcgccctacctccatttggggaccatggtttggggttccttatcgaaatttttttgatatggtgatatcccgcaaatatttccatataggtaggaaaagttgtactaaaacttatggttatgtaggtaatgctgtatatcagatagagcaaatcttgtttcatgaaactttaaatgaagatcaaaaagtattttatattggcgacaatcctccaactaatatcgagatatgggcaaatgagatagcggcagagttaaactttgatataaaaagagtgccattttggatgttaaaaatcgctgcttatttcggtgatctgttgaagctatttaatataactttccctatgacttcatttcggcttaaaaatatgacaacggataatactattgatttgtcagaaacatataaaatagctcccaatcctccttgttctcgaattgatggtataaaagccactttacaatggcttaaaaaataaatcagataataatttatgaaagtctctcttgttactgttacatttaatagtgaccaaactcttcgtgatactattcagtcggtatttaatcagacttattcggacattgaatatattattattgatggtctgtctaaagataatacggttgaaattatccgtaaatatgagccgcagtttcaagggcggttgaaatggataagtgaaagagataatggtctttatgatgctatgaataaaggtattcgtatgtcgacaggggatattgtcggtattattaattcagatgatttttatcatcggagagatatcatttcaagggttgtagaagcttttcgaaatgagcggactcaagcggtttatggagatgtgcgttttgtgaattcagataatttggataaaactgtacgttattattcatcccgaaatttttctcctaatcgttttcggtatggttttatgcctgctcatcccactttctttacttatcggaaatattttgaaaaattcggatattataagattgattatcatatagcagcggattatgaattgctgattcgttttctatatgtacatcgattgaagtcaaaatatctttctctggattttatgaaaatgagaactggtggtgcaagtactgcctctattaagagtaatattttactaaataaggaaattgttcgtgcatgtagtgagaatgggatttggacatgcatgccattgctgtttctaaaatattttataaaagtgtttgaattgtttttaacgaaagaataatgaaaaaagtagcattactaactggaatcactggtcaggatggttccttccttgccgagtttttaatagaaaaaggatacgaagttcacggtatcctccgtcgttcgtcttcattcaataccggtcgtatcgaacatctatatctagacgaatgggtacgtgatatgaagcaacgacgcctggtcaatcttcattatggggatatgacggatagcagttctctgattcgcatcattcagcaggtacaacctgatgagatctataaccttgcagctcagagccatgtgaaagtttctttcgatgttcctgaatacacagccgaagcagatgcggttggaacactccgcatgcttgaggcggttcgtattcttggtttggagaagaagactaagatttatcaagcttctacatcggaactttatggtaaagttcaggaaattccccagaaagaaactactcctttctatcctcgtagcccatacggtgtagcgaaacaatatggcttctggataaccaagaattaccgtgagagttatgatatgtttgcagtgaacggtattctttttaatcatgaaagtgagcgccgtggagagacttttgtaacccgtaagatcactcttgcagctgcccgtattgcacaaggttttcaagataaattgtatttaggtaatctggacgcacgtcgtgactggggttatgctaaagattatgtagagtgtatgtggttgattcttcagcatgatactcctgaagattttgtaatcgctacaggtgaaatgcatacggttcgtgaatttgctacacttgcctttaaggaggttggtattgaactttactgggaaggtgagggtgttaatgaaaaaggtattgatttgaagaccggtaaggttcttgttgaggttgatcctaagtattttcgtccttgtgaagtggaacaattattgggtgatccgacaaaagcaaagactttgcttggttggaatccaacgaagaccagttttcctgaattggtgagaattatggtagcgcatgatatgcgtttcgtaaagaagctatatctcaaatcacagatcacggaataaatttttaaatcttccatgaatatacttataacagggattcacggttttgtgggttctaatctcataatggccttatgtgaacatcatactctctatggtcttgatatcatttctccggaaaagaagggagttgtgaggactttcttgtgggaggatattgaaacgacttcttttcctatgcaacgtttacctcactttgatgccatcatccatctggccggtaaagcacatgatacgaagaatcaatctgcagctcaggtatattttgatatcaatacgggattgacgcgtaggatctttgatttctttttggagtctgctgcccggaagtttatctttttcagctctgttaaggctgctgctgacagtgtagtgggggatatactgagggagaatgtgatacctactcctgttggtccttatggagagagtaagattgctgcggaggattatataaaggaacactttgttttatctgataccttttctgtgaataaggggaaaatgttttcattcaaagaagagattgtgagatactctgataaacaggtatatatacttcgtccttgtatgattcatggtcctggtaataaaggtaatctgaacctactttataatgtggtaaagaaaggtattccttggcctttaggcgattttgagaataagcgttcttttacttctatagataatctttgctatgtagtggaaggtttgttgacaaaagacgtagcgagtggtatttatcacatgggggatgatgaagctctgtctacgaatgagctgattgctcttatgtgtgaagctatggggaagaagcctcacatttggaaaatgaacaggaaaatgatggaaggttgcgcaggactgggtacattgcttcatttgcctttgaatatagaacggctgagaaaactgactgagaattacgtggtaagtaatgagaaaataaaatcagctcttggtattgacaggatgcctgtttgtgcagcggatggaatcagaaaaacgattaaatcttttgaagaataatctgggcagataattattgactataggatgtattacgtaattattttggttctgttgttcctgacagaacttttttattttagggtggctgataagtttaatatcatagataaacccaatgaacgtagttctcattcacggattactttgcgtggtggtggaatcatcttctatttcggagctttggcttatttcttgactaacgactgggaatatccttggtttatattggcattgagcctaataacatttattagctttgtagatgatattcgttctacttctcaaggcttacggttggtatttcacttttctgccatggccttgatgttttatcaatgggggttgttttcgctttcctggtggtggatcattatagctttgattgtttgcacaggtatcatcaatgcttataatttcatggatggcattaatggtattacaggtggttattcattgattattttaggagcattggcttatatcaatgaagaaatgctatcctttgctgaaccagctttaatttatacggtgctttgttcagtggtggtattctgcttctttaatttccgcaggaaggcgaagtgttttgccggtgatgtaggttctgtgagtatcgctttcatattgcttttcctgatagggaggttgattctgaaaacggaggatttcagttggatgattcttttggcagtttacggagttgatagtgttttgactattattcatcgcctgatgctccatgaaaacataggcttgccacatcggaaacatatgtatcagttaatggcaaatgagttgaaaatacctcatgttgtggtttcgttggtttatatggctgtgcaggctatagtgattattggatatatctattgtcagaattggggatatttgtatcttttatgcgctattttattgctcagcttcatttatgtatggttcatgaggaagtattttagattgcatttatctgtttaagtgagataagattcatactggttcccggcagacaattattgtcttgtcgggattttttttgtccataattgagcaggtagcatcagccggagttatccggtagatgctacccgggacaagtaggctttaaagttcaaatttcactgccgcccaacggtttttctcttgatggtgtacaaagtgtaatccgttacgttcggcctctgcctggatcagaggaatgtcgtccacatagaatccactcataaagagttgggaacctttgcgcatgcaacgtacatactgtttcatgtcattcagcagaatgttccggttgatgttagcaatgactacgtcaaacggacctatatcttctagtgaagaggcgtctccctggaatacggaaatattgtctacgtggttcaattcgatgttttcaagtgagttacgaacgcaccattcatcaatatcgatggcagtacaaggttctgcaccacgcatgcgagcaagaatggcaaggatggaagtgccgcaacccatatcgagaagggacttgccttgcaggtcactgtccagtagttcaccgatgatgagactggtagtttcgtgatgtcctgtaccgaaagccatttgcggattgatgacaatatcatattctgtttgggggacatcatggtggaaagtactgtggatgacacagcggtcaccaatcacaatcggttggaagaagttcttttcccattcctcattccagtctttatcttcggcttctgtaaaagtatatttgatttggatgtctggtagggggaactcgtcaatagctgcttttacagttgtttcatcatacaaatctttttgtatataggcagcaataccgccttcttgttcaacaaaactctcaaaacctgcatcgcccaggatagcggaaagcacatcgtttactacttctgtacaaggagaagtgcggaaagtaaattctaaatatttcattggaatataatttattgttaaatgcaaagcctctgttagcgaagcgaaccagtttctttgtatatttgtttattagctgcaaagataatgcaaatcgaatgtagaactttcatgcttgcatgaaaaagttatgctgagatgcagtttgtcttatttaaagatggggcatttaagaaattctattcatctttgaaaatttttccatattgttttaatgccatatttttcatgagtgtttcttcttttgtcagtgcgaatcccatatatttacaaacgtgatcattgcgtaggatacagatacacattcttttgtaagtcggaatttccttgaactctgcaatatcaatatcatccaaataatccatcctgacaggcttcttgtccgttttgtagtttgtactttctcctacttgaataggaatatttctttctcttagtttctgtatcacttcgtcactgagtacaccgcccttattcttccagaatctgatgcttgtctccaatttcttccggtatctgttccgggtatgttcaggtagagtagacagaagaaactctgtaaaggatttccatgtatatcctttgggtaaatgtatctcatctcttcccatggctccggtttttccgtaaatcccggaaaaatttactccgttaacccggccaatcatccgtccccacatatcgggatcaatcactctgtacagtgacaggctctctatggcttcgcagataaaaggacttgctacccgttgtcggtcaaggctaattcctgcttgataataaagatcgtacagatgattataatcccacttgaatttaccatttgctacccagatatcagttgttttccagtcaaaaataggatagaggttataaacaccttcagtaatttgggtactccataggtagttggcatatcgttcctttgtttttctgtaaatggcacgccaacgattatggctttcctgtgtacgaatgccaactaaacagcatgttcgggtagcctttttatttttatgtagccattgggcaaattccatttgaaaatcataatcccacatgtcggtagtgtagaaagggaactcatgtaatgtcattgccctctccggtttttggcgtacccagactgcttttttgtcttcatcccatggcctccaataatcttcatacatggacgtacatgtcgttactcgaaaaggtacgcaaacatgatatatatccaggatgtcttgattctctttaaaagttcgttccacataatcaattgtcatgttgtactgtatttcataatccatatgaaataccccaatttttctttttaaattatgtttgcggatataatctatgcataaatttaatagtacaccgctatccttgcctcctgaaaatgagatgtaaatattatcaaaattctgaaaaatgacacgtaatctttcttgggcaaggtcatatacgttttgctttcttatgtcttgcattgtttttttagtattgttcgtttatttgctgcaaaagtaataaaaaaagatcagatagataaaatgtataaacatatacaaattccggagatacttcctaatccgattctccctgctgacttttacatctcgtatagcctttatctcatcagtagatagccagatatcacgcactgatttctccggtattttatatccgtcaaacggataagtttcatgtgttataaacttgcactggagatttaatttagtgcattgaaaaccaaaataatatctcttttgttctaatagaatagggaaatccctataatcatttggggaaattctcctgtatgcagtaaaatccatcgctatctttgtgacgtgataaaatggattaatgtaaaacctataaaccacacccatatgaaaaagattgtttttttatcgctttttgccttgtgcctcccttggatggtttcggcgcagagcatagatgacgacctttactacattccttctaaggataagaaggaaaagaagcaggagaagaaagttacaagctctgctccgactgaagaaattgtagtaaagtcgaatgcaccaactacggtttatacgtcgccaggtaatactactgttgtagtacaggatcgtaaaggaaatacacgtgatgtagacgaatataaccggcgttatgattctcgtgagaatgacttcgtaatggaagatgataccttatatattaaggaaaaagcagtgcccgatccggatggtgaatgggtaaatggcttcgatggttcggaagatgattatgaatatgctatgcgtatcgtacgtttccgcaacccgcgttatgcggtgagcatcagtagcccgtattattgggatatcgtttacggtctgaattcatgggactggaacgtttataccgacggaatgtatgcgtatgctttcccgactttctctaaccgcttatggtgggattggcgttataactcctacggatggggaggctatccttattatggttggggtggatactcaccttattacagttacggtggctggtcctatggctggggcggtttctacggtggctggagttggggatggggacatcatcaccatcattattatcctggcggtggctggtatcccggtggcggtggacactggggaggcaaccattgggggagtcgtgatacatatacgaacaggcgctacagcggaacacgtcgtacgacaactgcacggcgtactgacggaactggtagagtgacaggtgcgaccagacaaagtacaagtggacaagtaagacgtggagaaagtggaactacccgtcgggtagtgggaacccgttcttccggtgaacgtccgggaatgtcaacccgcacagatgcagcttcctcaagacgttctacctatacacgtccaagtagtacacgtagcagctcttcttataatagcaatgtaggaaatgtacgtagtggtagtacggttcgtggtacttcaacgagatcatcttcgggaagtagcggcactgtaagaagtacttcaacacgtagtagcagtacctataaccggggtagttcaacagctccacgcagctactctaatgataataatcgttcttctagctcacggtcttatagtgctccttccactcgttcttcttccagtagcagttattcatcaggaagcagttcccgttccagtggcagtagctattccagtggcggtggaggttccacacgttccagtggtggcggtggcggctcaagcagaagaagataaaagttaagtgtttcacacaaaaatgaatgaattatgaaaaagataatgactctaacagcccttgctatgttcgtctcaatgggtgcaggggcacagacggtatacgatgctacgaatatagccagtaaagatctaagtggtactgctcgtttcgtaggtatgggaggcgcaatgggagcgttaggtggtgatatttccactatcggtacgaaccctgcgggtattggtatctatcgtagtaacgatatagtagcatctttcggctattcgattacagatgttgaaagcaaatatggcggacagacatttaatatgggaaaaaaccgttggaactttgataatgcaggtgttgtgttttctaccaaggttggtaatgttacgtcattacgttatgtaaactttgcctttaattatcagaaagtaaagtctttcaatcggaatatgactatggcaggagacttgaatggttattcgcagacctatcagatggcagctatgtccgatgggattacaccggaaatgtggaagggtagtaatccttttaatgcaaatgatatcggatggctttccgcactgggatgggagggacacctgataaatccttcaataactactgataagacaccttatccttataatgatgccgatggtaatcaaataaaggatgaggaaggtaatcttttatatgagaattataatttctacacaagcattttaggagacggtgactatccttatttacgtgaattccgttctcgggaaagtggaggagtaaatcaatttgattttaatgtttctttcaactttaatgatcgtttctatcttggctttacgataggagcttatgatgtggactataataagtatacattatatgatgaagatttccgtacaggaaatgaagaaccgacaggttccggatacatcttggaaagtttcaataaagtaagtggtgccggctttgactttaaacttggtgctattcttcgtccgtttgaggattcacctttacgtctcgggcttgccatacataccccgactttctataatttgacatggtctacttcagcccgtcttgtttccgatctgtatcagggagataaggttgtatctacaacggtggatagttttgattatttgaataatggagatttgaaacaagaatatcagatgaacactccatggacttataatctgagcttgggatatactgtaggaactcaattggctttaggtgctgaatatgagtataaaaactactcgacaactaagttctattattctgatggtgataagatggaatggcaaagtaatgagtctaaactctgtttgaagggcgtcaatactttccgcattggtgctgagtataaagtaattccacagtttgctttgcgtgccggatataattatagtagctctgctttcaagaaggatgccattaaggcattgcctatagagtccattaatactgatacggattatgctaatcttaagtcattgagtaattacacactgggtatcggttacagaggctctgcattttatgccgatttagcttacaaatattcagtacagaaaggtgatttttatcctttcgattcttctcaagatggcgaagtaggacttactgctgctaagttgactaatactcgcagccaggtgatattatctttaggtatgcgtttctaaaagaataacaatataagcaaataacctttcattgcaaataccttgtgtattaaattcgagtccccggagagatagcagtactccggggacttttcttgtctaatttcttaatactctattttatcttctttctcagtccatgcttcgaaagctttgatggcttcattgtgtagcaatacttctgagggtagtttgcgatcggcaggttttaaagcgatttcatcatatatgaaagagtcgtcgaaacctatatttttggcgtcagtcttgttgtttccataatacattttgtccagtcgggcccaatagatagcgccgaggcacatggggcagggctcacaagaggtatagatttcgcaaccactgaggttgaaagtacctagtgacgtggctgctgcacgaatggcactgacttcggcatgcgctgtcgggtcacatgaggatgtcacacgattcgttccggtagctatgatttctccatctttggcaatgacggcaccaaatgggccgccaccgttagcgacattctccgtggagagctcaatcgcttttctcataagttcttctttggtcataataaaaatgattatttaattctctgtatgatgcgaatgatgtctattcccccaactccttatttcgtagaccggcatcaatatctatgagaatctgatgtaaactagcgagtaggggaggaagttctttgctggtaatgtcgtagatcaattccggatctattgagagatattcatgtgagattatattacgcattcctataatttgtctccacggtatttcgggataatgagagaaaaggcatccgtgagtacggtcatctacttgtcggatcgtttcaccaatagtttgcaggcacatacacgtcgaattgaataataccatgccatcgtctgaattgagaaaatcctgataattgcttatccgaacagtggttttgatgatgaatgctgtttggctttctacaaagcgaagcatatctattaatgcttgtttagacgtagattgcatcttgttcaagattatgccggaacatttggcgcatgttctcatgcaaggttattaaatcaacttttgtatgaaagaggtgttctaattcttccttgatcgtcatataggcacgaaaggtggttttgcgtagttttacgcaaacatcaatatcgctgttctcccgttgttcgccacgggcagctgaaccaacgagagcaagactctcaatgccgtacttgtcagcggttgtttgcttgaactcgtgcaggatggcgagaatttcattagttgttttcattctatttttcctttcttgctgttaaaggagtagcgatacaaagatacaattctatatagacaaaaacaagtctgccccacagtttttgttgtgaggcgggaaatgaattattaaagttttatgctgtcaccaataccaacctatgcctatagaagccggatagagttcgggtcctttattcttttcaaacagagaagtgagagcgaaacgggcattgaatcccaagcaaccataaccggcctgtagcagcagattcatgccaagcggatgggtattcagcttgctactcaaagtatgtttcttatcatcatatttggctctggatttaacccctacacgccattccacttccggaccagcggcaatgaaagcacggcgactgccgaatttggtttgccattccagactgacaggcagacggaaagcccaatagcgcagccagctcttttggtaatctacatcttcggcttgccggcaaacggtgatgccgtctactttctcaaagccgtaattgtcatccagtttatagacgatacgtgctaaaccgagggtggtggtcaatccccaatgattgttacgggttatggcaactccggtattaaacagattgataccccattcccaggatttcgagccaagttgaggtactttggcagagtactgaaatgtattgcttgccagtttgttaaagccgaagtagatggcagggtagtgaggatcaaagcggtaatagccttttttcttcttcacgaaaggtacggaaaccgttgtggttcgttcaatgctgcggccgtccagatacacaccttcaaatacctgggtgttttcgatggtgtcattgtcggcttttgcctcatacattttcactttgattttgccatcatgttctttaatgatgatcttccgtccgttgagatagagagttgtatcttgcgggatgctttcttgtgccacgactgtcatggaagtcatgataaggaataaaaagaaaattcgtttcataagttttattatttgtgatttataaatttcagaattagtctttgctgaatatcagtgtaacaaggtcgtcactgtctatttcgccttcgatatagataagtgtggcttctcctttcttgccgagccggaatagtatgaagcggtttattttatcttttaccggaggcaactggtagtatcccgattgaatatgcccgtctgtcaccacttcttttattttcctggcatgttcccggtcggattccagacaccggtagatatccggtaatgccttttctgcctttgtcagtttcaggctttggtaatgggtgatgtcccaattcttggataacatcttggacagttccacgtaagtggcccctttctcattgccgtatttctgaaatacggatgctatttgcagccctttttgggcgtacatgccggtactgaacaagagcagcaggcagcatagcagggtatgagtgaactttttcataattgtatctattagttctttttattattcaaacatcagatcaagcacttcatcttccgtagttcgcatatctcggaaagcagcaagggcttgttcatgcaccaggtttgcatccgtgtattgcttgccgtcgataatgacgtaattttccggagtggggtgaaggtatcgctgcgtaccggcaatgccgatcactaataaaattccggctgctattcctcccgttgtgtaaataaagcgacggcggaaggaaggctttttaacaggagcactttcttgccggaatgcttttgcttcctgatccaggcagacaaacaagggacggtatacttgtaacgattccggtacattttcttgcgtgaagaaactgcgtaattcgcgttcttcctcacatgaggtctgtccttcgaaatagcggtctattaattcttctatcttcatacttgtttcctccttattttttcttgtacggtttgcaggtaaatttctctcactttctttcgcgctctcgacaggttacttcggatggcttccggattacagcctgtgatgtcggcgatctcttccgtttcatactcctcgatgtctttcatccgcatgatggtgcgctgcaaggtaggcaatgaattaataatttcatgcatcagacggatttcgtcttttatctcaagcaaccgttccggtgtcccaccgggagtggcatcctgtacatactctaacggtacgctggcggtatgcctggtgcgccacatatccatgcagagattatgtgtcatggtcatggcgaatgcttcaatgttacggtactgttccagttcaagtcttttgttccatagcttgagcaggacttcttgtacggcatcttctgcatcgtccggactttcggtcaacttccgcgcataattcaatagcttattgcggaggggtagaacggatattttaaattgtttgagttccatttacattactaagacgaacgtgtaaagcgaacgtgacatcaaaaataaaaaaaagtgttgcacaaagcaattttttgttttgctttggcaacacttaccatttggagagaatctgaactacttgagtgattccatatcacttcatgcaattataaggtcaaccggacagagactatgctgttaccggacaacagtacatatacaccctcgccagattccagcatctcagtactgataacttccatatttttgttttcattggtttcaacggcatttgcacgcttcattcctgccaacggtatttctatacactgggtggctccggtgaaattcagcaatacaaccgttacttcatttcctgtttcattgatgtaggctgtggcacatattcctgtattattcgtgacagctttaatacgggtagtacctgtggcgtactgcgcgtaatgggccatgatgtaaccattcttagcaatttcaccttcacccaccgggctgcgcttgtcattatcgcccatcaatccatagaagcgctttaaataccagtatacgtatgcactgcaatagccctccatacacatgtggatttctttgccaagatggttgaggcagtattgccacttttggaattcccatgctgacggatcatctgatttttctccgtcattaaagagatgttccgtcatccaccaggtctttccatggatgcgagggtagagaccgcagatgtaatcgtgacgatttttgacgtatccattatccaggtctgtaaaaccttgataaaggtgtcctgcaataatatcggtctgtgcaaatgctccggcatcattgatgatcggatccgtgtattcgggtggtgtaccacatgcttcgggagacatcagtctgactccggtttcacggattttggcaccgtattgtttcacaaaatctaccacttcctgaggagtccaataagtaaagtccatatccggttcattctgaacagatatggcataaagatctactccattctgtttcatgaaattgatgtaacggataagatgatcggcgtatgctccatagttctcttttttgagatgttttacttctttgccgttcaccttgatttgctcggagagagcatcagtacagtcccacggacatgcaaaaactattgctccattggcctgtgccgctttagccgcttctacatcagcattccaatcagattcgttgggataaaccatcaggcgaagaatggagtagcccaatccgccttcaccatacatttggtctaattgtcgggcagaaatgaggtttccgccacaccaaattttaggattgtacattccaccgaatcctgctatcggctgatattttactgtagggtcaatattaagtgtaacagacttgaacgccggttcctgttctatcaataaatcggtagtctgcttgttggttaggtcagtaatgtgaatagtctgtgtacgttgtttcattgaagcgttagcattgcaaaccacttgaatttttgtgtactgcttttctctatcactgcttccacctgacatcggagttatactttttacaatatctccctgttcgaaggttatctcccaggaggtttttgcccactctataacgacctctgtctggttttcaccggcactcactgtaattgacttttttaggaagagcgcatatgcgcccttcccgttatcatcagtctccgcattattattatcagagcatgcccaacatgacattcccatcagaaaaatgcatagatttctaataaatagtttcattatacttcgggttatttcaatccttcaactattccttcatacattccatttcgattgtatcccgaagtccaagggcaaatcttgttaccggtactagtttcggtcatacttgaaatggatatgccatattgcttgtccgatgcgatagttttccgatattctttcatgatgaaagctatatagttggctgcggcactccgttcatcggcggtcagtttactggtctggatgaacttaccttctgtatcttccaccatcatgctgaggtcggatacacgtatcagtttaccggtctgtgccagcttgtcgaacaatccggaaatcatctcttcattggctttctgagaagtggcatctttggaataaaccgcatgaagaaggatgttgtatccgtcaatacgggttacatcatctgcttcccaggattttaccaatgcgatcaattcatcggctttctgtcccatctcatcagattgattgaaagtattgctaacgaagaggttgagatcaatttttgctgtgtcacgtgcttgttttacggctgtacgtgcatattctacttcgcccaaatattcaccccagttgaaggtgttggcatccatggttttgtcaagtggttcgcctacaatattccatacttttacagattcaccaccggcatttactataccaccgatccatttattcatctcttcagtgaagatattctttttctcttccggagttttctcgatgatggtatcatcagctttccagtggaggttgatattatcgatgtaagcatgccactcacccgagcctgaacctacggccagctctatctcggtcagatctttcatggaattgggtatagcgatttttcccttacctgtttcttcaccttctttcaggaatgtgatataaatcttgtctcgtccccatttgttagcttcacaaccgaagttgaacggtccttggccgcagttgaattcttgtccattaatcactacccgcatgccgtcgccccagccacctttaccatctatcaggtacatgtcgagagaaagacctatgtagtcacctaacgttcttccgttttgcaattttactgtgaatttaggataagatctattgcaaggggtagcagctgtacctacgtgtaatactttaccactgccttcaggatcattttctacaacggaagagtttccgttagtcatcggataagacgttccaagttcatctttttcaaagtcaattttagtaacacctgttccgggaagctcataattcatcacgatgttatcgagaaaatattgtgctcctccagaagcggaaccaacggcaagctcaaattcagtaagtcctttcatttcatccggcaatatgaagcctggagctgtagcgctatttaagctgatgaccgctccacgattccaagtgttgggattacaaccaaaagttttagcattcataccaacgttgaactcttttccattaataaagactctcatacctgctccatatataccgtcttcgtttacaatacgcatatcaatggtcagattgacgtaatcgcccagttttcgaccttccggtaacttgacgttgaacttaggatgtgaataggcagccttgttatcgtcggtacctacatgcagtgctttaccactcttcccatccgggtcgttttctaccacagcctgacttcctccggtcataccgtaagctttgcctagttcatcattctcgaagtcacaaatcacagttttacctttctcgggtacgaagggaataatgatgggctgtatcagttcattataataagcggtgcgttgtccctgattggaacagagcgtaccaccataaagcgttatgtccgttcctttgacagcatcagctactaattgcattccgccaaaatcgaaggaaccatcctctttcaatgaattgacgggagtgatagaaccgccaatatctatgccatcaaaattgctaagtatggtgctgtaagcaatgtctttctttaaaaagtctgttgaagacaagtttgccgtaaacttgaacggagaactggcatcgcgggtaatgtacgatttcagcaaatcaaagctggccaggtattcgctattggccacttcttcaggcttttctacctgaaggttgcagtcatacttatcggtgcatgccataaccgttgcacacatcatggcaataccgattatcttatgattaaagtatttcatgttttctttgtttaaacgtttataccagataatactatcttatttctatctcgaatgacttgccaccttgtacggcacgactgcttaacaccaacgtatctttggtggcgtactgcatgtttttggttttaaagtcaattgtatagtccagatagatagcattacgatctttaccgccaaggctgttcttttcgcccttcttcacaaatttaccggtaccggaaatgataagatcatcggaagtactacctactgtgcaattaccatcttcggtaaaagtcaagctgaggttgtaattgaaaagattaccttgtgcatccttggttgataaggatagaatattgtctttcaggctttcagttgtaatatttactttctcatccttctctacatattgctgatggcgtaccaattgcgaagaaacgccgtttatcacagcttgatccactccacgacgcaggtactcaccatgccagggattgacatactttacagcataaagtacaaaattcttgggttgtacactccagtcgccactatttgtcaacatggggtttgctacgactgccttaccctgaaggatggagtctgcaccctgtacgcctgtcatcttcagaggaatcacgtaataattatcaagagtctttttatcggcaaagaatgcatcggtaaactgtacctccacaccacctataacttcacccttgggaatattgatctggttggcggccagggtgtagtaggaggtgggcataggggtaacaggagtgttacttcctttgaaatagaggttttcgcaaagcgattcatctacctgagtatcaataattacattcttgcggttggtataaccaccaccccaagctgctttaatggatactttgtgctgattatccaaagagttatcgaggaattcgtcttctcccaattcaatggtacgcaaaccatattgattggcaaaatatacagtttgataatcgaagtcggagaattcattgtcagagctttcgcacgcggtgaaagacaagagtaatgaagccagtccgatatatgctaatttctttttcatatcatgctattttattaatagtgttcacaattttgtttatttccatcctttattctggatgaggttgctgtacttcagtatctcagagttggggatagggcaacagtacatataatcttcatacgaacgttcttctacggttatcttctgatagctgttaccattccagctaatgccatataccggttcgttcaggtcggctttccagcgacggagatcccaaaaacggaatccttcgaagcagagttccaatcgacgttcgttgcggatcagttcgcgcattttgtctttgctggcagcgcatgcttccagataggcatcattggtaccacctatgccggcacgtttccggatggctttgattacatcgtaagcggagtaatctctgccgttggcgtttttcggtccccaagcttcattggctgcctcagcataattcaggtacatttcagtataacggatacggggtgtgtaatgcggctgtttggaaatggatgccggattacagttcacatccatgcgcaagcgttttctcatgtaatagcctgttcgggtcgagcggttttcggtcacgttaacaccgtcttgatttccctcattgatgttgattgttatactcttctcactgattgtacttccattgtaaaagatgtatttgcccaagcggggatcgcgtccagcataaggattgttggcatcgtatccgctggctgcgtcattgatggggtatccattggccatagggaatatatcgaccagattctgtgacggattcatataaccattaccgtacaaacttggtgggaaattttgtgattcctggtcgttatcaccacttcctttgtttcctctccataagatttcatttggattggcaccatccttaattgtatttataatagtaggtgagtaatattccactccgtcggatgctaatcctgatagacctcctttatagtctattacagcagctgcggcattagcggcatccgcccatgtggcagcgttggaagcatcttcaaagaagggactggcagccagtacggctgtgcgtgtacggaaggcacgggctatgattccgttatacaactgacgtgctttggcacccataacggtgttgtatttaccgacgtcttgtgtgagactctggaaatctgcaggaacgcttcctgaaacatcttcatactcataaggaagtcttttctctgcttcggaaagatcattgtagatttgttctacacaagcctgaaacgaagcacgcggttgattgaaatccgactctattgtctgaggttctgtaaatatgggtacaccgagcagttcgccatttgcaccaaaaccggcatgggcacggagcagataaaaatagaacatcccacggagtccgtaagcttcgccagtgaggcgttgcgcaaacaatttgttcagttcttcatcatccgaccattttacgcctcccacatgctccaggaagaggttgatgtattgaatggcaccgtaggaattggtccactgattttgtggattatatgaacttgtagtccaggcaccggtggccatttgcagatacacattacttggctggttggttacggcgtcatccgtgccatactcgctgttatcgtaatagcccggaatcagactgtatacattgtgtaatattccccgtgcgtattccgcatcgttgtacatgttttccacgccttggaagttttcgatggctggtgaaaacaaatcatcacaaccggtgagcatcagggcacctattataaaaggtataattttctttttcataatcttcttctttattaatcaataaaatcagaatgcagccttgaaacctgcatagaagttacggcattgaggggaaccggtactcagctccatatgcttccgctctttagagatggtaagcagattgctacctccgcaataaacacttaaaccacgaacaaacgttcctttgaaagtattttcagggaagtcatacgtcaactgcacttggttcaggcggaaatagttacgcttatacatccagaaagtggaattgcggtagttattgtcaccattggtggtggtcagacgtgggtaggtggccacatcctttgtatcttcggtccaacgtccccataccacttctgagaatttgctcgtaccgcggttccagtagtaggaactgcttttaaagtctacagaaccggtctgacctgatcccatggcaaatagcgagaaatttttccacttcacagttaagttcaatccgaaggagaaaggaggagctgaccaaccgttctttcctaattcaatttggtccttgctgtcgattacaccatcctcgttaatatctttgtacttcaggtcaccgggctttacagtaccaaatgtttgacgggcatgattgtctatgtcagtctgatcttggaagaaaccttcgcatacataaccgtaggaagcatcgagtgcacgacctttgcgatactggtaatcttcgtcgtaaagttcgtcacgtttcagagctttagaggagtacaccataccattgaaaccgagtgttacgtcaaagtcgccgaatttcttgttggcactcagcgcgaagtcaaaaccactgcgtctgtcctcgttataattgatccagggcatgaaagtggaattgctgcttaaagcaaaataggaaggatagatagaagatgaaccttgggtgagcaagcctttcgtatcttgtctgaagtaattcgcatttattttcagcagacggttgaacagtgtggcatcaatgccggcacggaactcttcacgtgtgatgaaacccagattggggttatcaccgcgtttggaagccggagtccatccgccggctgttccatcatgccattgtacatagaagccctcgtttgttcttttggagaaagtgcctttatacagataatagtcggtgatatcgagatcctgatgcaggttggcataagaagctgtgattttcagatcgtctataaactttacattctccataaacttctctttgctgatcctccagcccaaagtgactgacggagagaaagcgttacgcttgccttcgggtaatttggccgaatggatcacggcaccactgaaatcggcataatacttatgattgtaattgtaggatgcccgtaagcctaagttcacattactggtacggtgataatcactgctttcatgattttcgtcagcagaattctgcgtttgataaccccaacctatgaatgtggctgctacgttgtggtattttgcgaaagtgcgggcatagtcaaactgtgcactgaacgtcatggtctgatcgtaagtggacttgccgacatattcattgggatcttttttgtcttcattgtgcttcttcaaggcaataatcatatccttgccgttcacctgagaccatgtaggttcataaacggcgtaggtctcgctgaaagcttccgaatagtaagaagtatagtctacactataagaagtcttaaacgtcagacctttcaagaatgaacccagatcagcggcaaggctgacatcgaacataaacatacgtgccttttccttaacatatccggcagccagaagatcagcaaaaggattggtcatgtcggaagaagttcctccaagcagatatttgccgtcaatcaggtgattactgttggtaatatattcctgtatttgagcgacgctggtatccatcatgtcgatgggtaataacggggcaaaccagttgggacgcaaggtggatgcggttccccaaaagtttccgcgacctgcatactgattggtaaagacaactgccgcattggtagtagcctttagccatgaggcaagtgtcatgtctacgttaccgcgtacattgaaacgcatattgtaggcattctttgattcaccatatttcagcaggtcgttactataatccataccgaaattcaggtaataatgtgtgcgatcattacctccatatacttcacctgtcacatctgcattataatatgcctttttcagatagtccgaactatagaaatcaatattcggataacgataaggattggttcccatggcagtgttgtagatatctgatgcgctgtatttgggggataacccgtcattacggcaagcttcattgtaaagggtcatgtagcagtctgaatccaaatattttggataagatttgggaacatttatgcctgcattgcctcgtacgtcgatgcgcatcggttcatttttaccgcgtttggtagtgatcaggataacaccctttgccgcacggctaccataaagtaccacggcagcagcatctttcattaccgaaacactctctatttccgaagcgcgtacattacttgcactgcggggcactccatccacgaggacaagtgctccttgcccccatacgttgccggtgtatccacctatcagactttccagtccaactaagctactggaactatttacttttttggtcagttcggacgtgttgaccgtagaaatggcatgcgtcaagtcttcctgggcaaccgtaccgaaagccacattcaccaggctatctttgttttcttcttgcgcctggatacctcctgcatgaaacagagacatggcgaaaacagtacagccaatatatataaactttctattcattttttgcgtcattattagttaatacgtcaagattaccatccgggattctgatagaacccttcatacatgctaacatcctttttagggagcggataccaatagtgtctgtcggtatatttacgctcaagcaatactacttcacgcaagttcttgatagcattttcttccggttcgtcataattatagtcactaggatcggcacggtcgaactcaatcttggtcttcagtgtgtaaggatattgggtgagaagcatccagcggcgaagatcgataaaacggaaaccttcgaaggacagttccacggcgcgttcgcggcgtaattcgctcaggaagtcagcagtactacccagaaacttgtcgagtacgggagctaccccggcacgttcgcggatcttgttcaatgcctcttcggctgtaagtgagtaggtagcagctttacccttcggaccgttgtagcctacagccgtagcttcagcatacatcagatatacatctgccaggcgcataaggctgaggatcatgatattattttctttataaccgtcaaccgtattcatcaattgcggacagagtttgctgttcatataggctgtgaagcaacctttcttttcatttgcttcttcactctctctacctccggtgaaaagttctgccgttccacctgcaccaccggtgcttttccacttcacaccgtcgaacatgatggttttatagaagcgtgggtcgcggtttttccagggatgtgtgggatcatagcctgattcggcatctgcctttgtcatgtcattaatagggtaaccgttctgcatgccatagtagtttacgtagttggcggtaggatagcatttaataccggaatactcaatggattgaggtcggaagtcgttaaccatattccagcgccagcgtccactataatccttgatattctccatgaagatggactcttttactccgttcagcttaccgcttgagttatgcaacaggaagatgtcgttatattcggagaagtcggccagttcgtaacggttggtcgattcggtgagggcaagggcttgtccgagagcatcggcacctcgtttgcacaactctgcattgtattcctttgcacctccggaagcccaattcatcaacggactgcctgcccaaagcaaggtcttgcctttataagctaaagccataatacggttgatacgcatattgtttttgcctaaggtcactttaccggcggtggttgcatcccaatcaacaggaagtagactggctgcatgttcaaagtcggctacgcatttttccgcacattcttgccatgtaagacgggctaacgtgggagctacatccgaagacaacactgtatcaatatacggcatgccgccccaccattccattagcataaagtggtaccatgcgcggaagaagtaaagttgtccttctatgagattgcgttcttcctcggtggcgcttatcagattgccgaggttggcgataccgatattggctttacggatggcataccaggagttggcccataagtgacctttatcagttcggttgtttgaacctgccgaaccttgattgttcgggtaaccatagtaaacagtagtccaggcccagaagtctccgttgtccacactacgggcttgcatacgcatttcctgtggttcccagtattcatcttcaccatagttgaagcaagtatgtccggcatctttattgtttgaaactaccgggatacaattatagagttcttcagtgaaaccctgaaagttcataaaattcttataagggtcattatcctggtagtcactttccggagctttattcagatagtctgtacatgaggtcatccccattatgccagccattgcaatagccgacatcataaatagtttatttatatatttattcataattatctcttcgttattataaggttatgtcgataccaaaattgaagcggcgtaccgtagggtaggcaccgtccgaagagcctgtaccgtagttggcttcacggtcatccggcatgtcggtccacatgtagagattatcgccattcaagtagagacggcaggaattgatgcccattttcttcagccaattgttcttgaatgtataggataattcaacattcttcagacgaaggtaagcaccatcataccagtaacgtgttccggtagcagctgcgtctacagtagttccccagcgtggagtgggtagggtggcattacctcccggtgtccagtatgaaccttctgcataagctacgtgggctgtagaacggaatgtcgggaaattgacttcacgggttacattggttactccatagaattgggcaaagcaactgaagcctttccactcaaaaccgagagaggcattataggtgttctgcggtgtactggcatactgataaggagcacggtcgtcgttgtcaactataccgtcaccgttgaagtctataatattgtagtcgcccggtaacttcatgtcatttccagttgtccaattactactacctatcacatcgtcccaggtagccagattcccatggtcgatatatgaatatacttggttaattgtatgtccggctcccttctgataagcaggtagcaaaggagcgtcatctctgaacttgatttcattgatggcgtgagtcatactggtgttcagccaggcgcgtagaccattgttgaatacatggttcaaacgtaattccagttcataaccgtggctgttgactttacctaaattggttcggggagccgttgttccaaaataagacggaatggcacggctgtcaccgctaattataatgtccgtacgggtatcgttgaatacatctactgaacctgctatcagtccattaaagaaagcataatctaaaccaatgttgcgcttttctacagtttcccaagagacatccgggttacccagagaagagattttccagtgggtataaggagagttgtccggattgatgctacccatgacagtgttgccaccataactcaactgatctttgtataagaaacgacctgctgtaaatctctgccacggagcgaccacggcatcatcacctactcgtccccaggaagcgcgaagctttaacatatcgacgaacttcagttttttcatgaaactctcttcactgatcatccaacccagtgagagggaggggaagaaggcgaagcgataatcaggaccgaacttttcggaaccattataagcaccattggcctcgaagaaatagcgcatggcgtagttataggtaaaacggaatacccagtcttcccgataaatggggaacacacttccctgtgcctcttttagtcggctgaaaaggccaaggccggtcacttcatgtttgccgaaggtacgggcatagtcgaactgcatagagtagtatagtttgcgataagtggctccaatgtttgcactaccggattgttgtaaccaatagataggattagtgactttgtcgagtccggttcctgtatcagggtcaaacttataagagatattacctgtatccggatccacccagatgcgttgtgcatcgttgtactggtcactgaggccacgcttgttctccgcaaaagtatagtccatagagaagttcgccttgaatctcagtcctttggtcaacatagccaggtcctgctccaaaatgaagtcagtagtcattttggtggtggtgcgtttctctttaccgcctacagccaggaaataggctgagttgggtacatcggcatcacgcggcgcataccatccccacataccattggagtagatgggacgcatggcgtcgggagcggatttataagctgagttccagaaaccggtgtcattgtcgctcatatcccaaggcagctgacgttgtgcattcgaaccaaacaggttggtagagaatttggtcgtttttgtcaaatggaagtccaggttactgcgtacgttgatgcggttatagccaaagccggagttgtaaccacgtccgttttcaaagctcttgaataagtcaccttcgtttacgaaatctacagctgcgaagtaatttacaactttagtaccacctgatacgttgacgctggtattataggacatagcgactttcttgaaaagttcatcctcccaatccacattaggatagcggtcccactcttcggcattggccggatgacgatacttatcgatgatggctgccggtgtgtagtttgcccatccggcaggattgagacaagcttcgcgctcaatggagttattcatcaagtagaatgtgtcataagcatcatacttttcagggagttttgatactactttagcggtcatattggccttgatctgtatgttggcttttccttccttaccgcgtttggtagtaataaggattactccgttggcacctttcacaccatatacagcagtagcggatgcatctttcaatacagagatgttctctaccgaggaaatgtctactgaactcatttcacgttcgatgccgtctaccagtaccagaggttcgctattattccacgagctctgtgtgcggataataatcttcgggtcttcggcaccgggcataccggtagaactggaagtaatgactcccggaaggttaccagttaaggcagctcctaaattgcttaccccagaccgctccagtgtttttccggaagtctgtgtaatggctcctaccaccgacgctttcttttgctgtccgtaacctactactacaacttcgtccagtagctgtgtatcatctttcagaactactttgattgtcccttttgaagaagccttcacttcctgaggctccatacctacaaacgaaacgacaagaactgacttttcattgggcacggtcaatacaaaattaccgtctatatctgagatcgtacctattgaattatttccttttacaactaccgaggctccaattatagtctcgccattgtcgtccacgactgttcctttcactgttattccttgttgtgccgaagctgtcaggcagctaaaaagcatcaaaagaaacaagtaaggaatcctttgaattttcttttttacatttttcattaccattagtttaagatagttaataactatgttttctctgatgtcataaagccaggattaactgttgtcatacatgctttccataattcttttagttttaagattaataaataatgataaagaacctttttgttcccgaagcaaaagtaggaagtataataatagtaataaatatgttgctattgcagaaagattaactgatgttgcattctatattaggggtgtatcatagactttaattgatgtaacacagccttattcttttaactcgtaatatgctcgaaagtatctgtaacagtgatctttggcaggcttctggaagccgtgtacctttgtttcatagtattattaatctaatttatttctacatgatgagaatatcattaaaaacacggattgtctgcctgcaactttgtctcactctggctttgacactgcaagcggcggataagtttgtctctttcattcgggaagaaggtacgttggagcttgtaacatctcaacaaaggagtttcagtattttatgtgctgatgaggaacataaaggagtattaacggctgtacataatttacaggaggatttttataaagtggccgatatacgtcctgcattagtggccgatgcaaaacagaagggaagtgcggatgggcaaaatgtacgtattcttattggttcttttgacgagtctccattcataaagcaattggtgaaatcgaagaaactggatgcccgcgagttgaaaggcaagaatgagaagtttataatcaccacagtaaaagatccggtggaaggaataccgggtgaagtgttgttaattgctggtagcgataagcgtggaactatctatggagtttatgagttatcccgtcagataggggtatctccctggtattggtgggcggatgttccggcggaacggcatgaggaactctatataaaaaaaggtgtatataccgacggagaaccggcagtgaagtatcgcggtatttttattaatgatgaatggccttgcatgggaggttggaccacggaacgttatggtggcttcaatagtaaaatgtacgtgcatgtgtatgaattgttgcttcgcctgaaagccaacttcctatggcctgctatgtggagtgcggctttctatgcggatgatcccatgaacagtccattggctgatgagatggggatcataatcggtacttcccaccatgagcctatggcgcgtaaccatcaggagtatgctcgcaatcgtaaagtgtatggagcctggaactatcagacaaacaaagatggtatcgaccgctttttccgtgaaggtatagagcgcatgcggggtaaagaagaagtggtgaccattgcgatgcgtggtgacggtgatgcgccgatgggacctgatacggatacaaaactgttggaaaatatagtgaaagaacagcgtcgtatcatagccgaggttacgggaaaatctgcttctaagactccacaattatgggcgctttatagtgaggtactggaatattacgatcaaggtatgcagataccggatgatgtaatgattctgttatgtgatgacaattggggagatgttcgccgtctgcccgaaccgggtgttaaacgtcatcccggtggttatggcatgtactatcatgtggatttgcatggtgctccgcgtgcttatcagtggttgaatatgactcaaatccagcatatgtgggaacagctttatctgacgtatgcttatggtgtggataagatgtggatattgaatgtaggtgatttgaaaccgaatgagtttcctacggatttcttcttgaaaatggcatggaatcctgatgcttttaatgcgggtaatctgatggattatacaagagaattttgccgccagcaatttggtaatgaatatgctgacgaagctgcacgaattttaaatctttattgtaagtattgcgctcgtgtgacggcagagatgttagatcacaaaacctataatttgcaaagtggtgaatttaaagctgtggccgatgagtttctggcattggaagcacatgctgtccgtcagtttgctttgctgccggagaataggcgcgatgcttataaggagctgatattattccctgtgcaagctatggccaatctttatgaaatgtactgtgctaccgccatgaaccggcagttggctgctgaaaatgatgtacgtgccaatgcctgggcggatcgcgtagagtattgcttccggagagatgcggaactatgcgccgattataataataatattgccggtggcaaatggaaacacatgatggatcagacccatataggctatacttcatgggatgaaccgaaaggaggaaatataatgccgaaagtaacccgtgtggatgcttcccggaacggaaatatggtaatgggtggttatgaatacgaagagagcagtggggtagtggtaatggaagcggaacgttttgctacatccgtgcaggaacccggtacacaatggactgttataccggacttgggacgtacactctccggactttctttgatgccatataccaagccggtatccggtgcttcgttgacctatcaaatgcgattaaagtctgacttgtccggtgtgcgtgtacgcctgatattggatagtactttgccttttattaaaggagggcatagttatgccattcgtttagatgacggtgaggaacaaattgtgaattacaattcagacctgacttgggccaactgttattcaaaaatgtatcctgcgggggcggcacgggtaatagagtcaaaagtaacttttcctgatgtcactctggaggccggggtacatactctgactattcgccctctcagtccggcgatagtattgcataagatcatagtagattgcggaggcgatatgtccggtaggcttaacctaacggaaagccctcggacaagaactttaaaatagctatgtaaaagatgccatcttttacatcaaaagttggcatctcttgttgcataagttggcatctttcacatcaaaagatgccatctttcgttttatcttgccctatatggcgttccatatactctgatggtgatatgccatacatttcgcggaatgccgtggcgaagtaagtgggatgcgtaaaaccggttaatgtggctacttctgttatgctatgtcgcttgtcggccagcagggtagctgcctgcttcagacgcaagttacgaatgagttgttgtgtagtctgattcgtgagttctttgagcttgcgatgcagatgtacacggctgatacctacttccgtactgatcatttcgacggttaatgccggattgcctaaattctcattgataacgcgcatgacacgttccatgagccggtcatcgggagattttacttctgggattgagatttgttcctcctgattctgacggccactgaaagcattacgcaattgttcccggcggcggatgaggtttaagacagtttttctcagcaactcaatgctgaatggtttcatcagataagcatcggcaccggtatccaacccttccagattgtcttcctcgctggtacgggcggtaagcaggatgatggggagatagttgatgttcacattctgtcgtatcttgcggcagagtgtcaagccatccatttcaggcatcatcacatcgctgattatcagatcgggcgtatgggataatatcgatgctaatgcttcttttccgttactgcattcggtcatgtaaaagtcattgctcagttcgcggcaaatgtagtggcgaatctcttcatcgtcttctaccacaagcacatggcgacgactgcgggcacggactttaccgctggcttcttcatcgtcatcataaggtagcgggggagctatggtagccggttctgccgccgggatgtttattagggtgtcggcggttgttgcttcttctatttcttcctttttcaaatgcccgtttcccagcggtagccgtatgataaaccgggaacctggtctgccttcgccattgtcctctacgtgaatatttccgtaatgcagctccactaaagagcgtgtgaggtgaagcccgatacctgttcctatatttgagttgttctgactgttgcgtatctggtagaatcgctcgaatatatgttcccgttcagtggaagcaatgccgatgccactgtccgcaactgtaagttcaacatatcggcgcaggggtgcattttggggaaggtgggtatcctcacctgtgctgaggctgatttccacttgtccgttttcaggtgtgaacttacaagcattcgacagtaggttcaggatgatcttgtcaaagttcttaggatctatccacatttctatttcaggagcagaggtgtggaattttaactcgagtttctttacccttgtctgttgttcgaaggtttctaacaggtcacgggtgaaactaactatttcagcctttttaaacatgagggacatttgtcctttgtctatttttcggatatccattaattggtttaccaattgcaggatgcgctcggcattccgttgtatagtactgtagagctttctacattctgcatccttatcttttgccatcagttgttgcaagggactgatgataagcgacatcggagttcgtatttcgtgagagatattaatgaagaactgtaactttgcttcgttaatttgctcggcatggatgtgttgcaacatcttttgatgcatacggtaacgatgatgcacctgcatcacaatgaatccgatgattgataatatcaataggacgtatattaatttagcccaacccgatgcccaccatgccggatctatctggatgatgatttctttctcttccgagtaggctgtatagtctttggctttcatcctgaagtgataagtacccggtgccagatcactgaaagaaactctgttgacgcccggagctaatgccatccaggttgctccattcatggaataaagataggtgattcgttccggattatagaattccatggctgagaattcgatgctgaacgagttgtctctatgacataaacggaaccggctggcttcctgtactgctgtttctataacttcgtggttaccggaacgtgtacctttctttacagctttattatggatgtagaagtcggcaattctaacctcgggctttttgacttctgtagtgatttctgctggtcggaaaaaggtgataccattgatacctccaaagatgagatatccatctttatctgtacaggctgcatttttgctgaattcatttccttgtaacccattgcctgcatagtagttgataaaggtacctgtttccgggtccatgtttgtgataccgtaattggtacttatccataatccatgttgtttgtcgccttgaatggcacaaatggtattattgggcaatccatcgtgtgtagtataagttttagagcttccattttttccgtctatatgaatgagtcctttggtggtacctgcccagatgtcgccttgttcatcctcaaagagggtcagtatgatactgccgctgaatatcctgtttttcccataggttgaggcgaagttcattgtgggtatatccagacatcctaagccatcgtaggtgccgatatataacttattattgctggtgtacagcaatgaggctacccaacggttgtggagtacattgtaattctcctgatattcttttccgctttcaaaagtatcgcatctgttgactttcccggtttttagatcgatgtaaaacacgcctccgcccataacggctacccataatcgttcaccgttcttgtctgaagtcagatacgatatgttttttacttcattctgataatggtcctgtaatttatagtatcggcacaggccggtcttggggtccatctctgccagcccttccaaaggtgaggccagccacaatctgccgtctgctgtctggtggatatggttgattgtggacggcacggaattagatgtttctttgtgctcaaagtgcagggaaggcttattctttccttttataccatatataccgtcattggctgttccgagccataaggttccttcattgtctttacatactgcttttatactgttagaacctattttattggttgttacagacttgtaacccatgtacttgaattggtttgttgtagccggaagaagcatgactcctttgccgttgatacccagccataagttgcctgcccgatcctttgtgatggcatgtacatcggctttgctgaaatcgaaagtactgaaactgaactcgctttcctttatcttctgtgtatgtatgtcatatacttttatgccgtaccctatggttccgatatagatttttccttgtccggcagcatatattgtattgataggcaggctaggaagtatcggacaggagatagggataaaagtatctttctgccggtcgtagacaaatattcctttgtttatgttactggcatagatattccctttttcatccaggcaaatagaagttactatattccaggcattctcttttccgatgaaatagtgatatatttgacctgacgtgtcaatgcggtataacccctttccttctgtagaaacccatagattttcgttttggtcttcgaatagataggtgatgaaaaaactgggaaccggcagttgcgcctctttgataagaggttctgttcctcctaatgttagtgaataaacggcatggccggacgttcctattaataactctccattcttacgctccaggatcgtactgatatgtgcgctcatgtttattccagtttcgtacaggatggggatttctttaaagaggtctgttgacgggtcgtaaagttgtagcccgcgttgagtacctatcaggaagttccctttgctgtcttcgaagagtatccttacattgttatctaccaatgaactgtcgtttccttctttgtgtttgtacacactgaacttggcgccgtcgtaacgattaagtccgtcttcggtggctatccagataactccgtctttggcttgatagatctgattgatattgctgtttgataattcacggtctactgtaaatagtttctctgattgactgtatccgtaggttgcaaagaaaaggaataagatggataatagcgttttcataattacgttggggttagcaattgtgatacaaaagtaattgaaaacagatattctcgcaaacataatatggaggaaaacccctttataaaaggggaatgtaacgtatagcaaatgatgtgttacatttcgtgggataacttgagaggggatgaatcgtattatagaaaaagaggttaccggaatggtaacctctttccctaaaaatacaatactaaaaaggattatttcttgaagtaacggttgtacagaccttcaaagcctttaccgtgacgagcttcatcttttgccatttcatgaacagtgtcatggatagcatccagattcagagcttttgcacgagtggcaatacgtttcttgtcttcgcaagcgcctgactcagcgttcattctcttttcgaggttagttttggtatcccatacacagtcacccaacagttcagcgaacttagaagcatgttctgcttcttcccaagcataacgcttgaaagcttcagctacttcgggataaccttcacggtcagcctgacggctcatagccaaatacatacctacttctgtacattcacccatgaagtggttgttcaggtctttaatcatttcatcatcacaacctttagctacaccgatcacgtgttcgtcagcaaaagacagaggaccgtcttctgtggtttctacaacttctacgaacttgctggcaggagctttacacaacgggcatttctcaggagcggcatcaccttcatatacgtaaccgcatacagtacatctaaattttttcattttctttttgatttaattgaattagttattcgttcgttttataaaaaacgttagtcttctttacattgtttacagattcctttgtaataataatggatttcctgcacttcgtgtccatccatatccgtatctaccactttttttattgcgtcgtcacacggcaagtcatagattcttccgcaacgcttgcacaagaaatgtgaatgtggagtggtgtcggcatcatagcatgtgttacgctcatcgatggtaagcgtttgtgcggctccttgttcgctcaaaatcttcagcgtgttgtagactgtagtttttgagagtgtcggtatagtaggagataatgccgtataaatctcatctaccgtcggatgtgtgcggtgctccataagatatttcatgatagcaatacgctgtaccgagggtttaatgttatgtccttgcaatcgttctactactacttccatattcgtttaattcaaacttgtaataattacatttttatttcgcttgcaaagataaagacttattcgatttcaccaaaagatttccattcttttttcctcctttttgttaaacagtgtgaattggctggtaaggtatttctatccagaactcggaacctttacctatttcggaagaaactccgacggtggcatgcatcttttcagcaatcatttggcaaatggataagccaaggccggtaccttgcttgaagttatccagctttacaaaacgttggaaaatagctttctgcttttcaggagaaattccacaaccggtgtcccgcacatagaatcgcatgtttccgtctttgggtggatagtagccgacagtgatacttccctctgtggtgtacttaatggcattggagagataattgccaagtacttgactcagacgattcttttcggtatagacgtggcatttcttcatgccaaactctgcaatacattccacatttgcaggcattctaaaatggaaagcatcttcaagtttacgaatacagccgttgatgtctacttcggtataacagaagtccagcaaaccggcttctatcctggacaggtcgagtatatcgttaatgagttgtagcaacaggcagttgttgtcttcaataatccggatatattcatggctttcaggggtatcagccgtttcggcaagaatactggaaaagcccacgatagcattgagcggagtgcgtatctcatgactcatattagcaagaaaagctgatttgagacggtcggattcttcggcacgttcctttgcaagaatcagctcctttttatgcttttgggaatgaatataatagaagatatatagggtgaagaataaagcgataaataggattgtcatccagatgtaagtcttatactgctgatagaaagtaggaggctggaagaagtaaatagcgtctttcggatataaattttctggtatcttgcaccatttcaagtcggcaaagttcagataggtatgtgcaactccgccattctggtaaggaatggaagaggctgtttctcccgataggatgcgactgattgtggacattaccgtatccgtgaagtcacggatagagatataatgtccgccagcatagagattttcttgcaggtttaagtcagctaatgtaaatacgggaacttccaggaagctggggagtatctttttgaggtggtccgacagatagtaattcttgttatttccatattgccggagccatgcgtaatagatgacgccggtggtttgcttgtaactggtaagtgtatccagtaattcttctgtacttatttgctctgaagataaaagttccagttttagatcaggaaaatctttttgcatcaccgcactcacggcttggcgggtaactgtgctgatatagcggttgtcggaaataaaagcaatccggttgacttccggctgaagctgtttgatgagtgtcagagtttccttgatgtaataaggttgtttcagtacggtgatattgtagtttttgttaaattcttcgatagggatactgtttgcttctgtcaaaggagttttagccaataatgtttgcagagtagagggaactcgtccgcgtgaatagcaaagtatgacagggatatttttccaggggccgtcgaaaatgggcgcactgaccaaccagcccggatctcctacgattatgacaactttaggtggtgtaggaaatgtttgcagaagattatcttgggcttgtttgacttcttcttcattggtaagcaccgggactgccaggaagtattcatgtaattcgatatttccttcataagggaagcgtttttgaagttcgttctggaaaccgtgaatccatgcttcttctgcattgacagaactgaggaataatatatactctttttctttagcggaaactgacaggcacccgattagaagtatcagggaaagtaaccatttatggactgtattaggagctctcatgagttttgtatggcgtgctttaaaaatgttgctaaaagtacaaataatcttggatatctgaggtgaatgaagtgattattttgtgtttatggataaataaccgtatttttgccgccatatttttaaatgacatccttatgaattacggatatgtaaaggtagcggcggctgtgccccgtgtgaaggtagcggactgtaagttcaatgccagggaaattgaaaaggaaataatcatagccgaggggaaaggtgtgcagatcattgcttttccggagttgtgtgtgacgggatatacatgcggtgatttgtttgcccagcaattattgcttgaagaagcggaaatggggttgatacagattgtaagtaatacaaggcagttggatatcatagccatacttggcatgccgatagcgatgaacggagtattgctgaatgccgcagtcgtaattcaaaaaggaaaggtgttgggagtagtgcccaagacttacctccccaactacaaggaattttatgagaaacgctggtttacatccgctgtggatgtaagtgaaaggagcgtgcgcctttgcgggcaggtggttccaatgggaactgacttattgttcgaaactgcggatacgacgttcggcattgaaatttgtgaggatttatgggcacctattccgcccagttcttcactggcattgcaaggtgcggaaattctgtttaatctgtcggcggataatgaagggattggtaagcacaactatttgtgttctttgatcagccagcagtcggctcgttgcattgccggttatgttttctgttcgtgtgggttcggtgagtctactacggatgtggtgtttgcagggaacggactgattttcgaaaatggcagcctgatagctcgcagcaagcgtttctctttcgagggacaggtgattatcagtgaaatagatgtggaacatttgcgcacggaacgtcgagttaatacaactttttccgcttgtcgggcgcattgcgcaccgggagaggcggtacgtgtttccacagaatatgtaaatagcaaagaactgaacctgacgcgttgttttgaccctcatccttttgtgccgcaaggagttgagttgaacgagcgttgcgaggaaatattctccatacaagtttccggtttggctcagcgtctggtacacactgctgccaagagtgcggtggtcggcatttccggtgggttggattctacattggcattactggtgtgtgtcaaaaccttcgataaattgggatggtctcgtaaagatattatcggtgtaacaatgccggggtttggaacaacagaccgcacgtatacgaatgctctggatttgatgaattctttaggaatcaccgttcgtgaggtcagtatcaaggaagcttgtattcagcatttcaaagatatagaccatgatatcgatgtgcatgatgtagtttatgaaaatgctcaggcacgcgagcgtacgcagatactgatggatattgccaaccagacttggggaatggtaattggtacgggcgatctttcggaactggcattgggctgggctacttataatggagatcatatgtccatgtatggtgtgaatggaagtgtgcctaagactttggttaagtatctggtgaaatgggtagccgagaatgatatggacgaagcttcacgcatgacgctgctggatattgtggatactccgattagtcctgaattgattccggcagatgaaaacggcaatatcaaacagataacggaagatctggtaggcccttatgagctgcatgatttctttctgtattatttcctccgttgtggtttccgtccttccaagatattcttccttgcagtgcgtacatttaaggacgtgtatgatgaagagacaatcaagaaatggttgcagacattcttccgccgcttcttcaatcaacaatttaagcgctcttgtctgccggacggacctaaagtaggtagtatttccatcagtccgcgcggggattggcgtatgccaagcgatgcatcatcagagatgtggcttcgggaagtagagagccttgcttgatactattagtttcaaggcatgaaactaatagtttctcggtgtgaaaccagtagtttcaccggatgaaactagcagttccaagcaatgaaactgacagttccaaggcatgaaactaagaatggaaaagaataaaaccggaagttccctgtgcgaaacttccggttttattgtataagcttgtttgagaggaacttatctctgattcgaagtccggtagtatttacggtagatagatttaaactcatcactgttccgaaaagtctgaagccagctgttaaggctgtccaatagaacaggtgattgtttgctgactccccaggaatagaactgggtaaaactgatatcggtattgatatctatctgtggaatactgtccgttacggcacgggcgatactttcatcgcatacggcataatctatatccccatgagctacaagtgatatcagctgttccgaaccgtatttatctatttccttaatatatatagtgtcaccaatttcgtttcccagattacgaatacggaggatggaaggtgatcctttcactacgtgcagggttttgcctgccaggtctaactggcttttaacgaataaagagtcagtgggagatgtggctttgcgttgtacgagaacctgtttattaagtacaatcggagtagtaaggagcaaagagtctttcagttcactggtggcgagaataccataagcgataacatcgaattcgcctgttgcaagtccttccagccgtttgtcaaaactcatttcgggagtgatggcagccttccagccatggtcacgggcaaacgcttctatcagttcataatgaaagcccgataaggtatctccgtcaacatagaagctgatggagttgtattctgtggcagcgcggattattttctcggctgcgatttctgcatagtcacgcggatgcccttgctgcttctccttctttaaaaagaaggtagcaatgaaagcggctattatacccatagctgcgtatttcagtattctggctttcgggattctcatgtggaaagagttttaatcgtagaagttccatgaaacacctatctttagcaggctcgggttgatggggtaatgcggtacgaggaaagagttacgtgtacccatgccttgatttacgtgagagtacatagcgaatagccgtgtacgcttcagttgcaggtttgcataaatgttcactataggataaccacctatctctacctgatcgttttccggttgcaggtggaattgctgaacggcaggcgtataggccggtgcattatatttggtgaaatagcgcacatcggctcccaattgcaccgtaagaactttcttcgctaacttggtcaggatgtataaattggagtatagtgaaagttgtggcaatgggagaattgtttcattgcttgacttttgccaggttacttcgttatccaaatggaaaatacctgcacggaagttctgtttcagagttgctgaaagtatttgtatattaccgctatactgctcgggtacagctttctggttgaaataagtatagttcttgacgttttctacaccggcacgaagattagtaccccagcggtcaatgtttaattcgccttctacacgggtacggaattctttctccatattatcattgtcccagaagaaatggttggagtgataatgccgcatatagaaagatgggagtgtattcgtcacaaaacctcgtgcgataaggtttactgtatcttttcccaatcggaaattcaaatccatattaccatgtacacggaattgccccagcgctttgtccataatacctatttcaccatctatggaatagtgaaggactttaccttgtcgtttggcaagttcaccgcccacaaatatttcttgttctgtaaagcggtctaccgtcatggaatctgcattcatcaggtcataacggctgaacttatgagagatataagcggttaatcctgctttggcatatttgttgaaaccttccaacagggctatgccaaagatgttctttatgctgaatgctgtggtggagtcccgactgacacttccgtttttgttgaagtaagtgttttcatacataccctccggttcgctgtatgattggaaacgatggcgtgagcgctccactttaaaagtatgaatgaaacttgtgacagggacgaattcctcaacataattggtatcttctgccaaggcagtggcgttgttaagactatccagactcaggctttttttcattgcaagcctttctgctgaaagactgtcggtgcctaaactgtcagcacctaaacgatccatacctaaactgtctgtaatggcagtgtcgggaatcatggcagtagatgctgccgtgggagcaaagttctgtttaacgctattgttttgggctacttctttcaatactctccgcttgaatcctaaccgatagcgttgcgtaaggtaaatatagaagtctttgttacggttggaagtttgttccagcttcacaggaatagtggtggattcgtattctttcttaccgtcagccattgtatcggggcgggtaatgtaaccgtcatttgctataccgccgttttcattcatcttcatgaagaagttgttgtagacagcttgcagttggtagcgttcgccaatataacttccgaatatgccggcattgaagtgcgaagtagactgattggagtagtatccacgtccgtacaggtaatcgaaattgaagccaaatgccaaccgtttgtttacattgacagaaaaataagatttgaatcgctcttcaccgtttaccttattacccgctttataataagtcagatttgtataaggaacattactgttggtgaagaatacctgatcgggacgaacaaagaaactggagaatggcgtcataaaaatagtcggttcggtgctttcacgatcaaagaatatacgtgaaagacggggagagccgaggttacccagaaaattatattgtcccgtcataccgtctaccaggtttgtattctggaaattcaaggaaagagtgtcggcaggaacgatggtccggttacccagagtctcgcttaattgccacatatagagtttaggcggaatactttgaacgtcagtgctggtatccaggctatctggttgtgttgacgggtcaacctgattcccatagcggtcacgattatccaatgtattgagtggccgctgtgcctgtgctgccagcaatcccaatacgaatagaagtatatatgtcagtagaatgcgtctcataattaggcgcaaagatacaataaaaaattattcgcttgcggaattcagccttttttgcctatttttacaaacgtactttttatttctttgatataaatatggtaacttataaaataagcccttgcaaaaagaaactattgcaagggcttattgatttatcgtaagagtcaatggaattatacctctttaatcaattccattccttttttaatcgcttcttcattcatcggtatcaagtgatgatgacgttcgggcaaggtcttcttcaagcctctgagtacgctatccagcgtaaccatcggtttcagtttcagcaatccacccagtacgatcatgttgaatgctttggcattattcatttcattggctgcatccattgcgtcgatgcgatacactttgatatctttacgcgtcggcgggttgatgatgccatatccgtcgtaaatcaggataccgcccgtctttaccttactttcgaatttctccagtgagggctggttcagaataatggcagcgtcatacttgctcagaataggagaggagattttctcatcgcttacaatcaccgtaacgttggctgtaccaccacgttgttccggtccgtaagcgggcatccagctcacttccttatcttccatcagtcccgagtatgccaaaatctttcccatagacaatacgccttgtccaccgaagcctgctataatgatttcttctttcattgttcttttcttttagttgacgaggttgcagttgacaagttgacgaggaagcatctcctccttgttaacttgttccctcgtttccttgttaactgatttatctgtctttcaagtcacccagcggatagaacgggaacatgtgctcttccatccatttgttagattgcgcaggtgtctgtttccaaccggagttacaagtagaaacgatttctaccagattggagcctttgcctgccatggagttctcgaatgctttgcggatggctttctttgctttgcggatagcaccgactgtttgtacactctggcgggtaacgtaagcggttccttccagttgtgcggcgatatctgccatcttcagcggataaccgtgcaaatgaacatcacgtccgtaaggactggtagaagtcttcatgccgaccaaggtagtaggagccatctgtccacccgtcataccataaatggcgttgttgatgaagatgatggtgatattctcaccgcggttcagtgcatggattgtttctgccgtaccgatacatgccaagtcaccgtctccctggtaagtgaataccagtctgtccggccacaggcgcttgatcgcagtggcaagagcgggtgcacgtccgtgtgcggcttcttgccagtcaatatccagatagttatagatgaacacggcacatcccacgggggagatacctactgctttgtcttccatgcccatttcttcgattacttcggctatcagcttgtgtaccacaccgtggctgcatcccggacagtagtgcatgggattatcgttcatcagagtcggtttcttataaaccagattctcaggcttgataatatcttcttttgtcataatcacttctccttatctgttggtgaaccgtataaaaaactccatcagcttaacgaatattgctgcgccacaaacgtagatgaacagtttgaagtcatcctttgcaacgaaatatacgatgatagctgccaaggcaagtatcataaagagtatattcaatacgcttcttatcttatcagggttcatttctcgattaatttttctttcagtgcacttacaatctcttccggatcgggtacgataccgccgagacgcccgaagtgttctacttttactttaccattcacagagaggcgtacatcttcaaccatctgtcccgcattcaattcggtaaccagcatgcctttcactttttcagcataggctgcaatggcttttgtggggaagggccaaagggtaatggggcgcagtataccgactttgataccttcttcgcgtgcaagttccattgctttctgtccgatacgggccatagaaccgaaggcgataatcaggtaatcggcatcttcacaattgatttcttcgaaacgtacttcgttttcttcaatcagtttgtatttagcctggaagcggatgttattcttttccatctcttccggtttcaattccaaagaagtaatgatattgggcttgcgtccgtttactctgccggtagtagcccacgggcattgctcgataacttctgcatctgtacggcggggcttttgcggaggcaatacaaccttttccatcatctgaccgataacaccgtcggcaagaatgatagccgggttgcgatatttgaaggcaagatcaaaggccaatccaacgaaatcagccatttcctgtacggaagcgggagccaaagtgatcagacggtagtcaccgtgacctccacccttgacagtctggaagtagtctgcctgactgggttggatggttcccaatccggggccgccgcgcattacgtttacaatcaaacagggtaattcggcacctgccaggtaggagataccttcttgtttcaggctgacaccggggctggacgatgaggttaataccatctttccacttccggcaccgccgtacaccatattaatagctgccacttcactttctgcctgtagcactaccataccggtagtttcccagggcttcagttcggcaagagtttccaatacttccgattgcggagtaataggataaccgaagtatccatcagcaccacaacggatagcggcgtgggcgatggcttcgtttcctttcattaatacaacttcttctgccatattctactgatttacagatttattcaacttttactttaaaaacagagatacatccgtccgggcaaacctgggcgcacgacgcacagccgttgcaggtatcttccaatatttggtgggcatagttatacccttttacgttcacctctttggtgagggctattacatgcagaggacaggctaccacgcatagattgcagcctttacaccgttcggtgtccactacgattgctcctttaatctttgccataatttacgttacttttatatgttattgattgtacatatccttattgaagaaattcaggatatccattgccatacgataggcttcacgggcagggctgtcgggattgaggtcgatagcatactggtagttgttcaaagccagttgccagttgccttgtttacggtaggcatttcccaggagatagaaagcttcgtcccggtcggtagagtcggtgatcagatattcatcgagctgccggatagcttctgctacatctccttgattgataagctctttgatagttttcagttgctccatatcgtattgagttccggattattggaatacaaagatagtttttatttagagacaacgaacaagtattctgtgaaaaataagaaaaatggggaaatatgaagcccgaagttgaatgaaattctgtcagaatgtcacaacttcgggcgtatatgatgtaaaatgggttttgctactttacaagttttccatttatatagagatttttgaacgtaacgtcttttgctccttttatgtcatttccatctttggcaacattattaaagtgggagtcttcaacgctgatattgtacacatgatcatcgtcgtcgagaccgataataaggacaccaagtttgctcttttcacaggttacattctttaggtgaacgttgcggacagtaggagtaaaaccgcggttgcagttctcccggttttcgtattgcaggttgatgcgcagtacggcttcgcgacactgtcctacggtgacgttacgcacgaatacattttcaatcagtccgccgcggcaggtgctggtcttgatgcggatcacacggtcgaggtctgggctatccatcttacagttttctacatacaggttgcggtatccgccggagatttcgctaccgatgactacacctccatgtcctttcttcatatagcaaccgcgtacaatgatgttctcgctgggaacaccccatttacgtccgtcctggttacgtccggacttgatagcaatacagtcatctccggtatcgaaggtacagttctctatcaatacatttttgcaagattcggggtcgcagccatcgccattgggaccgcgattataaacgtatacaccgcgtacagtgagactttcgcagaatagcgggtgaataacccagaaaggggaattcaataaagttacatcttctatcagcactgtattacatgagtacaggttgataagttgcggacgtaatccgtcttcaggtgtcattacacgcttataaataggagtggaggtttcaccgtacatcagcaggcgttcccgtcctccgttgcgttgtgccaccatgccctctttccagccataacggggagcgccacacataggccaccaggtttcgttggagccttgtccgtcgatagttcctttaccggtgatggcgatatttgtttcaccgtatgcataaatcaacgggcgggcattatagcagtctattccttcccaacgggtgataactccgggaaagtagaggctctgatcggttgaaaatttcaatacggctccttcttctacatgaaagttgacgttgcttttcagtgtgatgggacctgtgtagaatgtaccttttggaactacaaccgtaccaccaccattcaggcaacatgtaacgatagcctggttgattgcttcatggcagggagcatccggggtgtcgggtttggcgccgaagtccgtaatgagatacgtttgtttggggaaagatgttttcttgatttgcttttcaatctttgtactctccttgaaagccttatcgaaatctatcgagttggcagttgccaatgtggccgagagaagcagggaaataattccgagtacttttttcatgcgtttccagttttactttaaatggttattagatatgcaggcaaaagtacggaaagtgactctattatagggaagagtttttggcataaaaggtgtaaaaattgatgtgtttatacttcttagctctgaggaaggtgtataaactaaactaaaaaacacttgcgggtgtgtaagccttcactactgcaagtgttgccttacacatccgcaagcgtcaccttacactactgcaagtaccagttcccgcacctgcaagtgtaatttcgagttgggatgattatctcaccggtattttatcaatacgcttctgatggcgtccaccctcaaactgtgtgctgaagaattctctcataatcatatcagcttcttctgtgctgataaaacgtcccggcatgacgagtacgttggcatcattatgctggcgagccagatgagcaatttccgcagtccagcaaagtgcagcacgaataccctgatgtttgttcagtgtcatgctgataccttcaccacttccgcagatagcaatacccgggtaacactctccggcttcaacggccaatgccaggggatgagcaaaatctgcatagtcgcagctctccgttgtataggtgccgaagtctttgtattcccatcctttagtttccaaccaccccttgatgtattgtttcaattcaaatccggcgtggtcggaacaaattccaattgttttcattttctgttgtagtatgattgatttagaggctctataatgggatatcaggtgaaaaatatttcgcccctacaagcctgttacaacctgtaggggcgaataatcattcgcccggtatgcaccagggctttttataacattgcttttacttgcttataaacgttatcagcagtaaaacctaacttctgatccagtactttgtaaggagctgagaaaccgaaagattccaatccccaaattttaccgtgagcacctaccaaaccttgcaggtttacaggcagaccggctgtcagaccgaagacttttgcgtcagcagggataacaccttcctgatatcccggagcctggctgcggaacaacccttcggaaggagcagatacgatacgtactttcacgccatctttgcgcaataattcggttcctgccaccagtgtagatacttctgagcccgaagctaccaatatcacatccgggttttcatcagaacctgctacaatgtaagcacccttggctgcctgagagtagtcgtttccagcgggcaacatagcgatatcttggcgagagaagatcaaaccggtcggagtggtagtattctccatagccagtttccatgcaattgttgtttcttctgcatctgccggacggagaaccaacatagagttgtgtcctttgtggtttttcagtttttccatcagacggatctgagcttcttgttctaccggttcatgagtaggaccgtcttcacctacacggaatgcgtcgtgtgtccaaatgaacttcacgggaacttccatcagtgcagccatacgtacggcaggtttcatatagtcagagaatacgaagaatgttccgcaagcagggattacaccaccatgcagtgccataccgatacagcagcaagccatagtcagctcggcaacaccggcctggaagaatgcaccgctgaaatcacctttcttgaaagcatgtgtctttttcaggaagccgtctgtcttatcagagtttgaaaggtcggcggaagcaacgatcatgttttctacctgagtagcaagagcgcccaatacggtagctgatgcagcacgtgtagcagcacctgctttttgctcgatagctgcccagtttacttcaggagctttaccagagaagaacaggtcgagtttggcagccttttcaggattagcctttgcccattctgattttgcagcatatttcttagccataatttccttcagttcggcagcacgctttgcgtacagttccttcacttcggggaagattacgaatggattcgtcggatcaccacccaggttcttgatggtatttacgtaagcgtcaccacccagaggagcaccgtgagtagcacagttagcttcgtagctgctgccatctgccttgcgtgcacccttacccattacggtatgaccgataatcagggtaggacgttcgttttctgctttcgcttcgttcaaagcgccacggatagcgtcgggatcattaccgttgatcttgatcaccttccagccccaagcttcgtatttcttggcagtatcttcgatagttacgtctttggtttcagtagaaagctggatgtcattggcatcatagaacatgatgaggttatccagtcccagtgcacctgcgatacggcctgcaccctgagaaatttcttcctgtacaccaccgtccgaaatataagcgtagatggtttgctgcatcacttcttcgaaacgggctttcatgaatttagctgcgatagctgcacccactgcgaaagtatggccttggccgagcgggccggaagtattttcaataccacgcatgatgtcgcgttcagggtgtcccggagtggggctgtcccattggcggaattccttcagttcatccagtgtgaatttacctgccaatgccaactgagagtagagcatcggtgacatgtgacccgggtccaggaagaagcggtcacgaccttcccatgcaggattttcgggatcatacaccagaaactcagagaagagtacattcacaaaatcggcaccgcccatggcaccgcccggatgaccggaattagctttctcaaccatagaggcagcgaggatacggatattatccgctgcacggttcataagtttgttgtcgttcatattgatatttatttgatttgaatactataataaagcaggttgaagtgtcacttgttaattttaacagcgacaaagataactctttatgcgtaattcgcaacaaagaaagagcctctttttttgctgtacttccgctagcttcttgtttaaaatacaataagtcttttcgactgatttactgtaactctatagtaacaatagacttggctggtagttttatcttcagtacgcctttattgatttttacctctttgaacggagctaattttatattattagggttctcaaaagagttgtaatctgtcaggttggcagaagttaagatttcaccaacggctttctttgcctttacatccggcaggttgatagtaatttcctgtgcattgtcggcatcgatattagacattgagatgtggatcttgtcgtccttgtctttagaagctgtggcacttactataggtactttacgattatcgcgtacatccatgacctcgcagttcagatcgagtgggaggtaagtggcatcctggtgtacattgtacatcttgaatacataataagtgggagtcagcaccatgtctttaccttttgtcaggatcatggattgcaatacatttactatttgggcaatatttgccattttcagacggtcggtgtatttgtggaagatgtcgaagctaagagaagcaacgaaagcgtcacgcaatgtattttgctggtaaaggtgtcctgggatagtgccgggttcttcatcccaccaggtaccccactcatcgagcatgagggctacgtgttttttaggatcatattcgtccatgatatcgcagtgctttttgataacgtcttctatctcacggcattttcccattgtccagtaataatcgtctttgtcgaacttagtggctgctcccttacttccgctccagccggttacggtgtaataatggagagagagtccgttcatacgtccgcctacgcgatccatcaggactttagtccagttataatcgtaatcgctggcaccactggcaatcttaaacaggtggttgccgtcgtagttgcggcagtaagtggagtaacggcgatacaaatcagcataatattcaggacgcatgcttccgccgcagccccagctttcgttgcctacaccgaggtatttcactttccatgctttgtcacgaccgttctggcggcgaagtcttgccatcggagaatctccttcggaagtcatgtattctacccattttgccagttcttctacagtaccactacctacgtttccgctgatataaggttcagtacccagcatttcgcagaggttgaggaactcatgtgtaccgaaactgttgtcttcaattgtacctccccagttattgtttaccattttggggcggttctctttcggaccgataccgtccatccagtgatattcatcggcaaaacagccacctggccaacgaagtacgggaacctggagttctttcaatgcattgaatacgtcggtacgataacctttgatattgggaatatccgaattttctcctacccaaagtccaccatagatacaggtacccagatgttcggcaaactggccgtaaatttctttgggaataacttgtgtgccttggtcggcatgaagtgtgatcgttgcactcttttgtgcggacagcgatacggatgcagctaaaagaacgctgctgaataatagtttgtttctcataatggttattagttatatgatgttcgtaatgttatttagtataaatcatggctccacccatcggttgcatttcgatggtaaggataccttttttgtttacggtgccttgtgaaagaccggcagtgcggacttcgttatcatggatgatggaaacttgctgattcgtcagccacagtaaagataaattcagtttcatgggttgcccggtggcattggtggcggcaatgtaccattgattaccgtatcgacgggctacaacgcaatatttgccgggatagccgtcaatgaagcgcgtttcatcccacacggtaggtacttttttcatgaaatcgagaataaactccggttgctccgtcaggttattgggagtgatgccgaagtgctggatacctgactggtagagaacggatgtagcaatctggaaggcatcggtcgttttacgaagtgtaccgctgactccatctttggagaaatgtttgttgaaaaatacaccgccgaagtccatagctgaaactgcattgcggatgaaggggtacaatgtacttcgttgagcttctttgtcggcatgatattgtccgaataccaaattctcagataccaatgccgcttcactgctcatgtgattcggatacatgcgttcccagccacgcggtaaggtacaaccgtggaatacaacagcgattccatattggttggcatcggtcagtatgtcttcgtagagtttcatggtggcttgtttatcaccgccaaagaaatctaccttaatgccttttacacccagggttttcatccaggccatttctttctggcgggccggtgcactgtctaaacaatgttttggaccttgaggagcgtcattccagtttccgttggagttgtaccagagaagaacatccactccctttgactgggcataggtaatgagcgagggcatattctcataaccgatttgtttgtcccataacgcatcaataaggatatattcgtatcccatggcagctgcaagatcaataaaagtctgctgatccttataattacaactggcatcttgccagagtatccagctccaggtagagcgaccgggttgataaacctgtgtcggttcgtagagtgggcgtacattgtcgtaggcagaggtagtctcaacaatcggtttcaaggtctcacctacggtaatggttttccaggatgtcaaggaggggatggatgctgcaatggttgcatcacctacaccgccattctccgctttttccggaaaagcaatggtgtacaaaccgtcttgagttccttcgctgagctttgttcctgcataatggctgcttacaccggtttcggaaactaacacccatccgtcattacctacatgaaagagagccgggaatgtatagcccagtttgtaacgtgaaggcgtaccaatagcctcatccagtgtatattcttcttcatagcttggcttagtacccatccatccgtctcccgcaggagcctggggagtaatgaaagttgtggtatatgaaggaaaatcgaatccggttgcttctttctcaatgatgcagtgtgtatgcttgggagaggcaatccgataggcttgtgcaatatcattgttgcttacccggaagataacttgtaaagtatcccccttttcattcagatagttgcataccaactcattggcttgatagtgtacacggcttacctttgcatgtggcattgtgtaagtctcatcaatcgtacgtacctgatgccccagttgtttcagtcctgtggagaaatctccgatgctggttttcaatcccagcggagaaggctccaggaatattttattgttataatgaacggaataaacaggacttccatcctttaactctacatttacttttaatgcaccgtccggtccttgtacttcctgtgctgttaaagcacctgaaacagccaggagggcggagagtaaaacaatcttcttcatgttcttttgctttatgatatatttctgactaaggctattttatttgagtaagcgaacctcataaatggcaggtgtccactccgttccgtccggactgaagcgtatcggatagctgcctgtacttaacttttggggtaaagaataacagatcgttataaaaccctctttatcaggtttactgatcgttggactaacagtcagtttttcattgttaagaaggatggctaccttggtatgatcctctttccgtacagtgatcatcagctggctggcttcctcttttactttgaggttataactgaaccaacctttggcacgccggaaatgacggtctttattgattcctgtttctgcctgctcatacagaataccatgatccgattcaggctgttgttcaccggggaaaatgagatctacagtctggttggcaagttccattgctttacgctcgctcaatgccacttctttgcggatactttctacttcagcgtcggttacctgatggaaataaacggcataacgggaatcgtgaagacggaagaaaggaatcaatttcagcgcttctttctgtgccggatagacactaccggtataagtaaatgcaaccaagtcatcgtttatcttccggagtgattggggcagagatgcggcggaacctatcagcatcggtatttcttgcatggaaatctgtttgccatgggcaatgtgcccgccacgactgtcatctgcataaagcccgtccatattctctgtccctgtggggctggcaagtacgatagggccatacatgaatgcatagaaattttcccgatccggtatttgctccaaggcaacctgcatgggcatattcagtgtgatttcatctccggctttccatttgcggtgaatggtcaggtactctcccggttgggcattcgtttcctgtacttttccattaacagaaacgctggcgcctttagcccaggaggggtaacggagtttgaggctgaatgctttcttcttgctcttttccacgcggaatctgatttgctcttcgtcggggaaacgggtttcctgtaccagggttatctttttctctttccaggtcagacgggaggggatgaagaggtttacatacagcgtatcctttgcatgggcgtaaataaactctccgtatttggtgtgattctccaatccggaaccgacgcaacaccacatggatgtttccggctgcgaataaacgcgatagtgccccggacgcataggagtgaagtaaacaaatccaccctttgttggctgttgtgaggcaaggatatgattatataaagcacgttcgtaataatcggcaaaacgaatgtcgggagaagtctggtaaagcatcttcgtcaggcgaagcatgttgtaagtattacaagtctccggaccttgcacatcattgagcatggatgtgaatttgtctgccggatgaaagtgctcgcgtacactgttgccaccaatgcagacggaacgatgatttaccactgtgttccagaagaagcgggcggcgtgatcccagttctggtcttgtgcaaggtcggcgatacgtttgtagccgataaccttcggtatctgtgtgttggcatgcatgcctgtcaggcggtcttcatccttcacaagagggtccagaattactttatgggagaagcggcgtgccagttccaggtatttcttgtcacctgtgatttcggcaacatcagcgaaagtttcgttcagtcctccgtgttcgctgcggagcatgtcttgcatttgctggtcggtgagtcctgcggtgatgtctatcatccagtcggtgagggccaccaacatctggcgggcaaggtcgcttccggcatagaggtaagcgtcgcgcagtccggcataagtcttgtgtatattgtataggggtacccatttgccattgaggtcgaaacctccggcacggatattcccggctttaatttctttccaaagttgcaggcttccgggagttcctccgatgaatccggtgcctacggcttgctgtgcacgatgtagttcgttcagcatatagttcagacgattgtatatggctgtatctccagtagcggcatacatcatggagagtgcggaaatgtaatgtccgccgatgtgtccgtccagtccggtgttttcccagttggtataacttggcgctttgggcgtcagtccagcttcgcgcaggaaaggggcgagcaggcggtcgggctccatggccatgatgtaatgtaagtcagtctgttgagcttgcaggaaggggctttccaacagcttaacatcttgcaaagggaaataggaaacttcttgttgggtttgagctttcccggtcaggagaaaacaaaaaaggaacaggtaagtaataaggatcgttttcatattatattatatttgaggtatagagattatttgcttactgacgaaggtgcttcgtcagagttgacgacgatgtttcgtcagagctgacgatgatgctttgtcagggcgggcaacgatgccttgcctgagcgagcaacggtactttgcctaagctggtaacgatgctttgccggattcaatgaattgtccgagcttgtagaacgaatgtatagggagttgctccggtgccaacagcacccacgtggcagccgaagcttctccctctactattacattcgtttattccttgaagtaggaattactttttgaatttcactgctgcttcttcgatgggcagtgctgctttgtagttttcgatgtatgcgttaaagcctgctacatcttcagcagtaggcgctatctcaacacctgcatctccaccaaacacctgctcatccaggaaagcgtcgagaggttgcttcttctcgttgttcacaaggaatgaacccagtaacgcaataccccatgcaccaccttcaccagcagtttccattacggaaatcggtgaatttaatgctgctgcaagtactctctgacccacattcttagtcttgaacaaacctccgtgtcctgtgattctgtcaactttcaccttttcctctttgaaaagaatgtcgttaccaatcttgaggacaccgacagaagcatacaagtgcgttctcatgaagttggcaaggctgaacttgtcattggccgaacgtacaaacatcggtcttccatctgcaaatcctgttacaggttcgcctgagatgtaattgaatgaaatgaggccgccacaatccgcattgcctgtcagggcatggttgtagagttttccatatacttcgttcatatctacaggtatacccagcagttcctggtattctttgaacaggttgatccatgcgttgaggtcagatgtacagttgttgcaatgtaccatggctacgggacttccatcgggagtagtaaccatatcaatcatttcgtagggctttgacagatctttctccaatacaatcatggagaatgaagatgtacctgccgatacgtttcctgtacgctgcttaacggcattggttgcaaccataccggtacctgcatctccttcgggcgggcaaaccggtattccagctttcaaatggccggatacgtcgagcatcttagcaccttccggtgtcaggaaaccagcattttcaccagccgacaataccttgggaagaatatccagcaatttccagttatatcccttcggagcgattaactcgtcgaacttggccaccatttcagcggagtagttcttggtaaccgggtctatagggagcatacctgatgcatcgcctatgcctaatacctttttaccggttatctgccaatggataaaacctgcgagcgttgtcagataattgatatcttttacgtgttcttcgttgtccagaatagcctgatacaaatgagaaatgctccaacgcaaaggaatattataaacgaacagttctgataaagcagccgcagcctgacctgtattggtgtttctccaagtacggaagggcacgagaatctcttctttatcattgaacgccatataaccatgcatcatggcgctgacgccaattgccgccaaagcttctatttctatgtcatagagcttcttcacgtttgagcgaaggtcggcgtaacaatcttgcaggccataccagatggcctcaacgctatatgtccaaagtccgtcaaccaactggttctcccaggtgtgacttccttgagcgatgggcttgttttcctggtcaatcaaaacagccttgattcgagtggaaccgaattctataccaagaatggccttgcctgcttcgatggttgattttgcgtctagtttcataatcaacaaagcgctttgttcaacatgtaatatacttcattcatgcgcagttctttcttgaactcgctgatagttgtattttcatcgataactaccatttcgatacctgccatttctgcataatcttcccaatattctacagtcagatcataagagaagctggtgtggtgagtaccacctgccagaatccatgcagcagcacctacttcgaggttcggcatcggaatccacaatgcgctggcaacaggaagtttgggcagcggtttgctcttgatacattctactttgtttacgatgaggcggaaacggttacccaggtcaacgatagtagcggctacgccttcaccttgtttgctggtgaatacaagacgtgcagtttcgctatcgataccaatgctcaggcgatgtacttccagtttcggttttgcttcagcaatcagcggacaaacttccagcatgtgagcctggaggatagcgctcttttcaccgtcgaaatgcaaagtgtagtcttccaagaaagaacaacctttcggcataccctggctcatgaaccatgtggtgcggtacaaagcggcggttttccagtcaccttctgcaccgaaaccataaccttcttccatcaaacgttgagaagccaatcccggaatctggtcaaagtcaccgaggtcgttgaagttggtagtaaatgctttggcacctgtatctttcaggatacgacggagagcgatttctgcttttgcagagttccacactttggtataagcttctgttccggctttttccagttcaggagcatggtcatattctttgaagtaagtatctaccattgcctgtacatctttgtcttccactgcattgtagtacttcatcagatcgtttaccggacagtagtctacgtggtaacccaaaacttgttcagcggataccttgtcaccatcagtaacagcaacgttgttcatctggtcaccgaaacggataatcagcatatcttgtgcatcagcccatccggcgcaaacacgcatccatgttgcaatctgaccctgtgctttttcatcttgccagtgtcctaccactaccttacggtttttacgcatacgggttacaatgtggccgaattcacggtcaccgtgagcagactggttcaagttcatgaagtccatatccatggtatcccaaggaatttctttattgaactgagtatggaaatgcagcaacggcttcttcagttcctgcaaaccgtgaatccacatcttggcaggagagaaagtgtgcatccaggtgataacgccgatacatttctcatcattgttagcagctttgaaagcttcagttacttctttagaagagtttactgtacctttataaaccacctttaccggcaatttaccgctggcgttcagtccagctaccatttcattactgtgtgcgtctactgcgataactgcgtcacctccgtacaggagctgtgctccggttacgaaccatacttcatattgatcaaatgcgttcataattctttaattttaagttattagtttttaattatcaattgtttattgtccataataggcgttaggcccatgcttgcggttgaaatgcttttccaccaacagcggattcatggtcagtttcggattgacggcataagcaatgcttgccatcttagctacttgttccattaccactgcgttgtgtacagcatcatgcgcatcttttccccaagagaaggggccgtgattctttaccagtactcccggtgtgtgtacagggttcagcccttcaaagcgcttcacgattacatttccggtttccatttcatacgctccttccacttcttcctttgtcatatctgccgtgcaaggtatggcatcgtggaagtaatctgcatgtgtcgttccaatattcggaatgtcacatccggcttgtgcccaggcagtagcgtaagtagagtgggtgtgtaccacaccaccgatttcagggaaagccttgtagagtaccacgtgggttggagtgtctgaagacggtttcaatcgtccttccactaccttgccatcgaggtccaccaccaccatgtcttccgccttcatatcgtcataacttacaccactgggtttgatgactaccagtcccgtttcacggtcgatagccgatacatttccccaggtgaagataaccagtccatgcttcaccagttcaaggttggcatggaataccttttttttcagttcttccagcataatttataatttaaaattcggtgccttgcggtatgccttttcattgaatttgtataaggcagctccgcgtttggaacctgttttatcaatcttatctgttttttcaatgtagtccatttcggctatccgtttacggaagttacgcttatctatctgttcaccgtaaatagcttcgtagaggctttgcagttgagacagcgtgaataacttcggtaacaggttgaagccgataggctctgtggatgctttctgttgcatcaattcccgtgcctgcttcaccatctgtggatggtcgaagataagaggtggcaattcgttgatgtttacccaataagcgttatgttgatgcacaagctcacggtcatactcattgatattgatcaatgcatagtaggcgacggagataacccgttctcctgggtcacgctccacttcgccgaacgagcctacttgctccatatatacattttccaaaccagtgagttctgccagtacacgcttggccgcattgtccacactttcaccttgttgcacaaatccacccatcagagaccattctcccattgccggctgaaagtttcgcttcagcaataacagatttagttctccttcgttgaagccgaagatgatacagtctactgaaatatagaatctgggatttatactataataattgctcattgatgtatgcacggttttattggaacaatatttaccagaaataaacatagaacaaagcacagagaattactactcctaatgaagcgataacatcccacttgttccagctttcccggatgagttgtttgtagctgccggtaaaggtaatggcttctatttgcttagctgttggtttcggagtgaaacaagacactaccgccatcattacgatcaggaatactaacaaccagatttcaaagataagccagttcgtttgccagaaccatgtggtatattcccagtaccagcctgtcatgacatctttacctgtattggtcatgatattggtcagcaggcgtaccataccgatgatgaaacctatgatcataccatattcaccagcctttggcgtaatcttcttggagaagataccgagtgcgaatacagctaccatggcaggagccaacagtgattggataccttgtagatagtcgtaaaggctacctaaactcatcataacaggaatccaagccatacccaggattaccacaactacagtagcgatacgtcctaccattacatatgtagattcactcttacccttacacatcggtttgtagaagtcttcagtgaagagcgttgcacatgagttgaagaaagctgccaatgaagcaaccaatgcacagatgaaaccgatagttacgatacctttcacaccggcaggcaatacgtcttttaccattacagcaaaggcagcatccgtgttcgacatgtcgaactcaccttttgcggccagtgcagctgcaaccatacccggaataaggaacataaataccggaagaatcttgaagtaaccagctgcgatgctaccgcggcgggcacgcttcattacaacatcgttggcttctcctttacgctgtccgagtacacgttgcacgatatgctggtcagtacaccagtaccagaagccaatgattgaggctccgataaatacccagaagccgggataatcttggtacattgggtcagattcggtccagtggaacatgtggttggcaccgtaagcatgtccgtcggcaccgacattcatagcactgcgtgcgtgttccatcatttctgtccaaccggtggagatactaccaccgccgagagccgcaagtcctaagaaaagaacgaggaaagaaccgataatgagaatcggggtctggatagcagagagcgtcattacacctttcataccacctaatacggtgaaaataccagtcagtacaatcaggccgatagcaccataccagaagggcaggcccaacagaaattccaggaagataccaccggtataagctgtcacacttactttagtcagaatataggcaatcagtgtgatgatggaaagccatgaaccggtacgctgtgtgtagcgatatttcaggaagtcgggcatggtaatgatcttacccatcttgttgttcagtaattggtagaacggaacgaaaagccatcccagtaatagaatcatccagccttgcatttcccagtgggccatgcctacgcctgattttgctccggtgccggccaaacctacaaggtgttctgaaccgatgttggcggcaaagatagccgcaccaatgatataccaaggttctcctttaccgaagagataatcttcactactttctccttgctgcatgcgtttgtccttttgcacggcacgccatacagcccatattactgcgataattcccacaatgagaattgtccaatccagccaaataaattcttttgaattccaattcataataattcgatgtctttatagttgttaaatttgaagttacttttctactgagaacttaaagatacattcgctgttgtaggtttgtcccggttccaatacgacgctgggccattccggtttattaggactgtcgggatagtgttgtgtttctaggcatacggaagcacgttggttgtaagtgataccttttttacctgttacagttccatcaaggaagttgccggtataaacttgtatacccggttcgttggtatatacttccagagtgataccgctttcaggtgaagtcagttttgctgctaattgagcaatgtctccatttgtgttcagcacccagttgtggtcatagccatttccgtttttcaactgaacaaagtcgaagtttgtgatgtcttgtcctattgttttaggagtagtaaagtccatcggagtatctttcactgttacgatttctccagtggtcatgaaagtactgtctaccggagtgtaattgtctgcatttacatataagatatgatctgttgcagcttttgaaggattaccggataagttgaagtaagagtggttagtcatgttgatgaccgttttcttatctgtagtagcgctatactttatatctatagcgttgtcatctgtcagtttgaaaagaactttagcagttacgttgccgggaaagttagagtcaccgtccggtgagatacgagtcagttccagcgtagtttcatcaatcggattggcttcatatacttggtattgccagcctttaggaccgccatgcaagcagtgtccaaagttgttttgcggtaattggatcgtctctccgtccaatacgattcttccctggttgatgcggtttgcataacggccgatagaagcgccgaaatcgctcgggatgtttacatagtcagcaatgctgtcgaaacccagaacaacgtcctgcatattcccgtttttgtcgggaaccataatggaaacaatacggccaccgaagttagtaatacacacttccatgcccgacttgttcttcaaggtgtaaagacctgttttggcattgttcacttctgtttgaaaattcaccggattcagaccggacaaagtcaactcctgagctggcttattattgcacgcagataacattagtgcggcaattcctgcaagtagaaaactgtttttcatggttctattttaaatgtaaatgagataattatccgattttgggtgtaaaagtaacacttttattgagtgtattaactacacttgtgtatgttatgtaacataaaagcaaaaaaaacagcctcaaatgtcgggttgttgaggctgtttttaggatgcggatggggtatctcatttctttttctttccccaatacgtcttgttgttggtgtagccggcatagacaatggtgtgggtgcgtggattggcttcccagtctgtttcgcgttgcaggtacagttccactccgttagctgtcagtatttgtttttctgcatcatagttccaggtttcccctttccagcttccgtctgtaatggtatggtcggccgcgagggtcatgttgctcgattctttctgttttccataggaataagagaggtcgatgtgctcccagttgcctaccagctcatcttccgtaatggctatttgagggacagctccgtaacgttcgggcattacgaccggccagcctgtactcgtccatttgatagaacgtatatgtcccatcatgagggcattgctataagcatttccttccacattttggggaaatctgccttgtgaggcgtaataccagttgccgttgccgtcgtcaaacacagcacaatgtgagattcctacccatccatagctgttgctgaatttgtaggggtgagtaacgacgggcagcatttctcctccatcttgggtaagattgacaccgtctatgccgaggtagggaccattgatatttcgggagcggcagacacgggtattgtagggggtgtccaatgcgtcataagctacaaatagataatagtaatcggtagcggcattgtagatgatttccggtccttccgaggcttgccagcggttccccatttgtctggtggtaatcaatgatccgtatgcggcaatgtcttcgctggttccccaaggggctggcagtgtgttcaggggtttccctgtttcggcatctacctccaaggcggctataccgctgtgccaggaaccgtaaatcaggtaatgcttaccgtcgttgtctatcaggtagctagggtcgatggcgttccacttgtagtaacagttggcccagtcgtcgggtttgatatggaagttcagtcctttgtccgaggcgttggtgataacatagcccttatcttcccagccgttgttgttggcggggtttgagttctccaatagaccgatgaaggcgcgttcgccccaagagttcgctccatctaaagtgccggggcacacaatggagtagtacatacggtaaagcccgttttttactttgcgcacacagggtgcccagtagccgaaatctgtggtttcgggtgaaacctcgttcagccccatttccttgcgaatttcatttagcttcggaattacccattcgggtagtgccggcattactccgcctaagtattcccagtttacgaggtctttggaacgtctgccgtgaaagtgtccaccggctgtatgcgcattgccgtaagaggcgtccgtctgatacatatagtaatatccgtcttcggctagcaccacggtgggatcgtgtacgtttgctaagttccattgattgcgttggtcccaactggctatgttcacgtaatagtcttcataggtgggtgccacatagttcttgagctgttcgtcaaggcttgaggctgctgtggttaccgtgaatgtttccgagtaagtgtaacgactgttgccgtaaacatatgagcgtatgtagtaaacggtattacccgtcaagccggagatggttgcactgaagttctcatctgcttccactacattgtctttgatagtaggagttaagacgtttacactatagcagaatcccctcttggctacgttattcagattgccggtgaccgatgaatgaacggtcagcgaggtgcctgtcgttacagttgcttcgggagtggctacgactatatcgctgtttctattgtattcgacgttgtcaagcccatcagagcaagccgtaaaaaccgtcagcagggatattaagaaaaatgttagttttttcattgggtcagtaagtttttaaggtccataccgtcctctgataaagagggacggtatggatgatagaaaagttaatagttattcttattcattgaagacaagatgacaattgtcaacggtcaatgcaaagttcaggtcgctggaatccacagtgttgatgcctaaatagtattgggtagaggttgtacctgtagtactctccattactacttgaatatcggcgacgctattgccacagttcgttacatagactgtgactttggctccattcataccggcaagccaagtgccccattcgccttgtgttccgttgtgaacgcaggctgcatatccattaccccagccatagttgtcggcgcgaaccactgcatattctgcggtaatatcggttttgcggagaatcacagcgaagttgttccagttgttagccaggctactgtaattggtgaaagtaatgtactttgtctcgcctataggtacattgaaatcgtcagagatggctccccagaagactgttgagttatcttcggttcctaccatgttggtactgttcttcactacagaagctgtagattcggagacggtaacctctatcgttgcggtgacttcttctccggtagtggtagtaatggtgacggtctgagagcctgctttcgcaagaatagtagagaagctgagtttctcgttgtcaacgattcttgaactcccgtcggtgtaagttgctgtaaccaccatgcctgtcgggtcgaaggccatcgttcgatctgccaaactttgggtagcttccgaggtgtaatagtagtatcgtgtgtgcgagggttgggtagtcacttcgatggatacaatttgttccacaacttcaaaagttgcattagctacaatcggttgttcgcaattctcacctttaaaggtcttgttatagatggctacaaggttttttatgcctggctgctccatatcgggaatggtagagatataaagctcagaaaccggtacagttttggtcactccctcttcaaaggtaacgatggccgatacgttggccatagccgattcaagcggagtaccaacaatgacctgattgggtacgttctgtagttccattgatatcggatttttgtcttgggcagaagtaagaccgccgataggctcaatgttggtttgctggaagtcgatgtaggaaccttctggaaccaagaagcaacggatgttggtgttgcttgcatctgtatttagattttcttccttgtatggctgcgcgtaagtcttggctgctgtgccgttggtcatctttacggtgaaagcgtctgcattggtacgatctacggtaagtgtcactttgccgcccaaactttgcagattggggtctgtttcgttttcatcgggattgagaagcaacgtgcccgagatgtactggaaatcgatatgatcgccccattgggaattgtaagtttcagggctaccagtaacatcaaagcggatggctccgtattcggcatatccttcaccaccgcggtctacatcgttggagatgataagggcaaagttcttgaaatacttggtgtcggtcgctgggttgatgtgaaggttgattactgcattccacttctcgccatcgggtactacgtaatacttggagaaagcagaccaaaagccggaagtaaaatccgtttttccgaaagtgtacacatcttccaacatgccctcaagcacttcgtcttccggttgtttcttcgaatcttcaatttcctgtatcttatcggaaatccagtcgggggcatttacgtcataaagttcgccatccgtgcagcctgtcagtgtcagtaatccaaaggttacggaacaacaagcgtatgctattttttttagtaatctcattgtcttaaatttaaagagtgtgattgattttatttgcttaaatctacaactgaacgcactgtccaaccattgtcacggaaataagaagagttgtccgtgctatagttggcggaattgcctttcagattggggttattattcatcaactgctgcacaatgggtaggaattcgtgccccggcaagtaggtatcgaaagagctcttcagttcaggatcgtttgctatatcgctgtagttcacaggattctttactccttctgtagaacgacgtaccgtgccgtgttccttgagttgctgcaagcgactgttgtcataaaagaagccccaacggatgaggtcgaagcctcgaccgaattcgcagccgaattccttaggacgttccacattggctatctgttcgaagagcttgtcggcagtattgaaatcttcgagttccaagtctgccagcttggcacggttacgtacctcgttgatccagtcgatagcctgctgcgtggggccattgacctcattttcgcattcagcggcacgcagcaacacatcggagtagcgcatcaggcgtaggttgattccatcatgcaagcctgtagtgacggtgctgtacagaccggtacggagattcgtgaatttggcaatcggcagaccaccgtaagtgttgttggttacgatattatcggtagctgtaagtgtttgcgtataagctacattaccgtattcgaagtctgcccagtcggtttcgtaagttccgatggtccaataaagacgggggtcgagtgtgccgtttatggtacgttctcctttaaaaagatggtaaagccagggggaagctgagatatcggcccaaccgccatagttgccgggagcaaagttactttcaatggcggacccttgtgtagcattggggcttgtgttcaccggagtccactcatcatcagtgccttgcgaaccgtagtcgaggaattgcacttcgaagaggctctccgcattgttctcgtatgctgaaccttcgcggaagttgtcgccatagttgtccatcagtcggtaggtgccgtatttcttggcgatgatgtctttgagtaccgtgagtgcatcgttatatttatggcgcatcatgagggcgcgggcatagtagcctgccgcagcaccgcaggtggcgcgtccgccggcccactcactgcctttatcgcgcgaaggcagcaattccatcgcctcgtggaaatctttttctatctggtcgagtacggcatcgtaggtgctgttgcccccatagagtccgtccaacgaagagtaggtagcgtaatctgtgatgaggggcgggttctgataataacctaccagattgtagtatgacaggccgcgcaggaaaagcatttgtcctttgatgtatttcattttatcggaaagttggctgttatcttcgctgcaacgggaaatggtgaagttgcacacgttgatggtgtagtaccattcccgccagggccaccacgtaatgtctgaggtaacttctgcattgaggtcatcaaaaggcagataccacacttgtgaagagttccaggcttcatcgccacgacacacgtcgatggtgtagcctacacgggcataagaaccctccatgcggatatggttgtaggcggcaatcacgcattcctccaaatcatcggcattgaaaccgaaggtacttgaggtttgttggttgggattcaataaatccattctgtcactgcaagaaaccagcgtgctaagtcccaaaatgagagcaagtgaatatttatttagtttcataaaatatgtttttagtatttaggtaccagatagtaacaattagaatgtaaaatgaacaccacacatgaaagtacgtgcagtaggataagaacagaagttatatcccggggtgaaagtccctcccgcatagtctacattataaccgtgatagccggtgaatgtgtgaagattctgtgctgatacgtataaacgtacatcggatacatatttgccgaaccatttgtcagggaagttgtagcctaattctatattggcaatcttccagtaggctgcgttctgaatcttacgtgaactgaagaggtcgttccaagctaggctggcattgttggtgacataggtgcgtggcatgttggaaaggtaagtgctgccgtcttcgctgaaacggttggcatcgagcatacgtacctctttgtttccccagccgtagcaagagttaagcgagttgtagatgtcgtcacttacatgatagttcaacgcaccgaaagttgcgatgctcaagtcgaaacgcttatattcaaagcgggcactcagaccgaaatgaattttaggcataccactgcccaataccacttggtcttcagagtctattttaccgtcgttgtttacgtccttataaaggcagtcaccgatctgggcgccttcctgagtggcgtggttggcaagatcctcttgtgtacgggcgataccttcataaacccaaccgtagaactggccgatttcttcacctactttggtgatgtatgcacctgagatataagagttggtaccgaaacctaacgaggttacacggttacgcaacgtactgagattgcccgatatttcatatttgaaatcatgatcccgattgcggtaggtggcggagaattcgaagccggagttgttcattgaggcggcattcattgtcacggtggtgttggagacaccggcttgttccggaacgggaaccgcatacagaaggtcttcgctgatatttttgtaccactcggccgtaaactccagtcggttgcggaacaaggcaaggtcgatacccacattataggtcttctttttctcccatgccaggttgctgtccacgaaagtggaaacggcggaaccggtcactacgttaccgttgaagttgtaagtcatattgttgcgcgacatgacagcctgatacatatactcaccaatattttcattaccgagttcaccataactggcgcggactttaaacatgttcacgacatccggattgaaagggaagaagttttctttgtcgaaacgccaacccacggagacggaggggaaagttccccaacggatgcttctggtcaggcgggaactaccatcccggcgcactgttgccgagagcaagtatctgtcatcgtaattgtaattgatacgaccgatgtaggataagatggaatgcttgtattcgtagctgctggaatacgtattggctgcattctggagctgtaggaagtaaggctcggtgaagttgactccccatccagtcagcaggtcggtgtcctcctcttcataagtctgtcctgccactacgttgatgtgatgtttgcctatcgtgccgtcgtaagtgagcacgttctctatcaaagcatccgaatagttgcgtgaagccttggttagccgttcattgctcttggccagatagacacggttgctctgcacccatgctggaatccaggtaaagtccttgcagaaggtcttactgtaagagaggtttaccttatagttgagtttgtggttttggctgttgatgccaagcatcttgaagatgtctacatctgccgaacctgtccctacaaaacggtctacacgggtgttgcgttccaataggttatttaccagtaacgggttggaagcggagatatcgccatgcacggtgtcgtagtatacgccatagccgtaagcatcataattgaagttgttggcgattcccaccaagttgtcgagtacccatgtagaagaatcgtatgccttgatggtgggttgcatcagtaaggtaccgcgcagtacgttggttacgtcgccatacaaaccttgaacgtattcggaagcattggacaagcccatgttgtcttggtcggagtgagagtagacaaggctggtatggaactttatgaatttggtttccatagtgttgttgacacgtgcggtgtaacgttcgtagttagggccggcgccttcaagtgttcctttctggttgaaatagtctaatgatatattataggtgttatgggcaccaccgccggagaggttcacattgtggttctggcgaatacccgttttgaatacttcgtcaaaccagttggtgctggtatcatcttggaaatgatattttccagttgcgctgtcaagcttgtatcccgatggcaacggagtattggagtttgcgcacgcctgaccgaggtattggctatactggtcggcattcattacatcatacacacccttaggaatgaagtccgcaccgaagtacccattgtaatccactttcagtggttggtctttttgtccgcgtttagtggtgataataatcacaccgttggcggcgcgcgaaccgtagatggcggcagccgaagcatcctttagcacctggatggtttcaatatcgtttgaagagaaatcgcggatggaagttcccatgggaacgccatcgataacataaagaggagcggtgctaccgaaagatccgacaccacggatgcggacggtaggatcggcgccgggctgtccgtcggaggtgatttgcacaccggaaaccttaccttcgagcatggtagagatgttggagtttgacgtctgtttcaaggcttccgcatctactacggcaacggaacctgttaggtcagacttcttttgtgtaccgtagcccacgacaactacttgctcaagcatctgctcatcggattgtagctggatagggtcgatgatggcacggttgcggacagccacttcacgttccttataacccacatagcttattaaaagggtggcgtttccaagaacctccaattggaagtttccgtcgaggtcggtaatagttccgccttgtccgcctttaattttgatggtggccccagtcagtggttcaccttgttcgtcgacaacttgaccacggactttgatagtcggagattgtgccacggtagccattgcaggtgtagggtacaccaccatgctgccaaagatacacagactaagcattacgaaaaaaaataaatgtttcctcattttttaagtattaaggttgtttaattaatagattagatttattattaactgattacgatgccagattgacgtacgacctggcgttgactaccggaggtagccaggttacggatttcatatatgtaatggaatcaataggggaaggttgaatttgctcgatgccatgtgcaatgcggcaaccattcttttgtcattcttcataatattaagattaaaattaaacattaaatgcacggttctctcccgaaggattgagtaccgattgcatgacaaaagtagggcttgtgtagtaaataggggtggacaaacgtattttagaggtggataaatgaaatttaagtgtagaaaatacattttataatatgaggtaaagagcaattcttgccggggtaaaattatccttcctcattaagcagtgagctcggtgtcgtattaaagtatttggtgaagcaccgggtgaagtatttagggtcgttgaatcctacctcataagctatttcggcaatgttcatatttttattctcccggtttttcagcaatagttcacgggcaatgttcaggcggtagttccgtatgaactgtccggcagattgtccgatgaggctttgtagcttcttgttcagcagactcttgcttacacctgccgcttcgcagaaatcgctgacctcgaaataggagtttttatagttttctttaacaacatccatgattcggttgaggaatttcttgtcacccgattcttcttccatattcagggtatctatatccatggctatggcaaactttttttgatagcgtttgcggttctcaaggatattctctatgcgggtaagcaacagcgtctcgtcaaaaggtttcagcagatattcgtctactcctgtgcggtagctctccagacgtgattcctgagatgtcttggcagtgagcatgaggaaagggatatgagagatggtaaaattctcctttacccggcgggacagctcgatgccgtccattatgggcatcatcaggtcgctgatgatgaagtctaccgcatgcgagttcagtatggttagggcttcctcgccatgagccgcttctagtacattatatttgtcccgcaggatagaacggatatatccgcgcatatctgcgttgtcttctacgaccaaaatagacaaaccctttccggtactttcggatgcctgtactgtgtcatcggcaaccgtaagctgcggagtactttcggctattgttttcattgtgctgttttccgaagttactggcagaagaatacggagggaacagccggtcgtatggttgttttgtgcatggatttcaccaccatgcatttgtacgatacgcttgcacaaataaagtccgatgccgcttcccgcctgtccgtacatgggatatttggtttgcccttgcgactggtagaaacgattgaatatcttatttatatcctcgtcgggaataccgccaccggtatcgctgatgcagatgtaaagcgttaacttgccgctagcggcagaaggcagcaaagcaatgaacaaagatacgtttccaccgttgggcgtgaacttgatggcattgctcagcaagtttgttaaaaccttgtgcatagcttcctcatcataggatatctccggtgaagacatccggtaataacgtttcagtgtgatattcctttctttggcaaagacctcgaaaggaactatcagctcgttggcgaattttagaaaattgtttctcgttttcactatctccagcttgtccgattccactttacggaagtccataagctggttgacaagtgacaacaggtatttggagttgcgttctacaaagtgaagctgttcgatgacctggggattgtagcttagtttcagtgcacgctctatcggacccatgatcagtgtgattggagtacggaattcgtgtgtgatattggtgaagaacgctatcttgtccaatgtaagttcctgtatcttgcgcgtcattttggtaagctgcgctttttgtcgggtaatcttttcgttctgttgtttcaatatctggttttggcgtgacagttcttcggtctgttcttccagtagttctttttgcctctctagttcatgggtgcgttgctccaccttaaggcgcagtttttctttctgatctttcaggctccgtatacgccattggtagaattgccaggcagcgaatgcgacaaggacgattacgatcagtgtgaaccatgtcgtcttgtagaaatagggttggattgtgatttgaagttccgttatgttttcttcttctgctgcttggtcatagggtgtatatttcacttgcagcgtatagtctcccggagacaggttagtgtaggtggcaaaacgtctgttgccgggtacgtgtatccaccgattgtcaaaaccaagcaggcggtaactgtaggtcgcagtattatcggtctcgtagttgagtgcggaaaattccagtgaaaaagacttttcacgttcgtgaatacagattgtcttgcttacggcaatatccagcggcaggtattcgttgccagggaatatttctttattttctacttttaaacgggtgaaccgtactgttgaaggttggattggaacggtaggcaacgtacagtctatggccactaatccggatactgtaccgaggtagagcttgctgtaccgagaacggtaagcggcattccaataaaattgagtatcggtaagaccatcttgccggttgtagttgataaaatggttttctgtaggttgaaagcgtgacagcccattgttggtcgctatccagatataccctttgtcatcttccagaataccgcggatgctgttgtcgggaaggccgtgaagggagttgtaacaaatgaattggacttctccgcgttcgtcttgcatacacttgtaaatgccgtaaccgttgcttcccaaccatagtataccgtcctgggcttcgtaaaagcaacatatcttttctatcagcccggaggacggatcatccagtttgtatttcagatggcggtatcggaataccccgtccgaagacgaggcgggacgggaatgcagatcgatgatataaacaccgtccagacagcctatccatagctgcccgttcttgtctatgatagagccgatacaaccgcgtatatcttcggctgcgcgattggcgaacggcgagcaaagctgcttatgtttcaggtcgtaaaagaataatccttggttcgctccaatccacatgccgttgttgatagagtcgtaagccagcgctccgataaagtctatgggatagttatccttgttctcggctgtgatagcttctatcctgtgctgtggattttgtgggttaataaggtttatgccgccaccccatgtgccaatccataaccttccttgcccgtcggcggtgatggcgcttaccgagttatgggtaagtgtaccgctttcgtgcgtataatgaatgaagctgtcgcttcctgccgcctttttattcagtcctccttctaccgtgcctacccataggttaccactatgatcttcgtaaatggcgttcaccggattgtgggagattgtttggggattcttgttatcatactgataattctgtagggacaggcgtttggcggttattttattgataccgccactttcggttcctacccagatatgtttcccctctacagtgatgcagttgataaaattgctgttcagtagtttgctgccggtattggatacttggtcgcttatgcgctcgaaattgtcttttatggggttgtatatattgatacctttcaggctggcaaccagtagttgcttgtcattggttatggcaaggcaggtcaggaagttctgtgaaagggaatgtggattgccggggacatgcacatattgtttcactatattctcgtttttattatatcggtacaaacccttgtcggaggcaatccatacttcattttctttggctataaagtctgtaaaatacatatccggtgcaaagctcaggcagtctgcaatcagtgtctcttttagttcgttttgtacagtcatgcctatcttgtataatcgaccgttgattcctatccatacttttccctcgttttccacatctttgaaggtgatgtcgtatcggtaggggttggggatctctagcgagtggatgctttctatatctccattggtgtggaaagcgatgcggtgcaggctattaccacaatatagccagatacatccgttggcgtcttgcgtgaccataaaagccggttgccggatgagttcttccagcttcttattgggggcgggcagtacggactgcatggttgtcaggtcgataatatccgtacccccttccgatacaacccaaagccgccggaagttgtcttcgtggactttgcgtatgaagttgcttttgagtcggcaatgtggggtagccggggtaaagttgatgaattcgtagccatcgtatctggatagtccgccacccgacattgaaatccaaagaaaaccctgccggtctttgtatatatcgtcaacaaaattattgggaagcccctcattcattgttatatatattgtattataccggttggtaaaagactcctgtgcccgcaagaaagtggggcttgccaaagcgatatataatataataaggtggaaaaacttatgcattgttttatcatttggtattagcacaagcaaagttaatagattacttgtgatgaccataaaatgttcgtggtctttttgtgaagttggaggattgtccaccttaaaaggtcatatatccacctctacagctttgggcgtggcgtacatttgcattgtaatttttaattagctaatattatgggaaaattgttatgcgtagttgtcatgtctgcgggaattttgtttgctggctgtaactctccggtttttactcctgtggcttcgcccaatccctggcaggatgactattccgctttgtcttctatggacaattaccactcgtggggaacttacaatgtacatgatccgtcgtgctgtaaactgggtgactattattatatgtattccaccgatgccattttgggggagaaccgtaaagaagccgaggagaagaatgttccgttgggtttcatacaggtacgtcgctccaaagatcttgttaagtgggaatttgtcggctgggctttccctgaaataccgcaggaggcggtagaatgggtgcgttcgcatgcagacgggaaaggggcaaccaatatctgggctccttatataatacctttcggtgacaaatacaggctttattactgtgtctcggcttttggccttaagacatcctatataggattggcggaatccgcatcgcccgaaggaccctggatgcaacggggatgtgtggtcaagaccgatgcaacttcggtaatgaatgccatcgacccgagtattatagctgattccgctaccggaaagtggtggatgcattacggttcgttcttcggcggattgtactgtgttgagttgaatcccgaaacaggacttcctgtccaggaaggagaccaggggcatcttatcgcccgtcgtgccacttattggaaagataatctggaagcgcccgaaattatttataatcccgaactgaaacaatattacctgtttgtttcatacgatccgttgatgactacttataatgtgcgggtaggacgttcggataaggcagaaggcccgtttgtcgattactttggtgtggaactgaaagatactaccaacaattttcctatcttgacagccccatatcgtttcaacaatcatccgggttgggcgggtacggcacactgcgctgtcttcacttcggatgaaggacaatattttatggcgcatcaaggacgtttgtctccgcataaccagatgatggatcttcatctgcgccaagttttcttcacatctgacggttggcccgtggtatcgcccgaacgttataccggtagtgcttcccgtaaattttcggcagctgatatagtaggcgagtgggagattatacgtgtgcaggaacccgcgtatgagcgtcagttacaagctggccaaatcttgtggggcgaaggtcagcttaaaaacgaagagtggaatgtttcctgcacgttgtctttgaagaaggacgggcagttggatgagaataaaggttattggaagtttgcggaaagaggacagctattgtctttgacgctgaacggtgaatccgtagataacctgcttgtatttgccggacatgattgggaaaatgaaacggaaaccgttctttttaccggtctggatagccggggacgttccgtctggggaaaaagaactaagtaatcaattataatttttattttgaaaccatgaaaagatacactggattattaatggcgctgacccttaccgcgggtatgacgcttcaggcacaaaccaatgagtttgtgatacaaaccaagaaattaggcgcagagattcagcctactatgtatgggctgttttttgaggatatcaactatgccgctgatggcggactatatgccgagttagtgaagaaccgttcgtttgaattccctcaaaatttgatgggatggaaaacttttggtaatgtgactttgcaggatgacggaccttttgagaagaatcctcattatgttcgcttgtctgatccgggacatccgcataagcacaccggactcgacaatgaaggattctttggcatcggtgtaaaagccggagaagagtatcgcttttccgtatgggcacgtttgcctcaaggaggaacagcagaaaaaatccgtatagagttggtagataccaaatctatgggcgaacatcatgctttcgctacagcaacattgactattgattcgaaagaatggaaaaagtatcatgttattctgaagtccagcataacagatccaaagtcaacattacgtattttccttgcttcaggaggaacagtcgatttggaacacgtttcccttttcccagtcgatacgtggaaaggacatgagaatggtttgcgtaaagaccttgcgcaagctttagcagatatcaaaccgggtgttttccgtttccccggcggatgtatcgttgaaggaacagatttggctacgcgttatgactggaaaaaatcagtaggccctgtagaaaatcgtcccctgaatgagaatcgttgggaatatactttcccgcatcgtttctatcccgattattttcagagctatggattaggcttttttgagttcttccaactttcggaagaaataggagcagagccgcttcctgtattgagttgtggtttggcttgtcagtttcagaattcagatgcagaggcacatgcggctgtttgcgatttggatagctatgtgcaggatgctcttgatctgatagaatttgccaatggagatgtggccacgaaatggggaaaactgcgtgccgatatgggccaccctgcatcgttcaacctgaaattcattggtataggtaatgagcagtggggaccggaatatccggaacacctcgaaccgtttatcaaggctattcgtaaagcctatccggatatcaagattattggaagctccggtccggactctgaaggaaaacagttcgaatatctatggccggaaatgaaacgtctgaaagttgacttggtggatgaacatttttatcgtcccgaaaactggttcctgaatgagggagcacgctatgataactatgaccgtaaaggtccgaaagtgtttgcaggagaatatgcttgtcatggtaagggtaagaaatggaaccatttcaatgccgctctgcttgaagccgcatttatgaccggattggagcgcaatgcggatattgtgcacatggccacttatgctcctttgtttgctcatgtggaaggatggcaatggcgtccggatatgatctggtttgataatctcaactctgtccgtaccgtaagttactatgtacagcaactctacggacatcacaagggcactaatgtactttctttgacgatgaataagaagcctgtaacgggtgccgaagatcagaacggactgtttgcgagtgcggtttatgataaggataagagcgaaatcatagtaaaggttgccaatacttctgataaagcccagcctctgtcattaaagtttgaaggattgaagaaacaggatgtattgtctgacggtcgttgcatcaagctgcgttcagccgatctggataaagataatacaattgagcagccgtttgctattcagcctcaggaaactccggtatcaattgatggtcaggtgttgaatgtagaattggaaccaaagacatttgttgtttatatcttcaaaaaaggatgaaaataatggatgaattctcccgggcgaagggggaagcatgggcaagtcaggtcattgagcgcgatggcaagttctattccgagaagatttgctatgcaatgaaccggagtattaccggaccttgggaatatgaaggtattgatcgcctgtactataatgaagatggaaccatgaagcgtattcagatgacaacagaaggagtgcaataggtttagatattagaatatattgaaggttagattaggttagttaattagtttatttgaaaaaggctaaaaagataagggcgtctccccgtgatgggaagacgcccttttagattgagttgtttttattttaaactaatctgcgagcaccgtcaccgatgactacatcataaattttagggcttctgccaaatttttctttgaacttatccttggcattctggatgaatgtatcatacaactcatctttcaccaagttgatagtacaaccaccgaaaccaccgcccattacgcgtgaacctgttacaccgcagtcgaatgcaagatcattcaggaagtcgagctcttcgcagctaacttcgtaaagcttgctcatgccatgatgtgtttcgtacatcttctgacctacagtttcgtaatcacctttttccagtgcatcgcaaacatcaagtacgcgctggatttcttcgattacgtattctgcacgcatgtagtcttcttcgctgatttcagcttttgactcttgtagcatgtccatggtacaatcgcgcaggaactctacatgcggatgtttcttctgaattgcagcaacggcagcttcgcagctttgacgacgcttgttgtatgctgaagaagccaattcatgtttaactacagaatctaccaataccagacgatagcctttcggatcgaatggaaagtattgatattccagtgagcggcagtccagacggataagactaccttgcttgccaaatacggaagcgaactggtccataataccacagtttacaccgcaatagttatgttcagttgcctgacctactttagccagttcgaacttgtctatcttgttgtcaccgaacagatcgttcaatgcatacgcatatgtactctccaaagcggcagatgaagacatacctgcacctaaaggcacatcaccggagaaagcagtatcgaagccctttacatcaacgccacgcttaatcatctcacggcatacaccgaagatatatcttgcccagcttgcacggggagcatcttcttccttcaaaccgaattccacataatctttcagatcgatggaataagctttcacaatgtctgtaccattcggtttgatttcagcaatcatacctttatcgattgctccagggaatacaaaaccaccgttatagtctgtatgctcaccaatgaggttgatgcgtcccggagaagcgtaaactgctcctgttgttccgtcaaaatgcttgatgaaacggcttcttacgtgttctatatccataatcttttcaaatttataagtgaataaattaattacctataccttttaattgcgttaatcctctactgggatatctttatttacatttttgcaacctaccaagccgtagaacagcagataagcaagagctgcgataatcagccaatagctggccatataacctacagagtcagagatgctttgttggatcaacggcaatacaccaccaccaacaaccatcatcatgaagataccggatgcttgtgctgtatattttcctaatccttctactgcaaggttgaagataccaccccacattacagaagtacaaagaccgcaaagtacgaggaacaatgcgctgacaggtacttgtgccatcataaatccttcacctacagtgtaaccgggcattgaaactgttacatctttcggagtgaagatagcaatcaatacaaaaacaatagcggtagcagatacaacgattaactgtgtacggctggaaactttaccgctgatagcgctacttgcagtacgtcctacaagcatcagcaaccagtagatagcagcaatagcaccaccgatagcagcaccgttcatcataattccggcacccttatcgcttgcgtcggcaagatagaagttcagtgtacccgggataccgatttcgatacctacatagatgaagataccaactacacctaatacagtgtggcggaaactccatggactatgagagaatttttctttcttcgctccacttttctgaagatgtggctcagggatagctacaaatgaaatgataataaatgcagctacgaatacacccatagcaacgaagaggagaggagcaacatcagacatggctgtcttggaagttaccgtaccaatcaaagcacctacgaaaagaggagtcaatgtaccggacaaagaattaagggctccacctgtttggatcaactggttacctttgttaccaccaccaccaaggaggttcagcatcgggttcaccactgtgttaagcatacaaacacagaaaccgcagatgaatgcaccaagcagatagataacgaaatttaatttgataacatattcgccgaatgcgaaaacttcggcatttgctccgaataaactggaaaggtattgcgtgaacaaaccgaggaaacctactgccattgcaatcaatgcagtctttttgtaaccgatcttaacgagcatgttaccggcaggaattcccataaacagatatgccaggaagttcatcatatttcccatcatacctaaagtgttcgaacccgcatattcgtttctccaaatcgtaccgaacggtgcggcaagattggtaacgaaggaaatcatcgcaaaaatgaagaacatggtaataatagcgacaagattaccgttctgtttttgttgtgtcatggtttttaattaattaaattagttataaaattaggttagttatattcattcttgtacaccgaacttgtaaatggttacttgttggtattcatcgtccgggagcaatacggccgatgggaaatgtggtttgttgggtgtgtcggggaaacattgtgcttcaaagcaaacagcgctgcgtgccgggaaagtagctccgtgagcacctgcaaagccgcctagccagtttccggtatagagttgtacaccattctctgtggtatatacttccattgtacgtccgctttcgggttccgtataagtagcggcaaggcttaattcaccactctctgtcttattcagtacgtagcagtgatcgtaacctgcaccattcaccaattgctggaacttatcatcaatacgttcaccaatggtatgcggtgtacggaaatccataggagtaccttctaccttcaggatttctcctgtcggaatggacacttcgtcaatgggagtataatgatcagcgttgatagtaatgatgtggtccagaactgtaggggtgggattggcaatacctgccaaattgaagaagccgtggttggtgagattgacaacagttgccttgtctgtggtagcccgatattcaataaccagtgcattggtttcatcttccagacgataggtcatttctacttccagattaccgggaaagccctcttcgccatctgcggatgtatagttgaatacaacagtcgtcggatccggttggactgcatcccacactctggcgtggaaacctgtgggtccaccgtgcaaagaatttggtccattgttgattgtcagattgtgctcttcgccataaagagtgaattttcctttggctatacggtttccgtaacgtccgatagtggtgttgaggaaaggttcggggctgttgactacatggtctatactgtcatgtcccaaaattacgttagcatacttcccgtttttgtcggggaccataatggaaaggatagcgcatccgtagttagttactgcaacttccattccctgagcatttttaagaataaataaatcagtcttcttgttatttatatctttttgaaagtcttccttgttcaaacccgacaagttactttccgttgacacggtgtttatcatatccatggtataaaattaaatttcttgcaaataaaaagaaattcttccgtactcccaagggtttatcttgaaatgtgaagaacattttaggaaagtttagcgtttaacatttacgaggcgaattgatattttttgtaagtttgtcgcgttaatctaaaaaaatgtaacatttttatttaaagctctaacaaaaactacgaatgtatcctttgaaatttgagcctattctgaagcagacgctttggggaggcgacaagattattgctttcaagcaattgaatgaaacgctatccggagtaggcgaaagctgggaaatctcggctgtagaagacaacgagtctgtcgtcgctaatgggcctgacaaaggccttacgctccctgagatggtgggaaaataccgtcatgaacttgtcggtgaagcgaattactctcgttttggcacaaagtttcccttgttgataaaattcattgatgccaagttggatttatccattcaggtacatccgggagatgagttggcgagaaaacgtcacaattctttcggcaagaatgaaatgtggtatgtggtatcggcagataagggggcaaaactgatttccggcttttctgagcagataactccgaaagaatacaaggaaagagtttataatggaacctttgctgaagtgctgcaaacgtgcgatgtaaaaccgggggatgtgttctatgtgcctgccggtcgtgtgcatggtattggtgccggtgcttttgttgctgaaattcagcagacttcggatatcacttatcgtattttcgattacaatcggaaagacaaagagggtaaatctcgcgagttgcacactactcaggctactgaggctattaattttgctgatgtacaggatgacttccgtacagaatatgatcatctgaagaacgaaccggtggaattggttgccagtccttacttcactacttctctctatgacatgacagaagaaattacatgtgactattctgaattggattcatttgtgatttttatttgtgtggaaggcgcatgccgtatcacggacgacagccagaatgagattgctgtgcgtgcaggtgaaacgatattgctgcctgcgattacgcaagaagttacgattgttccggaagacggtggcgtgaagttactcgaaacgtatctgtaatcattggaattgaatcaataaaaagagccgcgtccctcaatggaagaacgcggctttttttgctttatggcgcctgtttatcttctggctccgaacatgcttctgacctttctcatcatctttactccgagcattagtccgtcgaagacagccatgcccgtattgaaagcgcgcataatggcgttgcccttgtcggcagcgggtgcaaggggggcaaacagttctcttgccgtatccgtcatgatttctttctgtacatgcaatttcttccgtaattctttttttcgtagcgcgatactttccagggtcatggaagaggagtcaggcatattgttcatgatgatatcatttttcattatcattctcaaagaacagtccggcaatgaagttcaccattggattgatgatgagtttcttgcggaaagtgattactaataaaacaagcagaaggtgaaaagcggcgatgatgctgaagcttaccatgagtccgcctacaagcggatctaatatataagctaatgcaaatgacaaataaaacagtgccaccatgccaagaatgataaccaccgatagtagtaccaaggcggaaagcaggattgagagtttttcggttatttccagtttggtatattctttttggagtttcagatatttcttaaactcaacgaataattgctggagattttcaatacttctgtcgtctgcgaacatcatagtggctctgtttttttgtaagttttgttttattcggctccttcgcctttaatttctgctgcgatttcgtctaccagattttccatttcactacggttcagacgaattccttttttacggagaatttccgcaatcttatggcgggtgtcttctcctttttcgggagcaaataaaataccaacggctgcgcctactgctgcaccgcccagaaaagctacgagtacatttaatcctttcataattgttctcctttctatttatagaggtttatactacaaagctaacatttttctttataaagttgttcgcttaacttcttttttttcgaaatatttatttttctgttccaagctcggtactaatccgagaactgtccggaatgtactagctccgtatctgttccgtactggctctgtatctgctccgtattaggtccgtagctactctaagcgtatagatacggagctggtacggctcaggtaatgcccgggtacagttcgaacctggttttgtctggtaggaaaagaaacgtgattaatttaatttaactataatgctgccctttggattgattgttccacgtacatttgtcttattattcggaatattagctacatgaagataggaaagagaaagatatttctgattatcgggttgatagtgcttgtgctggcagcttgtagtaatgttgacggcgatttggatgataagtggcagttgaggcaatatcaatatgccgacggttcaattgaacggcaagatagcatcttttataatttccagaaaggtagcttttctgccatttgtttgttgaaaaatggtagctatcaaacgttttttggaaattattctttgaaaggagataaaatttctattattttgctgcctcaaagtatggaagacgaaaactattcattctatatggggtgggaaaatggagaacggacatttgcaatggaagaattgacttcttcatcccttcatctggaatatgagggagttcgttatatattccgcagatattgagtatagatagattgtagaaattactaacaaaaacaatatgattatgaaaaaattagcatttttaggaatgggattgtgcattgcattggcattctcttcttgtaaatcgagtgaaagcgcttataaaaaagcatatgaaaaagcaaaacagcaagaactggcagaacctcaggttactgaaccggtagaagtttctccggtagtgagtgctccggttgaagcaaaggttgtggaaagtgtgcctgttgcaactgccggtgtacgtcaggaaaaagtggacataatttctggcgtgggtggtttgaaagattacagtgtggtttgtggtagctttagtgtgaaggctaatgccgaaagtctgaaagattttttggataaggaaggttatagtgctgtgattgcctttaatccggatgcagcaatgtatcgtgtaattgtgagtacttttgccgacagagcttctgcagctgacgcacgtgacgctttcaagtctaaatactctaatcgtaaagatttccagagtgcctggttgctgtatcgtctcaaataacattagattttatttgatatttgattgatagaaaggaaaactttcctttcaagatgagagtgcattaaaagattttaatgcactcttatttttttgcctgatctatgaatttgatattctgtatcgtgatgagatgcttcgacaagcttagtatgacaggcattctcaaagtatagactaattgtgatgatgtctttattgtgaattatttatgcgaaaaaagccgataataggtactacttattggagaaaaagttaattttgggaataatttatctaacatgacttgattacatgaaataacgcatttctctttaatgaggaatataacaatagataacgtatgaagaaatttaaatttttattgctgagcgcgtgtattgcgctagttgcgtgcacaactaaaacatcgtctgaacaacaagtttcagacaaagggacaaaatggagttgggacaagggaacgattgttgtagaaactcccgagcgtccggctgaacaaacaagtgtaatagggctgacgatacctaaaatggaagtggttcgtgtgggatttgtaggtttgggaatgcgtggtcccggagctgtagaacgttttacgtatattccgggtgtagaaatcgttgctttatgtgactatgaaaaggaacgggcagagaaatgtcagaagtatttacagagagcttctatgcctaaagcagctatatattcaggtgaaaaaggatacgaagaattgtgtaaacgggatgatatagatctggtgtatatcgcaacagattggctgcatcatttccctgtcgctatgtgtgcgatggagaataataaaaatgtcgccatcgaagttccttctgctatggacttgaaagagtgttgggcattggtaaatatgagcgagaagactcgcaaacattgtatgatccttgagaactgctgttatgactggtttgaaatgaatactctgaatatggcacaacagggtgtgtttggggaggtcgttcgtgcccagggagcttatattcataatctggaacctttctgggatcattactggaagaatggtgaaaatgacaaactgggttggcgtctggaatataatatgaaacatcggggagatgtatatgccactcatggtcttggtcctgtagcgcaagcgttggatatacatcgtggtgaccgtatgaagacactcgttgctatggataccaaatcggtagtaggtaagtcgttggtagaagaaagaacgggacagccttgtgagaatttccgtaacggtgaccatacaactacgttgattcgtacggaaaatggaaaggtgattgagatacaacatgatgtgatgactccgcaaccctataaccgcctatatcagttgaccggtaccaaggggttcgcaaataaatatccgatagaaggttatgcattggatgcaaaacagctgaatgcgtcgggagttgcgcctgaggtagataacttgaattcccatagttttatgcctaaaaaagatatggaagctctagtgcagaaataccagcatcccatcctgaagaaatatggtgaaatggcaaaagaagttggtggtcatggtggcatggactttattatggatagccgtttggtgtattgcctgcaaaatggacttcccttagatatggatgtctatgatttggcagaatggtgttgtctggccgagttaggcgaattgtctatggacaacaattgtgcagctgttgctttcccggactttacccgtggcgaatggaataaagtgaaggggtataagcatgcttatgcttcccctgaagatgaaagtgttgccatggagaaagccaaaaaaatcacggcaaagttgaaagaaaaaggtgccgtagaatgggcgggtgaagctgtggaaaataaaaagtagatgtaagtagagattaggtaaaagtagacgaaaaaggaacttcaacgtttggagttccttttttgatttattgattgtgaaaagtgcttataaatgtattaggtagtttaaaagaagttataaaacgaagctcggaaacttttgaggatgaaaaagtttttaattttgcacactatgtgtaaatatagataccatatatggaacaaaaatatatattaagcgcaatagatgctgctctgcaagccggtgcagacattctttccatctataatgacccggcatcggactttgaaatagaaaaaaaagcggataactcccctttaaccattgcggatcgcaaggcacatgaaacgattatcggttttctgtgcgatactccttttcccattctgagtgaagaagggaaacatttaccctatgcagaacgctgtggatgggatgctttgtggattgtagaccctctggacggtaccaaggagtttattaaacgaaatggagagtttactgtaaatatcgcatgggttaatcattcagtacccgtaatgggagttatttatcttcctgtgaaacaggaactttattttgcagaagaaagcattggggcatacaaactctccaatgtaacttctcgcggaaatgcttcactggatgaactgattgcatccgctacccgtctgccttctgttaccgaaagaggaaaatttgtaatcgtggcttcccgttcgcatctaactccggagacggaggcttatattgaagaaatgaagcgtcaacactcggaagtagaacttatatctagtggtagttccattaaaatctgccttgtagccgaaggaaaggcggatgtatatcctcgttttgcacctaccatggaatgggatacggcagcaggacatgctatagcacgtgctgccggattggaagtttatcaggctggaaaagaagagccgctttgttacaataaagagaatttactgaatccgtggtttgtggtggaacctaagcaaatgaaatagtaacaagatacagtataatgtatgacatttgagataatatttgtgctattggcacttttgggcatggtggtggcattggcattggataaaatgcgtcccggcatggtgctattttccgttgtagttttgttcttatgtgccggcatcctgacacccaaagagatgctggaaggttttagtaataaaggaatgattaccgtagctatgctatttttggtcagtgagggtattcgtcagtccggagcattgggacaggttatcaaaaagttgcttcctcagggcaagacgactgtgtttaaagcccaacttcgcatgcttcccactatctcttttatttctgcttttcttaataacacccctgttgttgtaatatttgctccgataatcaagcgttgggcagagtcggtaaaattgcctgctaccaagtttttgatacctctttcttatgtgactattttgggaggtatatgtactcttatcggaacttctactaacttggtagtacacggcatgatattagaggcaggttatgaaggatttactatgtttgaattaggcaaagtgggtattttcatagctatagcaggaattatttatttattgctattttcttctaaactcttgccggatgttcgtacggatgctgtgaagcaagatgacgaaccggaagaagatgttggtttgcatcgggttgaggctgtacttggtcctcgttttcctggtattaacaagaagttgggagagtttaattttcagcgtcactatggagcagctgttaaggaaataaagcggagcggacaaagtattactgcgaatctggataatgaggttttgcgtgagggtgatacattagtggtgatggcggatgattcttttgttcaaacttggggagagtcttccgtgttcgttttgttggccaatggcaaagataacgaaccggttcccggaaaggggaaacgttggtttgcccttttattactgatattgatgattaccggggctacggtaggcgagctgccggttgtgaaagaggcattcccgaatatcaagttggatatgtttttctttgtttctgtgactactatcattatggcatggactaaaatttttccggcccgtaagtacactaaatacatttcatgggatatcctgataacaattgcgtgtgcttttgccatcagtaaagcaatggttaattccggtgtggcagatgtcgtggcaacttatatcatcggtatgactgaacattacggtcctcaggtgttactggcagctgtatttatcattacgaacttgtttaccgaattgataaccaataatgccgctgctgcattagctttcccattggcgctctccatttcttcgcagatgggtgtcagccctatgcctttctttgtagtgatctgtatggctgcctctgccagtttctctacacctatcggttatcagacaaatttgattgtgcaaggtattggaaactataagttcactgattttgtccgtatcggattgccgctgaatattatagctttcttgatatccatattccttattccattaatttggcccttttaataattagattatgacagacaataatatatatccgatttttgataggatgttgtcaagagaggataaagaagaacttctcggtcagcatagtgtgatgatatggtttaccggattgagcggttccggtaaaagtacgatagctattgctttggagcgcgaattgcataagcgaggtttactttgccgcattctggacggggataatatccgtagtggtatcaataataatttgggctttactgaagctgatcgtgtagaaaatatccgccgtattgcagaagtttccaaactttttattgattcaggcattataactattgctgcttttatcagtcctaacaatgatatccgagaaatggcggctaatatcatcgggcaggaggacttctatgaagtgtatgtaagtacccctttgactgagtgtgagcgtagggatgtaaaggggctgtacgcaaaggcacgccggggagagattaaaaattttacggggatttctgctccgtttgaagcaccccttcatccggcattgacgttagatacctcaaaactcagcctggaagaatcagtcaaccaactgctcgacctcattttaccgaaaatacagattaaaaagtgattatataaaaaatggaagaatataaattgagccatctgaaagaactcgaagcagagtctattcatatcatccgtgaagtggcagcggaatttgaaaatccggtgatgctttatagtattggaaaagactcttcggtaatggttcgccttgccgaaaaagccttttatccgggtaaagtacccttcccgttgatgcatatcgattcgaagtggaaatttaaggaaatgattcaattccgcgatgagtatgccaaaaaacatggctggaatctgatagtagaaagtaatatggaggcttttcatgcaggtgtaggaccgtttactcatggaagtaaagtacacacagacttgatgaaaactaaggctcttctgagtgctttggataaatataaatttgacgcagcttttgggggtgctcgtcgtgacgaagagaaatcacgtgcgaaagaacgtattttttcttttcgtgataagttccaccaatgggacccgaagaaccagcgtccggaattgtgggatatctacaatgcccgtgtgcataagggagaaagcattcgtgtgttcccgttgagtaactggacggagctggatatctggcaatacattcgtttggaaaatattcctattgttccgttgtattatgctaaggagcgtccgtgcgtagaaattgatggtaatttgattatggcagatgatgaccgcctgcctgaaaaatatcgtgatcagataaagatgaaaatggtacgtttccgtacgttgggttgttggccgttgaccggtgcggtagagagcaatgcggatacgattgagacaattgtagaggagatgatgactaccaccaagagtgagcgtaccacccgtgtaatcgactttgatcaggatgccagtatggagcagaaaaagcgtgagggatacttttaagaattaaaaattaaaaattaaaacctgaggattgaaatcttaaacctgacctttagaactttaatgcttaggtttaagaagataaaggtgacaattaaaaagtaaaaagtgatggagaataactctaaactaaatatcaaggagtttctggataaagacgaacagaaagacttactccgctttctgactgccggttcggtggatgatggaaaatctacgttgatcgggcgtttgttgtttgatagcaagaaattgtatgaagaccagttagatgcattggaacgtgatagtaagcgtatgggaaatgccggtgatcacattgattatgcattgctgctggatggtctgaaagcagaacgtgaacaaggtattacgattgatgtggcatatcgatatttctctactaataatcgtaaattcatcattgctgatactccggggcacgagcaatatacgcgtaatatgattaccggcggttcaacggctaatctggctatcattcttgtagatgcccgtaccggtgtcattacacagacgcgtcgtcattcttttctggtgtctttgttgggcattaagcatgtggtgcttgctgttaataaaatggacttggtaggcttctctgaggagcgctttaatgaaatcgttaaagagtataaacagtttattgcaccattgggtattcctgatgtgacttgtattccgctctccgctttggatggcgataatgtagtggagaggtctgaacgcactccatggtacaatggcatttctttgctcgatttcttggagactgtccatattgataacgatcataacctgtcggacttccgtttcccggtacagtatgtattgcgccctaatcttgatttccgtggtttttgcggtaaagttgcatcaggggtagtacgtaaaggggatgaagtgatagcgttaccttcaggcaaaaaatcacgtgtcaagagcattgttacgtatgacggcgaactggattatgcttttccgcctcagtctgtaactttaacgctggacgatgagattgacgtatcgagaggagagatgttggtacatcctgataatttaccggttgtagatcgcaattttgaggccatgctggtgtggatggatgaagagccgatggatctcaataaatctttcttcatcaagcagactactaatttgagtcgttcacgtatcagtaacattaaatataaagtagatgttaatacgatggatcagttgtccgttgataatggacgattgacgcctgatgatctgcctatgcagttaaatcagatagctcgtgttgttcttactactgccaaggaattattctttgatccttatcaaaaaaataaggcaacaggtgcattcattctgattgatccgattaccaataataccagtgctgtcggtatgattatcgatagggtagaggataaggatatgcatctttctgaagatcttccggttttgaacttaccgaagttagaaattgctcccgaacactatgaagccatagaaaaagcggtgaaagatttgaagcgccaaggtattgaagtgaaaataatcaaataatgtaccataattatgggtttactggaatttaacaaactccctataaatactttggtgggagccgattggaaaacatttaatgctattacgagagggcgggaaattgatgcggcatacaaaggcaaataccgtttgactaaggcggtatgtcgtctgctttctacactagctcctttgcagaacggacgttatgagaaacggttggcatcccaaccgttagagcatgatccggtattcattcttggccattggcgcagcgggacgacctttgtgcataatgtcttctcatgtgacaagcattttggctataatactacttaccaaactgtatttccgcatctgatgatgtggggacagcctttcttcaagaagaacatgagctggctgatgcctgataagcgtcctacagataacatggaacttgctgtagatctgccacaggaagaagagtttgcacttgccaatatgatgccttatacctattataacttttggttcctcccaaagtatcagcaagaatatgcagataaatatttgctgtttgatgatataacggaaaaggaactgaaggtttttgaagaagtgtttatcaagctgattaagatatcattgtggaatactaacggaacacagttcttgagtaagaatccgccccatacgggacgtgtgaaggaactggtcaaaatgttccctaatgctaaatttatctatctgatgcgtaatccttatacggtgttcgagagtacccgaagtttcttcacgaatacaatccagccgttgaagttgcaggatatcagtaatgacgaaattgaaaagaatattctttctatttatgccaaactgtatcataaatacgaggctgataaatcttgtattcctgccggtaatctgatggaagtaaagttcgaagacttcgaagcggatgctatggggatgactgagcagatttatcgtggtttgtctattcccggatttgctgaagcacgcaatgatatagaaaagtatgtaggtggaaagaagggatataagaagaataaatataaatatgatgatcgcaccgtgcaattggttcaggataactggaactttgcattggagcagtggaaatatgaactttaattaaaaaaaagctaatgagatgatgcagaagaaaatttgtatgtacggcttgctatccgcttttttatgttgcggaacggcacttgcacagcagcaacagcatactgtggaagtgattccgttcggagacatggatcaatggatagaccgtcagattaaagagtcgggcattatcggtggtgcgttgaagaatgtatatgctattggaccgactgcgactattcgtgagaataaggcctataagaacatgggtggttcgccatgggctacttcgaatgtgatggcgcgcgtggcgggtattactaaaaccaatacttcagtgtttcccgagaagcgtggcgatggctactgtgcccgtatggatacccgtatggaaagcgtaaaagtattgggtattgttgatatcacagtacttgccgcaggttctatgtttttgggggaagtgcatgagccgattaagggcacaaagaatccgcaaaagatgctgaattccggtattccctttaccaagaaacctatcgctgtgcagtttgactataaagttaatatgtctgatagggaaaagcggattcgtgctaccggttttagccggataacggacgtagaaggtaaagacttcccggaggtgaatttgtttttgcagaagcgttgggaagacaaggatggcaatatttttgctaagcgggtagggactatggtggttcgttactataatactactgattggcataataatgctacttattcagtcatgtatggagatatcaccggtgatcctgcttataagccccacatgatgcgtttgcaggtagaagaacgttacgctattaacagtaaaggtgaaagtgttccggtcaaagaagtagcatggggaacagaagaagatgctcctacacatttattattgcagtttacttccagccatggaggagcatacataggttctcccggtaattcactttggatcgataatgtgaaactggtatattaaaatattatttcagtataaaatgaagagggcggctaacatcagttagccgccctctcttcgattagagtttacaactctttgtccctatatcttattccagaattactactcggttcaaatagttcttac

SEQ ID NO: 6360 - DNA, 40738 bp, Unknown
  gut microbiota DNA sequence
agtaatacaaatacttgaatttttaaccatagagtgggctttaatccatgggcaaatatattttttagtaaaaaaagaacagataagcacatattttgctatctttgccccctgttttcaaaaggcttgtaattaagagttaaatatttcatattatataataaacatttcatgggattactacaagacaaattggcgaaatacgacctgccacagcaatatatggcaatgggcgtatacccctatttccgcacaattgacagccatcaggatactgaggtgttgatggatggtaaaaaagtcctgatgttcggttcgaatgcttatacaggactgacttacgataaaagaataatagaagccgcaaaagccgccacagataaatacggtacaggttgtgcaggttcccgtttattaaatggaactcttgatatacatgtagagttggaaaaagaactggctgagtttgtcggaaaagacgatgcactctgtttttccaccggatttactgtaaatgagggtgttattccgcaattgacgggacgtaacgattacattatctgtgacgaccgcgtgcacgcttccatcgtagatggccgccgtctctccttttctactcaattgaagtacaaacataacgatatggccgatctggaaaaagaactccagaaatgcgagccggatgctatcaaactgatcgtggtggatagtgttttctctatggaaggcgaccttgccaacctccccgaaatcgtacgtttgaagaaaaaatacaatgccagcatcatggtggacgaagcacacggattgggtgtattcggaaaacaaggacgcggtgtttgcgatcatttcggtgtgacggatgatatcgacctgattatgggtacgttcagcaagtcactggcttctatcggtggtttcgttgccggagatgcttcggtaatcaactggttgcgccacaatgcccgttcttatatattccaggcaagtaacacgcctgctgctacggctgctgcccgtgaagctcttcacatcattatgaacgaaccggaacgtcagcaacgtttgtgggacatcaccaactatgcattgaagaaattccgtgatgccggtttcgaaatcggtgaaactgaatctcctatcattccgttgtatgtgcgtgatgcggaaaagacatttatcgtaactaagatggcgtttgacgaaggtatcttcatcaatccggttattccgcccgcttgtgcaccgcaagatacgttggtacgcgtagcattgatggctactcacaccaaagagcaggtagactatgctgttgagaagttgacgaaatgtttccgtgaactcggagtgattgaataaggattttcctgaaatcagataaaatgaaaagagactgtcttcaaaaggcagtctcttttttttaggaattgataaaattatgtaagtttgtagcagaatactgaattcctattcaatgaaaaacatcattaacaagatcaggcaagtttatccggtttccgacgaagcacttcaggcattgcaggcagatatgcaggtaagatattaccctaaaaatacttatatagtgcactcgggggtaacggaccgtctggtttattttattgaagagggagttgcccgttccgtatttcatcacaacggacaggatactaccacctggttcagccaggaaggtgacattactttcggtatggattcgttgtattacaaacagccgtcagtagagagcattgaagctctttcggattgcaaaatctatgtcatccatatagacaagctgaatcttctttacgaaacgtacatcgatatagccaattggggaagaatcctgcatcagaatgtaaataaggagcttagccatatgtttgtggagcgtcttcagctttcgcccaaggagagatacgaacagtttaaccggcgctatcctggattgataaaccgggtgaaactgaagtatgtggctgcttttctgggtatttccatttatacactcagccgggtgcgtgcccaaaaataagtattcgccggtcttttttgcttttgagcaaaaaaacttcagatggcaagctgtatctttgccatctgaaaatattaacttaatactaagaaacaaatgtctaataccccctcagcagcattttcggataccaaggcgcattacgatcttctggatggacttcgtggtgtagcggcccttatggtgatatggtatcatatattcgaaggctatgcttttgcaagcgataccatgattacaacgttcaatcatggatatttagccgtggattttttctttatcctttcaggtttcgttatcggctatgcctatgatgaccgttggggtaagagtcttacaatgaaagatttctttaagcgtcgtttgatacgtcttcatcctatggtgataatgggggctgttctgggtgctattacattctgtattcagggttccgtgcaatggggtggaacacatatcggcatctccatgataatgctgtctctgctctgcacgatattctttattcccgcaatgccgggcgtaggttatgaagttcgtggcaacggtgagatgtttccgttgaacgggccttgctggtcgttgttcttcgagtatataggtaatattctttatgccttgtttatccgtcgcttatccaataaggcgctgactgtgctcgttgtattgttgggagtggcattggcgctattcgcagtcttcgatgtttccggttatggaaatataggtgtgggctggacgttggacggtgtcaactttggtggcggattattgagaatgttgttcccgttttctgtgggtatgcttatgtcgcgtaacttcaagcctatgaaggtgaaaggcgcgttctggatatgtaccattgtattgattgctttgttctcagtaccctatctggaaggtgcggagccgatttgtacaaatggtgcttatgaagcattttgtattatcgtagctttccccacccttgtatggataggagcatcgggaactactacggataaaaagtcaactcagatatgtaagttcctgggagatatctcttatccgatttatgtgatacattatccgttcatgtatctgttctatgcatggctgattaaaaatcaactctttactttgggagaaacctggcaggttgctttatgcgtttatgccttgaatgtagtgttggcttacctgtgcttgaaactgtatgatgagcctatacgaaaatatttggctaaacggtttttaaagaagaagtgattacgccctttcagggttcaggtcggggctgagatcgcgatgccccactactctagtacacattatttttcataacctttcattttcaatataattatgggtcgcatgatataatctttaagaaaggaagcattatagtataaactggaatcttgcctgcaatacactaaaattcttgtcgcttatctcccgaatgtgttttccggggattacatagctgtagtttactttaatccctatatgcttgtttatgtagtaattcaatcccagagaaaaatccttttgtgctccgcctaatacttctgcagtccggttgttcatatctacgatattgaaacgtccgcagagttcgagcgcacggcctatagggcgggcaggacatgccagagctgcatcataggcataagtatctcctatcaggagccacgaacattgcgcatatccaccctgtccggtatagtcggcaaggccattcctgcgttttacctgagtacggatatattcgctttgaaggaagaattttccgtaatagatcagcagttcagtacccaacttcacttgatggcgggcattatccacttccgcataaatcaggttacgattgtcgatagtactcactccggcagatttatagacaaaggtattcttgttatcatcatccggcaaagcaccatcgggagtgcgatagatagcggcaataccgagatgcaatagctttccagcttcatttacaggtcggtaaacaaaacgtccgtctacggcataaccttgcgaggtattctttaagttactgatatcgttgtcggtaaacaatcctccgcaagcataataatgcgtagcattgtaagtgtaggcaactcccagacgccgactgttggtcatggcaagcacagagccgggtgactgatggaaacgtaggtcgaaagtgctgcaaagcatatccatggtgaaaggttcgtagaattgccctacctggatgatatgcttaccggaagtgtaagtagcgaaagcatctttgatagaaaccttgctgcctacatagcctatttccactttcatgtcccagcgctggtaagtggccttcatgcctacgcgcagatcattgaattccgtaccgttaccgaaatgattgtcattcctgagataaacaccgccatccataagcatgcggccggttactttgtactgtaatttgtcggagagagtttcctgtgctgtggcggtcaaagaagtgacgaccgccagcaggcacagggaggatttagaaaggtaattcattagtaagaagtttgttggactacttctatcagacgtgcgaaatcttcaggatgtacatctccgatgttgccgatgcggaaagtatctgcctgggatatcttgcccggatagatgacgaaacctttttctttcagttgagtgtagaaagagttgaagtcgaaaccagctttcgggtaaaggaaagaggtgatgatgggcgactggaattcgtccggcagcaaggtttggaagccgagtgcgcgcattccttctaccaatatgcggtggttttcgcaatatctcttgtggcgggcggctactcccccctcttcttccagttcggcaagtgcctgcttgaaggctcttactacatgggtgggcgaagtaaacctccatttgccatgtcctttttccatcgtctcccattggtcgtaaatatcgagtgagagtgaacgggaaacacctttgcagtgtaacagttcggatttgcgggctatgataaaaccgaagccgggaacaccctggatacatttgttggcactgctgatcatgaagtcgatacctaattcatgcatatccagaggcacaccgccgaagctgctcatagcgtctacaatcagctttttgttgtggagcttcacaatgtgggcaatctctttgagaggattcaggataccggtagtggtttcgcaatgtactacggctacatgggtgatatctgaattgttggacaggtaatcgtctacatagtcaacggaaacctgttcggtttcttcgaaagtaagcatatcgtagttgatgccgtgatattcggcaatgtggcccatacggtcaccataagcgccattgctgaggataagtagtttgtgcttgggagtgatgacactgccgataacagcttccacgcaataagtaccgcttccctgcaagagtacggaagtgtattcattggtggctgtggtggcaagggcaacgagggatttgcggatttcttctacaatgtgtacgttatagtcggcgtcccatgtacaccaatcggtcatcatggcttcttttacggtttctgacgtggttaatgggccgggggttaataataaatagggtttcatattggtttgatatttaaaaggattaataattcgtattcagtttatgattgataagttctatgatttggggaagctcttcgatgctgtccaccacatagtgggcgcctgccagaagcatgcgctgtctgacttctgctttccgggcagtgagcgttgcgggagacatttgttctacttccttctgggttagtcccagttcgttactgccgagtatgacgccgacggtccagactttggcattgataccctctttgatgtcggtaatggtgtcaccgtacttcagaacacagtctgttgaagggatggcaagaccgatcatgttttggtaaatcatataagggaaaggacgtccggcaggcaggccgttgggagtgacacacttgtctgtggtgtaacctttgcgggctgcattggggagcactacgtccatcatagcttgggtgtagccggtggtggaacctattttgatgccttgttttctcagttcattcagggtatcaatgactccgggaatggggtcggtgtagtttgccagggaagcaaaaaggtattcctcgaatttggcgttcatatctgttacgtcctgttcgttccagggacggtgatagagtttctcaaactcctcgcctactccgtccatcttgaacagttcgcggatgtggtctatcttggccattcccatagggcggcgggcttgtttcatcgtgatgttgatgcctatttcattgaaggctttcaagaaggcggctaccggagcgaaacatccgtaatcaactgcagagcctgcccagtccataatgatacattctattcttttcatgtttacttgttattttataatgagttgtttaataataaattggggtttatctatttttgtaagtcttttaggctacctgcaaaacttgaattattcatctgttgaattattgcttattgcgataagatgttcttatttctcttacttttttagctgggcatcacagaaaatgcagattgtaacatttccgatttctcttctaccgcacgtcccgtgcgcaggagttcttctttcttatgtctctgtaccagatagacaatagaacagctgaatgctacggtacagattattcctacataaccggacatctggttgtaaaaatcgagccaattgatatccgtattaaagaattccttgaacatcaggacgagtacagtaccagtatatccgatgaaatcaatagtcacaataaagaatcctacatttccttttatcttgaagcatgctatgaagcggtcgaaaaatatgctttgaaaacaaaggtaggcaatgtaaaggctcagactctggatgaacaaccaagtcacggtgctgagttgaagcgtatcgtaattgagtgatacgaaactcatggtagccgttccggcaaccaccatactcaagaggatgaccaatactttgatattactctttacaaagaccatcattccgaaaagtgccaggatgataagagtaacaacactgtcgatctgtgcaaacagccaggaagaatgtccgctcatgtcgataatcttcaccaggaaatcttctttaatatcccggaggataaccaacagaaggttggctacgaacaggaggatcaatacaggcatgaagttgcggaacagttctttgcgttgttttccgttgagagtgacacgctggctcttttcggcaatgtcctgttgggtgggttgcggcaggcgattcagggtgtaacccagcaaggcaagcaatggcagggcaaaggcaccgatgagagcgggcatccagaactctcctacatgcagggtgttcataacgaacagtccgatagattttgccacgccggagctgatgataatactgatacccaaaaggctggcaagaatatcggtggtgcgtctgccttcgatgaagctgaatatcacgccccacatgcagcccagtgacaaaccgttgaagaacatggcgaagatattataaggagcgggcaagagtccgaagagaaccagggagagttccgctaccagaatagaagccagaatgaacttcatgcggtgctccttctttaattcggaaatcaacttgataccgacaaacttggcgatgaggtagcccagaatctggacgatggtaaccaatactttataatccaatccgaaggcatccagtccgtcgaaggaggcagcggtgaaaggtttgcgaagcgcatatactaaggagtacgaaagaagcgctgcacctcctgcccaaagtatgaatacaagatcggatattttcttgtttgaaagtagttccgttttaatgtcggtaattgttttcattttattctcttttgatttcgagggcaaaagtagaaggatgatgttacagaaaaaatgaatatttattattaatacatttaattatcggatagaaaataaagtaacattaatgtaacatttatgcaatcggaatataacacaagaggctgttctttgcaaattaaaaaccaaaaacacttacaaaatatggaggaactattagagatatataagcggatagaagatctgcgtaataaaggggtgaaaatgaaagatatagctgacaaaacgaatatgcccgccagtgtgctgtcttctctctattcaagtgtgctgcccacctttgcaagatcggtaaagaaaggaatgatggaagaagaagcattggactatgccctgtctcaagtgaataatgtttcgaagaaacgtttgctcggcaaccttactgaaatgaaagagcagttgctggaactggaacccgtgacaaccggtaaccagaaggaaattccattcgtcagaatgttgaccgaagagatgaatcattcggcacaggaagtgtataattatagtggtatatatataagttatagtctttcgtcttcgagcgattgcctgaagatggaaccgtatctgattagtgcctccgaaaacaatgactatgtacaggtgactcatatgagcgcttacaacacaacgcaccggggaatcgggttgttaaataatcatcagaatgcatatatcatcttcaacgaaagggaggctccgcagcttgcattattcaccatctatctgcaactgcccatgtacgactatccgtctatgctgaaagggctttacctgagtctggactataaccggaatccgatagcccggcggattgttttcgtgaaatattccgatagcaccagcatggatgattttatagaactgaaaggcggactgctgaccgaggaagaactgacaccagagcaaaaggtctattttgaatatacatgccggggcggggattatataaaaacgtgtacggtgccctcccctcacctgaatggtgacgatctggaaagggagaagaagatgctgaaactgtgattctgctaataagaatagaacgacggtgtatcttttgttacggttttacagtttttcttatcatcttgctttgatattgaaagttttttagtatgtttgccgcattattaatgaaaaacacgtcttttcaatgaaaaagcaagatttcctgtttattattctggtggtggtagtctttctacccttctttttgagtgacgcggtttatgactggtataagtcgttcaatgctgcacatggtatggtgatgagctttctgaagtttgccattctgtcttcgttgggcgaagtgctgggattacgaatcagtgcgggagtctacaaccggaagggtttcggtattattccgcgcatggtggtatggggtatactcggtatgggtatcaatgctgctatgattatcttttcaaaaggtgtgccgcagttcatggagtatatgggaatggcaaatgctgccgcaacgtttacaagtgaagcgatgtctctcgataaggtgctggtggcgctggccatatcggtaacgatgaacacaatctttgctccggtattcatgactttccataaaataacagatacgcatatcttgatgtgcggcggttctataaagagtcttatcactcctattccgatgacaaaaatcatcaccggactgaactggaacgtgcaatggaacttcgtctttaagaagacaatcccgttcttctggtatcctgcacacaccattactttcatgcttccgccggatatgcgcgtgttgtttgcagcattgctgggcattgtgctgggagtattgctggcagtggcggcacggaaatagtttttttattacctttgcttcctgctaaacgaaaatagatgtatgaaactatatagtaagcaggaagcaatcgcacgcatgaatatgctggcaggctgttcaaagtcgtttgtctttctgattgattattcgcaggaacaggtttatgtggaagagacggcagaggtctcaccggaggagttgatatataacctgaatggatttacgaatgaagcagttgccggtttaacggatgaattgcttccggagagtttgtcggaacagatagaatggatctcacagcctgtttcttttcaggaatatagtcgtgctttcggacatgtgaaaaagaatattcttgccggaaacagctttcttacgaatttaacttgccggactccggtacaaaccaatctgactttaaagaatatatattgtaactcccgtgctttatataaagtatgggtaaagaatcgttttgtagttttctctccggagatttttgttcggataaagaaagggattatcagctcttatcccatgaaaggtacgatagacgctaccctgcccgatgccgtacaaaccttgatgaacgacgggaaagaagcggcggaacatgctacgattgtggatctgatcaggaatgatctgagtattgtggcatctcatgtccgggtggagcgttatcgctatatagatgtgttgcagacaaatcgaggaccgatattgcagaccagttcggagatatgcggtgaacttccagaagattacaaacggcagttaggtgatattcttttcagtatgttgcctgccggttctattaccggtgcacccaaaaagaagacgatgcagattattcgtgaagctgaaggatatgaacggggattctatacgggaataaccggatatttcgatggagacaatatggatagtgccgtgatgatacgttttgtggagcaagaggcggacggaatgtattttaaaagcggtggtggcattactttcaagagtgacgcccgcagtgaatatgaagaaatgaaacagaaaatatatgtgccgatttattgaaacgatacaagtacgtgatggtaagttgcagaaccttgcctatcacaaccgtaggatgaatgagacgagacaggcggttttcagaatggcggatcaactggatattctggattatataggggattgtcctgaaagcggtttttataaatgccgggtagtttatggcagagaagtatgtgaggtggcattttccacttatacaatgaggactgtacgttcgctccggttggtcggttcggatacgattgattatcgctacaaaagtacggaccggaaggaactggaagcattgtatgccctgcgcggcaatcaggatgatgtattgattgtcagaaacaatcttttgacggatacttccattgctaatgtggcgttagaaaaagagggagtctggtatacaccgaggactcccttattgaaaggtacaaaacgtgcattgctgttggaacagggggtactgacggaatgtgatattccgtcagatgtgatttcctcctattcacatatcgctttatttaatgcgatgattgattttcagtctctggttctggagattaaccgggatacggttattcgtatttgatactatctaccggattatttcttgctgcccgataactgttcaggcatactgtgagcagggtgatgcagacagtgaagaacaaaggaagcaggaaatgaaggataccaatgtgtacatggtaagcaaattgttgcagccaataattcatcagatagtagaccaggggtacaatgagtataaaggctatacctatgtagtacaggaacgggcgattgacaagccataatatttgcccgaatgatgcaccgtgaatcttccgaattcctatttcgcgtatacgttgttggatagcataatgggtgatgccgaacaatccgaacagtgtgaggaacaaactgattgatgcatacatcagcaggatgcgggaaaagtcggtaacttcctgattattggagatcagtacctgataagggtcttcataattgaatggagtaccggggtattttttttcccataatccgcgaagatgattgataactgttgtgcgatcttgctcatcaaactgtaaggtcaatgtggtataattatcttggggcatttcgtgcagaatcattctcaatggaaacacattgtttgtgagcgaatatttcttgaaatctttcatgacaccgataatagtacctttctcactcttttcgggcacgtatttagagataggttgtcccaccggatcttctccttcgggcacaagatagcgaatgaaggactcgttgatgatgaccggcacagaggtacggagtaataaatggaatgtttgtttggcatccagcaagtcgaaatcgtatatatccaggaagtccggacagttttcataaagttcaagcatcagaagatcattcttctcaccattttggcggggaacggccatactcatggtataaaggcctgattgagaagatacaacagacttcactccggggatggatttaatgtcttctatccaagtagataaaggggattgccggggggcaccgattccaaactcaacgattcctttgtagcggcttccctcctgctctatcaggtccatttggctacggattatcataaaagcacttagcagtccgatagaaatcatgaattgtaaggtgaccagtgctgctacaatgcgctgtttcttacgacctgtaaagaagctgcggtaacggctttcggacaaggtctgtatcttccggctcatgtattctgccggaacaacggatagaatgatgacaaacagcaggataacagggaatacctgaacggagaaaagataggagaacgacagatgtgcggatattgttgcattgaatactgctaacaggtcgctcatcaacagaatggataacaagaacgctgtaatcaccatcaggaaagtatcggcaaagagttgccaacggatttgacggtggcttgcacctaaaaggctttcaatgtgcaaggtgcgtatttgcttcaataagcgtgaaaaactgaggttgatatagttgaagcaaccgatgaacaagattaataaagcagatagcagtccgacgcttaacagggccttttgccgatgctcgatacactggttgctatcttgtgtggtagtggtaaaataggattcctgtaaagtctgggtacggtaataccctttgcctaataaagtaggaagctcggttgtctcgaagcgttggcgaaaggcgttgaggtctgttccttctttgagaagtatcgaacaggtggttccttcgggactttttagatgcgtgagcaagtctgcctgcaacatgctttgcgatggcagacggaagacggcggcgatacggtaggcactttcgccggattgagggatatccagcagcttgccgaggcagtcggtggtaccgaaacaacgttcggccagagcttggctgatggcaatggtttccgggtgagtcaatacttcttctatttttcctgcaagggtttcgatggggataaacttgggcaatgtactgtctgccgatagcaggttcagttcggaatattcttggtcgcccacacggatttttgtgtgagtgatagcttgtgtgcgtagtgaagcttctatctcagggaattgtgagatgatttcggggacagattcgtgatatacgaatgttccttgcatttcttgttgtgcgaaaggtagtgtttgtgtcagccggaggatacggtcacggttggggttgttatactcgatgttgtattcgtataggacgaaggctgtcagtagattggtgcatgcgataccgataatcagactgacaagagaaatagtgacgaacaatttatttcgccaccagctacgcaggacaaacttcagaatgtacatgtttaatatcttgatatgttatttgaaaagtaggtcaatctgttaccctgggctcatcgaaagatatcttctcttgacacaaggttgtaggatgagattcttcgatcttgcccaggatgacaggaattggcagagtaaagaaacgtttacagactcacctctgtcaccacctgtccgtcgaacagattaatgatacgtcctgcaaaaccggcatcgtgctgtgagtgggttaccatgacgatggtggttccttctttgttcagttcattcagcaattccatcacttccttaccgttcttagagtccagattaccggtaggctcatcggcaaggatcagctttggattggctactacggcacgggcaatggctacacgttgctgctgaccaccggagagctgctgtgggaagtgtttgcttcggtgtgtaatggccatgcgttccatagctgtttccacgcgacgtttgcgttcggcggaaggaatgcccatgtagagcaacggcagttcgatgttttcgtatacgttcagttcgtcaatcaggttgaagctttggaatacgaaaccaataacacctttacgcaggctggtgcgttgtgcttcggtgtatttggatacttcctttccattgaggtagtattctccacccgaagggttatcgagcaagccgaggatattcagcaatgtagatttaccgcaaccggaaggtcccatgactgcgacgaactcgccttctttcacttcgatgttcacattgttcaaagcccatgtttgcacttcttctgtcttgaagattttctgcaggtttactgttttaatcataatagtgataattttaattagtaatattgtttattcattttttattatctcggccggattgatatgcatgatccggtaaattttgtatgcggtggtgaggaatatcatgaaggctacgctgaagaataacagaattccccaatcccagccctgtatacatttcactgtaccttcgcctattgatagcagcatcagtcgtaccaaaggataagcaaccgcaaaagccagcaggaaaatcaccagataagctttaccgaatataccggcaatgatccatggggtagctccgttgattttacgaatggctatttccttctgtcggctgactgtgtccatggagatggccgaatagatgctcagtacgaccaatagtatacttacaacggccaggattgtcatcgccacttgtgtcatatacattgatcccatcatcgtttgtttattatcagatagggagcggatttcaagaggcaaggttgtgggtacgtagttacgacagatatcagtgatgcgccggatacttttggcagcgtttgtacccggtgccagcttgacatagaaatacctgaaatggttgctggggaaaaataccgaaccgatggttcctcttccctgagtttctttatagagctctttgaaagtaccgatgatgcggtaactctggccctcaatctctactctgtcttgcacgttgtccttatccagttgtagtctgaaagcctcactgacataaacggtaccttctgcatctccattcacttcttttccttgcaatgggatcttcaggaatttaaagtaactcggagctcccattgctatgttaatcatgacctccgattggtcagctttcttataggtgcgcataaaatgatttccactttgcaaatcatctgtcatggttagtgtctctatacactccggcaatgcttgaatatcagataatatagggtttatgtgctgccacatacgttgactgttcaccttcagggaaatgatattttcttcttcttcggatgtaagcggattgtatgcctgaccgaacgcttcgtgccacaccatattgacgccaagtgtactgcccacaaagaaaatggcaatgcctaattgcaaccacatcataattgaacggaaaatatgacggctacggttattgttgatttggctgattatgctcacttgccgtaaacggcggataggaaaccatattacgagcatacagatcatcagaagtgcaatatatatttgaaactgtacaacgtagatagatgacaagggcaaatcgggcatatcatggcttggaatgtatatttccgcaagatttatcatgagttccgttagaaccagagataaaagaaatgcagtggacatcatccaaaatacttcagcaaaaaggagcagaaacagtccttttatctcggatcccatacatttgcgaagcgccacttcacgctgacggttatagaacatctgaatgatgaacttaaggaaattaatcagccctgaaaccaggataagtgaggctatgaacagtattagaaactgcaccattgtcagttccttatcttgccgcatactgaacatggcgtgagggtgcactgtatcttcaccccgttgccacgttatggactgtagactattgtttagcatttccatagttgccttaggcgatagataaccttgtacactcaaggcgtcataagtcatgatttcataggagaaataacaatcgattttggggtcttgcagtccgttatcttccactacattcacgactttaaagctctgtattgtattttccgctatactttgtgggttagcaaggcgtatggttgttccaatgggatttgcagtgccgtacgctttgctcgcaaaattatgggataataccacttcatcaggtgcttcgggaagtcggctgccatgtagcaattttctgttgttataggagaaaaagttactgttaacccctctataacctatcagaaaaggtaagttacgttgttcgttatcaatgacttctatttccgtagaattgttaaaggattgtatggtcaggtattccaatccactgatagattgctcttccagtcgttttatttcactggttcgaaaaacagaattttgattttggctgactgttattcttatccgtcgctcgctgtcaggcaagttttcaagtttactccattcctgcatgaaaaagcatacaatggtatagcatacgattcccactgccaggcaaagggcggaaatgaaactgtgagtcttgtacttcagcagatttcgtagagcaactttcaaataatgtaatatcattgttcttattcgtttttaattacttccgccggattggttcttgctattcgcaagatacggaaaagtattgtaaagcctgtaataaaagtaacaatcaagaatatacagagccagaataacagaccgcagtcaaagaataccgtatacatttgtttccataacatcaatacaacatatacaagcgggaatgcaacgatggcactacacaataacaagataatataaagacgggcaaacaacaggataatctgcggaacatccgccccgtttactttacggatagcaacttctttctgacgtcgttctgtatcgagcgtgatgctggagtatacacctaacagtgtgataataatgctgataacggcaaagaacaaaataatgtctttcagattgcactcaagagcctgcgaaacatagatatcatccaggaatgttttagcctgataagttatattttcgggaagcatctcgcggtagactttctcaatccatcgggctacttccttttgctggcccggatgactctttatgtaacaatggcctatgtagactgaaggatcataaggcaggaaagcatatccactacttcggttatatacatcggcctgaaaaggtgcggatattccacagattgtgtagtcggtattaccgctatacaagttcataccgattacatctttcttctgtatctgctgccagacattatctaccacaatatctttttccgtttgaggaagtcttccttgttctatgggaatattcatgaaagagaagaaattggcgggtacagccatgacactaatatcaacccaggagttctcatttcccttttcggtcgttaatccattgcctgacatcccttgcatataactgacatctgataacagaatttctttcactccggcatgttgtttaaaacactctatcaacgccaacttttcctcattcttcataaagggatagtccaggggaatactaagaatctccgatttttctttttgacttagcgtatggattaaactattggtcgttttctctgcttgcagatataaagcagccgtcagggatacaaatacccagcaaataaagaactggatacccagcataaggttgcgtccccattgcttacctctgcgtttattgtttccataaatacctgtttgcacggtaatacgacgaatacgaatggaaacagacaaacatataaggacgcagagtatgataagaagaacgatatattgcaaagcatgtattaaaagcgtttcagaggtaaaagtcatagcaaagcccggcaaagagaaattcatgtgatttcctaataattctatgcctgataataccaatatggaggatatggatatgacaatcaacgactgtgtgaatagcaagcagaaaagttgtttccagttgcatcctatcattttcatgatactgtattctttagtacgattgaagaaagaaccgataaggaaatggaaaaaattgatcagccctactaataatatcagtgtacctacagttccggtaactaatcccagataggaagcaccttgttttttcagtctggctcccatactactggcagtgacagtgtaagcttcgccatacaaagtataagtatagtctctttttgagaattgcttttctaaatcggtacatgtagtttgtggtgataacaacacataggtatttgctcccgtcatgttatgccgtttgggactttgcagaagtccttcactatcgtttacggtcagcatatctatgttttgcataaaatccaaactattgttcagagggatatctttcattactgcttgaatggtgtagacgatacctcctgttttcggggtgctttcaggagaagtattgagccttctcatgagagtcatgtgtttgccgatagcactttctgcattaccgaatattttaatggccatagattggctcaggatgacggagttaagagactgacttgccattttccaatgtcctgctaccatttccggagtgaagattttattatagcaagtatctatttcaatcgtttcaagttcatagggtagtgtcttttccggagataactctacataataagggcgttcgcgaggataggttacggatgaaatggcttccgtttctcccaaagcccatgtgcgcaaatcttcggccagaggaacaggagaaccggaaaaatatctgtctgctttgccgtcatagaggtttaattctgctatgcgatcatgattagcaaaacaatggtctgtgctttctacaaagcgactgcaatatatgcagacacagaagcagagcaaacctaccgccaatccgatgatggaaatgatattttgtgtcttatgcttacacaagtttctgaatgctattttgagataatggaatatcatggtatatacattttatattttatatattcaaaacttatgccaagtatgtaactttctatttattaatgatatactgatttttgttatagggtattagtgtgctatagtgcacaaaaacagtgcatatccgcacatgaattctatacttactcggtctttattatatccaccggatttatttttgcaattttcaaaatgcggaatatgacagtaagtaaagtcatgagaactatcccaataaatatgcaaatccagaagcagaaaccgtcatcgaagaagacaatatacatttgtttccataattgcagtattgtgtatagcagtggaaatgcaatcactgctgttattattaatatccggacatacatgcgcaagaacagataaagtatttgccatagtcccgcaccattaactttacggatggctacttctttgcatcggtgttcagtatcaagggtaatggctgaatatactcccagtaaagtaatgattacacttactattgcaaaaaataggatgatgttcttcattttcgattccaatccttgtatttcttccaaatcttgttgcagcgtactgatttgtggggacaaagtgtatggaagtgcttcacggagcacttgggatgcatactcttctacggcttttacttgagctggcaggcatttaatgtagcaatattctatgggtccttccatcttaagtggcaagaaagccataccctcacttcggaaaagactctcgctctgaaaatatacattggttataaatgaagatgtaatgcctttgacggtatagccaccgttaaagttatacaagatgttgcctaaaataggtttgggaatccgtttttctaaaacgtcatcaattaccatttctgtattgttttgcagattattgcctttcaacagaggaatattcatgaaatggaaaaaattgggagctgcatatatgaaactactgttgatattagaatccctgttgttctcttcagattggaatccggtaatagaaattccaccggcataattgttatttgacaataatttctcttgcacacccgaatgttgtgctatacgttctgtaatggcaagtttctcttcatttttcatgaaggtgtagttcagaggaatactgagaatacattctttctcttcttttgaaagagtgccaaaaagtgtggaggttgttttctctgtttgtaaataaagggatactgccaatgtgacgaatatccagcagatgaaaaattgaatgcacagcatagtgttccgtataaaatgtttgctcatacgtctgacattgcctttgatcccttcttgaatagatatgcgatgggtatatgcaacagtcagtgtacaaatgagcaaattcagtagaaatatcagtataagatattcggaacattgcttcattagtgatgttttgtctatttccaatgtaaatactactaacgtaagatgaaaaaagggagccagtagttcaattaaacaaaaagtaatcagaaaggctaataagataatcagtgccgattgaatgaaaagctgtgataacagttggtggttactgcttcctaataccttacggagactatattcgcggctacggttaagaaatgagccggtaaggaaatggaaaaaattaagaaggccgataagtaaaattagtattcctaatgcagtggtaacactgataaagtaagggctgaaggttgcactataggctcccttccccaatgcagttgcacaaatcgtattatcagggaatgcatcgctggatagattcagttcgcgaagatgatcctccagttgttgtacacttttccctttatgcaataaagcgaaagtggagcaaccggtcgtaaactttctactttcactctggaacaaaccttcactatcatttagcactaataaatcaattctattgcaaaaattcaagctgttattttgtggtatatcttttatgattgcctggatggtatagacagtgccacctgaatttggggtagcatctggtgaactcattagttttttggtcagtaccatacgtttaccgatcggatcaccattttcaccaaaaaccttgcgtgcggtgctttccatcataataatagcattgggagtatggaccgcaacatcccaggaaccggctataatcttcggagtgaatacttggcggaaacaagaatcaatttcgatagttgacatttctgtaaatggatattcctttccgtctttcatttctatattgtatggacgtggatcagcattagcgatgtgtgttaaaatgtccacttcattcaatggtatatcctgcaattgctcaaagaccgtagcaggagttccggagaagaactccccgtttgaactctttaaaacaatatcggcaatgtgatcatgattttcaaaacattggtcaatacttagaaagaaacgactgcaatacatgcatatactgaagcaaagcagacacactgctaatcctacgatactgataagattttgcgttttgtatttaagcaaatgacgtattgctatttgaaaatagtgttgtaacattttttatggcgtattatatatgtatttattcactttttatcacttctgccggattctgccgtgctgcctgccatacccgccagccaatgcataacagaataagtaaacctatcccactaaatatagccagatatatccatgcactgattgctgtttgttctatataactttccagccattttttcatcaaagcgtatcctataggaaatgccatcactgatgccgcaacgagtaatataaagtactcttttacaaacatagcaagtatttcttttacagacgctccatttactttgcggatggctatttctttgcgccgctgctcgcaacttagcgtaatgaaagagaatattccgaaagcggcaatgagtacgcaaataattgaggcaaagccaagcagcttcaataataacgtttcggatttcaggaacttagaatattcctcttctatattgagaagagaatgatattcattattgccagttgagattttggcatatacatcatctactcgctttttaagatcctcccatgttcctgcgcgatattttatcaatatatcaccatagttggcatcggaatcggaacctcccagacctcctttattgcagaataaagtaggtgctgccgggattgtaggtgctgtgatatggaagtcttttacaattccgacgattgtaactccttggtgaatattgattttcttacctatcggatcatctaagcctaatcttcttgcacaagtctcgttgatgatagccttatccgcatcatccggttttagcatttcaccttctattagtttcaggttgtagaaattgataaattccctcccttctcttatgcagatgatatctactctatcttccttatccgtgcttttctttccttcccaactgtttatcctgtaagtcagtgtactatatcttggaaataaaggttcacatcctttcagtgtctctacaatacatggcatcttatctatttcggcactgacgacagcataagattccggagaaacatattgtcttaatactgctgtattctttctttcccaaccaatgtcaccatttgccagatgattgagttgtttcataagaatgcttacgcaaaagataaataagatacatattatcaattggaatactatgctgcatttacggaataggaatagattgccggattgcctgtagtatcggcggacaataaaaggtattaataggatataggatatgaaaagaatacctataaagtagaggaatgattctccataaatatttccattaatttcggacagttctctaaatttcggaagcgataattcgataaacgtcattcctaaaagaccggataaaagcagcacaaataaatattcagtaccaaaaagtatgaataaattccgaatggatgaaccacatacttttcttaattcaatttcccggtttcgtgtgcgcatacgggtgataaacaaggagagatagttgaacaatgcgcaaagtataatcatgccgcttgctatggagaaaagtactaaataattgaatttaagggtcagtttttcatttatggcagagtaatggtattgggttaatggaattatcttatatttttcgagaggtttgggataccattggtttccggattcgtagttcttcattttttcctgaaaagatgtagcatccactcctttacgtagccgaacgtaggtttgaaatctatgtactccccattcgcttttttctttttgaaattgtgatgacattgtccatgcggcaaaatagagattactatgtttctctacatttttcagaatggcacagactgtcttaggtgtatcatttgcctctatctcttgtcccaaaacttctgttgaaccgaataatgacatagcagtctcctctgttaatgcaattttattattagaataaaggaattccatgcttccggataatatggaggtaggttggaacatctctaaaaatgtggagtcggcatacatgcaattaacttttgccgttttcccctccttggttttcagtcctgtttctctttggtaaactgcacatgcggcttctacttccggaaattcttgccgaagtgtagtagctaacatatatgaactgtatgtgctgaatgttgattcactaaaagtggcttcttgataaagcaaatgagttcgttccacaccttcgtagaatttgtcatacgtaatttcgtagtgtatccacagatttgagagtgtaaagcaagtaaatcctactgccaaacctataatactgataatactctgtattctgtatttcagtatattacgaaatgctatcttgaaaaagtgctgtatcatagctatgtattagttcacgcattattttactgatgtcattcacaagattatatatcaaagtgaatttcttttttagattaagattcaaatctcgtgccaaagttataacagattgtttttcaggtaaatatttgttttagtaatattgctttagtgtgctatactgcacaaaaatagtgcatattcgcacaaatggtacatttaaaatcacaaagaatagttataggctctgactataacttcttaacttttgatgaagtaataatctagctgtgaacaggtgtagcgttttttctcttttaataatcgggaagatgcttctacttttctctaaaaaaccatgcattagatgcactcatgaatacactccttgatgatggactaactattgtatatcagtgttttatagtctaaaaatagaaagaaatatgtgtgttaagggttcaaaatagggtcagggtcacttatacccccaaattctgctcaaatgaatagaatattttaagtgggtgtaaaataaaagcactgatatggcgtcaaattaccaaggaatcagattttataatccactctttattacttttgcttcacttttctgttttttgtatcaaacatttactcataaagaatcgttcgcattacaatatttcgaatctacgggaatttgttttttgcaaaaaccgtctaaaatcaactatctgtatatcaatgcaatattgactagtgaaattaaaaatcacctgcaaatggggctataagtgaccctgaccctattttgaaccctaacaagccttttattagtcttggatttgttatatttattaaataaaagcacgtgagaaatattatggtaagtcaaggcatagtcaacccctgccttaaacggaacataagaagcaatgtcgtgatgcaaaactagcaatattccacattacgagattgctagttctgcatcacgacattgcttcttataattttatactcccaaaggatacaaatcgtttttattctttaatcacttccgccggattctgccgtgctgcctgccatacgcgccagctgatacttatggtgataaccattgctatccctgcaaaaatgaggatgaacggtaatgctcctatacttacctgacgattgtacgtctctatccagtgcttcataatagtataaccggcagggaaagctatcaatgaagatacgatcaatagcattgcgtattctttaaagaagatgctcaggatattgctgatagtagccccatttactttgcggatagctatttctttccggcgttgttcgcatgtcaatgataccaatgaatatatgccgaatatagatatcaggatacaaacaattgcagagaatcccaatagactggataatgcatcttctgattgcagatacttattatatcgttcttcctcgctgtccagaaataatttacggtcgggaagttcagcttgctgcatttcctcgatgctacgacgacattcttcccaggttcccggtttatacttgaagaggacaaagcaacgcggccacatccactgtgatttattggtattgacaaatacagtatgaggcaggtccttggaaggcgacctgtacgcacagtcttttatgactccgatcacagtcataggttccacttctttattgcagtaaaagatgtgtttgccgatagcttcttcaggtgtccatcccatagtgcgggctgttgtttccatgatattaacttcacggacattcgacttatccgatatccattctcccgctaccagttgcatgttatagaatttgaagaactcctctcctgccagaatctcatctatgccgattggattttcagttatcccattcaatccgtcccaggcatctacctcaacagatgaataagaacccatactgatgagcggccagtaaacaggccgtacaacttcagttaccatgggtaacgcttttatcttctctgcccatacattcatgtccacattcatccagatgcccagggaagcacggttccgataatccattcccatatctacattacgcaaatgataaagttgcatttgcataatgacagtacaaagtataaatgtaaggcaaacaacaagctgtattacaatgcttcccttacggcatatatgtcccattatactcatttgagtactatgaagtgtattctgcaatgagtgacggcggaataggtaaacagaacatagcgccactataaaagccaatactgacatacctgcgacgtataatatgcaattcccataaatggatatatctgtatcgacaatcatggaatattgcaagaaccagggttttagtaattccacgaagaacatccctaagagtgaagccaatagaatagtaaatagaaagtccgtactaagtaatgccaataacgaacgttcggatgctccattcactttgcgtagtgccatttcccgtttacgcgagcgaaaacagtcgatataaatcgttaaatagttgattaatgcgcacagaatgataagcactcctgtgatggagaaataaacaatgtaacggaaccgtactatttgttcgtctccacgaataaattcatccgcataacgcagtgaggtaatgggctccagatagaaacgtgtatatccggttacaccatagctgttctttttgagttcatccggaaagtgctgattcattttttctaaaagtacatccacatttgttccgggctttatttttatcagcatcctgtaattggcgttatcccatgaagtatcattattggtacgccccataaaagcatatttaaagttagaatgctctccccaatcgctgacaatggcacttatgcgatactcgtaccgatggttattgtctgttatggtctctccaatcactctggtagtaccgaacaagtcttgagcagctttttctgtaatggctatcccgctcttttccggtgaggtggataaaaagaattggttgtcaccctccagaacttttatatccatcatacggatgaaagttgtatcaggcattaacatcggatattccgtaatctgtttcccatttttaatgaatagagtattctgacctgatgcacagaaatcttctatttcagtgtaagtcgtttttaaatgattccccaacgcgtagggcacaaagtcagagtagtgccctccaaagtggcaatcgtccattcgtaccaaataaatgcgttctgcatccttatggaaatcatcataagtcatttcatattgcacccagaatgtagacagtgcaaaacatgccagaccgattgccagtccgatgatactgatgatactttgcgttctgtacttcaacagattccgatatgctatttttaaataatggtgtatcattatatttaatattttacaagtttatctattctccttttaatacttttgccgggttgattctgatagccttacggatttgccaccatagggtacagaaagaaataagggctacgatgaatcctgctgtcaggaatatccatagagcaagcggagcatgatgataataattctccatatacttatagatgataatataactgatgccggaagctactacaaaagccgaaccgaatatatagcagtacttacgcaataataaccggaatacgtcgcgggcagtggctccgtttatttttcgtaaagcaatctcgcggtaacgttgctgaatgtcatataatgacaatccgaataatcccagacaggatataaagatggctatcatcgcaaaagtaatatagatacgtgtcgtacgctgatcatcatgatacatagccgctatatcatcttcggcaaaagagtaactgaattctccgtctccgtttatttcatgaaataaatcttccagatatttgatagcttccctccgtttaccgggtacgatggaagccagtaaaggactcgtgtgactggcttgcgagaaacagaacgctaacggataatcgggattggacagatgtccgactttgaagtcttcaatcacccctacaatttcataaggaggattttcatttagatcgattccgctggtataaaacattctcctttctgtttgcaggcttgcttttgtaatatcttcaatgcggaatactcttttggccgtttcattaatgataaacttatattgtacaaactgatctttttcattatcccaaatccggccttcctttagtttaagtccgaaaagttccatataacgttgatctgcaaaattgatcgtcattgcggccttttcaccggttgatgctgtgcattgtgcagatggaggatttatgaatataggcaattgcccgtaagtccattgcgaaaatagcggtgactcatccattctgcgctgaaccaactccatgtctgcggattccttttgttgttgtgcctgccattcttcttccgatgtaatgtcccaagaggtctgcttcgagaagagtgggcactgaatgatatcttgtgtgttataatttaagtcgtaatgaagcacatagtatagctgccggctgaagtaaatagccgcaatcaccaaactgacagtgattacatactgtatgaacaaaaatatcatgcgtgatactacagagttgccgctgacgccgacggaacggagagaattgataggggctgcgtaattatagcgaacaaatggaaagatactcgtaatgaggggcattcccaataataaaaagacagatatccatatatcaaaagacaaatctgacatcacaggaatttcgaaccatgaagtaacaatattgcgggttatttctacaagtgtccagataaagagtaaagccactgctcccagacagaagttctcgaaatatagttgcaaaaatattgtttttccattagcgccgaatactttctttaccccgaactcacgggcgcgtcttagcatcactacggtatacaaatttacatagttgaaaatgcctaccaacaataacagaatggccacaacagtgagaatattcagagaagtctggtttcctctcaagactttatcataaacaagtaggttatgattcatataaaaatctttgagtgacgtcaactgataaaatatggggcgcttaccatgagacatcagctccataggtttctgatttttcttattaagctctgtgacgtcttctgcccgatgtagttgtaccagctcatacgccatacggctccagttgttgcgcaggctttgggaaatgatgatctcaaattgtacggaagcttttgttgaaggctcgtctatcatacccgtaatagttactatatctcctgttgatactttcagagtcttgcctatcggattttcgttcttaaataaccgtttggctaatttgcgggttataattgcatcattgggggtgctgagtgtatgtttaccggttattacaggatgtggcatcatgcccaaatatagactgtcggtcaccattgtctgcactgtaaaccgacgaccgtcgactattacataatcatccgaaaacagcataaaccggctgaccttttcaacgcatggatctaacagtgggtttctgtagttaggatccttattgaaatccacagaaccacttaaatgggtctgcccgttatccatgatagttgtcatcaggaaagtacgctccaactttggacagaagtggtctacattattctcctgatgaatatagcgggctataatcaaagcacaggagacactgaataccagtccgataaaattaataaaagtatatactttaaaacgcaacaacatgcgtatggataataatatctgtttcatacttttcttctgtcttattctgctttcatgattgttgccggattgatgcgggttgctttattcacctgccagaacaatgttcccaacgaaatgcctgccaccactaatatagcgatcaggtagatgaatatactaacaggagctttcactataaaatcccgtgtatagatgtatatcagataataagataaaggtatggtcagcaatgctgcaccggctatcacccatatatacttgcggaatagaacggaatacagatttttcaattgtgccccattcactttgcggatggctatctcgcggtagcgttggcggatgtcgaataaggaaagtccgaataatcccaatgccgagacaaaaatagagatggtggcaaacaatgtaaacacggttgctacacggcggtcgtcgtcatacagggcctgaacatcttctttcagccagcgatagtcgaactcttccgcatgaaaaatctcctctcttgtgtcttgcaaatatttgataagttccttttccttaccggccttacaggctatttggaattgtgctccaccgtaaccgggtgtcacgatgtataccacgggtttctttccggctgtaagatggccggtatagtaatctttgatgacagttcctacaggcatcaaagacaggccgccttctactatttttccgtccattgaggaagtaatccagagtgcctgttctcctcttacgaatgcttcttcctgcttcgtataaccgaatgctttcaaagctgcctcattcatgacaactacattctctgaataatcctttgcctccactttccccggcaatgtaccttgtactgcttgcagttcatacagcttgaagaaatccgccggtatatacatcaccatcatatttagcttcacgtctttatcattaataagtgtcgtactgcctccgctactgaggatgccactttgcgagggatcgccacagaaccaccgttctatgaaaggacattcatccagtttttgccggatggtagtcgtattctgccagcgctgttttctttcggcttcactttcacctccccagctcttgggggtaggaatcagattggcataaagtatgccttccgtcttgaatcccggaggggtattttgcaggaaacggaggtggctgctgaagtatagagagaggactatcagcaaaagagtgatgctatactggataaacaggaaaaccgtacgtgtagcgacagaatgccgtgaacttccgatggaacgtatggacacgatgggtggcagataattgtatttgataaaaggatatacagtagtgagtaatggcaaaagcaccagcacaccgagcgacagttgccagtcgaaagccgtataaggtacatcgctgcccagcaacctgctggcatatcccgaaaatatttcgataaagaaccaggccagcagcagcgagatgacgatcatcaacatattttccgtccataactggaggaagagtgcacgtccacggatgccgaatactttcttgataccatactccttggaacgtttcagcataaaaaccagatagatgttgacgaagtttagtatgcctgccagcaataataacaggcatactcccataagtaccagaatgtgcgaacgactgctgtaatgccacatattcggttgatcggccatggcagccaatcccttattccagtagagttgactgacaggaataaagtcgtaactcaccatatatccccattctgtttgtcgcttcacatggctgatagcattaatggcatctacatctactccgggcataaaacgcaggatttctatatacattttgctccactctcttctggttttcagttccagatttatcagtatatcaaatgttagcgaagatttgcatgccggttcttccaatataccacagatcgtcaacagcttgcctccggagtatcctatcgtttgtcctataggattcttatctccgaacacacgtttggcaaactgacgggtaatgagtacttcttcaggcgcttctatgtgtttacctttcaatgggtagtgaaagaagtgcaagaatgctgtgtctgctaccaatgcttggacggtataaggtttctcatcgatggttacattgtcattgtccagtgtgatgaagtaacttctcttttctatggcttcgggagcgtagtaagccgtatccgcaccactgtctttattcacactgccagggaatacattgccatcaatttcccgtagcgggataaaagtcctttcagcatgggtgcagtgcgtgttcacttgcaactcacggtgaatgtagcgtactaatatgatggtacatgccaggctgagtgccagaccaatgacattaatgatcgtatatgacttggagcgtatcaggaagcgccaggcgtatttgagtgttttcatatttcagtctttctatattttagttatattttatttcttattcgcttttcataatttttgccggattaatccgtgcagctttattcacttgccagaacaatgtacctaacgaaatgccagaaactatcagtatggctatggaataaatgaatatgctgataggagctttcactacaaaatcttgcgtatagatgtatatcaggtaataggataaaggtatggtaatcaatatggaaattcctattacccaaatgtacttgcggaacagaactacatacagatttctcaattgtgctccgtttactttgcggatggctatttcccgatatcgctgtcggatatcaaacagagaaataccgaatagcccgagacctacaattataatcgcaatacaagcaaaaacggaataaataatgcttgtttgtctgtcctgggcatagattgcttttacgtcttcctccagaatgctgtattcaaaatcttcactgccataaatctttaattccgttttacgtaggaactcaagcacttctttctttttacccggcacacaggctatctgatagacatcgccgctcatctgattgctcaccatataaacagtaggtttctttcctaaagttaaatgtccgttgtagtaatcatctaccaccgctacaatgggttgggttttggattcgtttcctcttttcaggggattttctatgctggcaccttgacaagtggtgtagtttaaggctttcatagctgccttattcaccaccagaactccgaaaaagcctttatctgataaatcggggagcttgccttcgataaatttaatatcatagacccgaaaaaaatgaggcgtggcaagacgcatattcaggtagatcttcttcccttgctcgtttatataatcactgccataatctcctttaagaatgtcaatatagctagtctcaaaatcttctatatagggacaggaagaaagctccttatttaatgcgttcactcgctcctgctgttgtttcatgctctcttccgtgtaagtattaaaatcctttgattcgtaagtcagctgagcaatgataatatctttggtacgaaaccccggttcggtactaagcaacatattcaactgattattgaaataaagcgagattactaccaataaaaaagtgagtacgtactgaatccccagaaataggatccgtgaatgtattgaacgactttccgaacctatagaacggatggagacaatagggggagtataattgtatttgatgaatggataaagagaagtaaccaatgggagtactaccaatatgcctaatgataattgccagtcaaatgtcgtatagctaaactgatgattgaaaagatttctcattggcacagtacttacttctacaaacacccaagctatgagcatagcggctgataccaacaaagtattctctatccatatattaagaaatagttctttaccccttgcaccgaacacctttttcaatccgtattcttttcccctccggagcatgacaaccagatagatattgatgaaattaataatacctgctaatagcactaataggcatactcctatcataatccacagatgggaatagctgccggcagagaacatcaatgtctcctcattactgatggagctatcccaatagatttgtttgacgggaatcaaagaataagtataagtacgcgtatcaccgctttcgggcgagtttatatatcttgggatactacctgttttgtttagcttatttatatcagtgcccggcatgaatgaaaacaagtctatagccatacgttcccaattatcagataaagctttagacaatactacatcgaactgcaggaaagtcttgtttccgggattacccaatacaccctcaatggttatgtcctttccattagaacaacggatgattttacctaccggattctccttaccgaagagcttgtgggcaaatgcctctgtaattaaagcggagtgcggagaaggtaatgtaatatttccctgcaccaccgggtagcggaatagctgaaaaaagatactgtctgttacgatgattcgcgaaggaaaccgatttgccccaaccattatatggtctttctccaacggaatgaagctgctctgcttattgatgtagcgttgatcgataaggctgctatctcccctattaataagcatacttaaatatttattgccacccatatccgctttgacaccataaacctgttcccggtcaatgcaatggctatccactgtcaattccctgtgaatatagcggaatagaataatgcaacatgccagactgaaggccagccccagtagattaataatcgtatatgatttggagcgtatcaggaagcgccaggcgtatttgagtgttttcatatttcagtctttattatattaatctctttctgttattttgctattctctgataatgctgtatttgttccttattttaatatcagttcttccgcttcgccaaagttatcatatcccgtcgtaataacccaatctcccggctgcaaaccgtctgtaatctcgtattgttgggggttctggcgtccaatactaagaggaacacgcgttgctttcgttttggatgcgtttagtttgtaaatccattgaccaccggtagcctgatagaaattaccacgtgggataacgatggcctgttcgggttgtcccaactctatctgtacacgaaagctctttcctacacgtacattgtcgggcatctctccggtaaatactaagtcgacatcgaaagtgcgatcctttacttcaggcactacctttgtgatacgaagtggatatttgcgtccctgataattaattgtagcgggaagccctgtcgtgatacggtctatgtagtattcactgagtgaagtatgtattttatattggtctaataccttgatttctgcaataccttggttggatgatacttgttgtcccggagtaacttttacgaaactaagctgtccggcgacgggggccttaatcactaaattgtccagtcgttcgcaggcgcgttcatactttttgcgttctcgttcccgatcattatggatcaggtctttgcggataatggcaacaacagaatcttggcgcaagctctcgcgttgcaactttgctttctttacattataattgtattcatcttcggcaacttccagctgagctttactctttatccccattttatattcttctttatcgagattgaaacttttttgaagacgggccagttcatagtttgtttgcaaagtttgttgttggagggtcaggctcttctgctccatctcaatttctttctcacgaaaagaaatcaattgcttctccaaatcatcacgttgttcttcaatgctgtgtatcagatcggggttttcgagtaaaaggattgtatctcccttctgaagcaaacttccctcctcgcctactatacggtctacacttcctgattcacgggcattaacgataatggtaagaatgggttgtataagtccttccacatctacatattccatgaatttatcatttttgacttcagcaatctgcacattctcctggtcgatacgaagcttgctgggaccggcagaaaggatgataacatagatgatgaaagcaaggaatagaattcctcctgccagataatagcggtagcggatgtaccaaggcttcttttcgagtttaatatccataatatctttattgttttacaatttataatcaagtttataatatgttccattattttcttatcatctcgtccatcacttcctctattctttctgtttccgtcagcggtgcatccacttcaaaatcataaagtgtgatactgcggagggtgtagtacaaactccagtagttatatagtgcagtgatgtaatttcgtcgggcggcatctttttcactgatggaagcattgaggtcgagtacggtagactttcccaggatataaagtcgtcgggctacatctgcacgtcgttgagccgtctcatcggtgcgggcggcaatatgtacgcgctgggattgtaaattgaattgtttcaccagtttgcggacattcagttcaaagtctgtcttatcctgctctacttgagtataagttaagtcacgattagaacgggctacccggacctgtcctttgccacgtccccaatccaatataggcagactaatgccgagggtgacatattgttggtccaagggattgtgataagcgtctttcagtttattgccggtctgagtcagtccgaaacgcaagtaaagatcggctttcagtccggcattggcacgggcactggctacccggctttcgctttccagcttgcgtcgctgcatgtccagtatatccgggctgttttgacgtgctgtgattaaagctgtgcttaggtctatgtgaagattgggaacatgatcgctgacatctactttgatcagtatatcctcctggataccgagatacgaacggagctcttgcatgcaattttctacttcgatatgggcattcatacgatttgtctcttcggtcagcttattaagttccaattgtagcatctcgttttcggtaatggtacctatattatagcgcccttgtgcatatgtatataaggtgtctgcattggcatagttggtagaagctatttcgtagttgctttgtgcagtggcaagggcaaagaatttctgcgtagcattggcagcaacgagctccagggtttccacataagttttcttggcttcctggtaacgcaatggttcgatacgacgattccatttcagactattatatccaaaaagagactgactatagccgacgtttatgggtgatgtctgccaggaggtagagttgtcactaaataaatcaagccgctgggcagaagtttccacgaacagtgtaccacctgtccaaggaatattctgtgtcaggcttaaggtgaggtcggtacttaataagttttgttccacaaatttcacgctaccatcgctcattgtaattttgttgatggcacgattcagatacggatcggaagttaatttcaaggcgggcaaatagttggcccgataatatttgtagttccagtaggcggaacgaaaactgtgttgggctgtttgcgcatcgggtgattgtcggcgggcacgctctatggtctgacctaatgtcaactccatagtgtgttcctgcgcatcaatagttataagagttccgcaagctattaataataaaagtatttttttgtacatagtatgttccttttggtagaagagattcaaatcttatgccaaagatgtaatgctttgtattacaatgttatacttctgtatgatgtaaattgagcgtgtgccataccgcacaaaaatagtgcgcatacgcacacacaacacatcgatatattgtttatctttgcacatcggatatattcatactgcagaaaagattatcggataataatagcttcgtatggaacaattaggaaaaatattaatagtagatgataatgaggatgtactttttgccctcaaccttttgttggaaccttatgcggaaaaaataaaagtagcagtaacccccgatcgtatcgaatatttcatgacgacattccagccggacattatcctgctggatatgaacttcagtcgcgacgccatcagtgggcaggaaggctttgagagtctggaacaaatcttgcgtattgatcctcaggcggttgttatttttatgacagcatatgcagatacagataaagcggtacgggccattaaagcgggtgctaccgatttcatcccgaaaccgtgggaaaaagaaaaactacttgctacactctcatccggtattaagttacgccgttcccgctgtgaagttaatctgctaaaagaacaagtggaggtacttagcggtgcgggaagtagtgtggaagaatctattattggtgaatctgccgcgatgcaggaagtgtttgccacgatagagaagctgcgtgatacagatgctaacattcttgtacttggtgaaaatggaacaggaaaagatgtgatagcccgtttgttataccgttgttcgccacgttacggacggccattcgttacaattgatctcggcagtatcccggaacaattgtttgagagtgaattatttggctatgaaaaaggagcatttactgatgcccggaaaccgaaagccggacggatggaggtggcaacgggaggtacattgtttttggatgaaataggaaatctgtcactgcctatgcaagcaaaactgctgactgctattgaaaaacggcagatcagtcgtttgggtagtacacaatctatatccatcgacgtacgcttgatttgtgctacaaatgcggacatccgccatctggtggaagaagggaatttccggcaggatttactttatcgtatcaatacgattgaactacatattcctcctttgagggaacggggaaatgatattattcttctggcagattatttcttgcagcgttatgcccggaaatatcaaaaggaaatgcggggcttgacacgtgaagcaaaagctaaattgctgcgttattcctggccgggaaatgtgcgtgagttacagcatacgatggagcgtgcggtgattttgggtgacggttcattgcttcgccccgataatttcttgttccaggcttcctccccccgtcttaaaaaagaagaagaaatacttaatctggaacaattggaacggcaagctgtagaaaaggcaatgcggttgagcgaggggaatatgacacgtgctgcggaatatttgggaattacgcgctttgcattgtataggaagattgagaaactgggattataaattaagaaataatatgaagcagtattccttggttgttatcttgcatatctgtctgctggcaatactttctgttggtgtttatgtgttatattgtgctgatttatggtttagcatgcttataacattcctgtttcttctggggacaggaatacacctttattatatacagatgaagcaattgcagatgatgcgtcgcctgacggacagtttgcgttataatgacatgacacaagctttccgtccaccttataaaaataaactgatgacagaaatggctgtagagctatctgaaaccttgcaggcatttcgtgcccgcctgttggaagaagaaataaaacatcagtattacgaaagtctgctgaacaaggtagatactgctgtattagtgactgatatgtccggacgtattgagtggctgaatcgtgctgctactgcccagttagggcaagatccgcaattgccggccgagcttttgagccttccttccggtgaaacgcaggtcatacgtattcatcgaaatggaaccactttagaaatggcagtagctaccactctctttgtagcccgtggcatggagaggcgccttatcagtttgaagaatattcattctgtactggaacggaatgaaatggaagcctggcaaaagttgatacgtgtactcactcatgaaatcatgaattccattactcctatcatttccctctctgaaacacttagtgagcgtggtgtacccgttacattaaaaaatgcagcgggcgaaaaagaatatgctgtaatgctacaagctatgcaaaccattcatcgacgtagtaagggactattaggttttgtagaaaactatcgtcgtcttacccgtctccccgctcctgtttgtgccagcgtgccggttcgggagctattcaccgatttacagaaactttttcctgatgaaactattcatttcgagcttccacctttggagaaaacactggatgtggatcgtgctcagatagaacaagtgcttattaatctgttgaaaaatgctcgtgaagcatctgcccgccgcgaaacgcccaagattgaggttaaagctgtttttgcaccgaaagtgacttcttctcttactgcatggcgttgtactattactgttcgggataatggtgaaggtatcttacctgaagtacaggataaaatatttgttccattcttcacaacaaaaactgctggttcgggtatcggactcagtctttgcaagcagattatgaatcagcatggaggaaatattaccgtttattcggaaccgggaaaagggagttgttttactttacaattctgttagataaatactgcaccagcaaaaggttgttctgtgtctattaaaaaacataaatattatataatcataaaaattctgtgccgatat

SEQ ID NO: 6361 - DNA, 24403 bp, Unknown
  gut microbiota DNA sequence
gcgcaagccgccatcaccgccgaaagctttgatacgcctgccaagatggggaatttgttgatctttgcccccgaaggagccggatgtacttatgaaggcaacgtggtaattaacggtatggcagaaaagatttctttgactcatggcaaaggtttccgctctccactggcattcaaagcaaaagacattacctacaaacgtaacttcagcatgaagtccggtaacaaaatcaatgccgccggatgggaagcaatcgtactgccatttgatgtacaaagtttcagcaacgagaagcaaggagaactggcacctttcaacagcggaaagaaaggagccaaacctttctggctggctcagatgacaaccgatggctttgaacataccactgccatgaaagcaaacaagccttacatcatctcactgccaaacagtgagtcgtatgaagacgaattcaacatcagcggagaagtacagttccatgccgaagatgccggcggtgtagaggttaaagctacttcttataaagaactcgcccgtatagaaggaagtaatcgaataatgattcccgcctacgaaactgtattcaaacacgatacggtatatgccattaacccggctacgtatgagaatatcgccccgggtggcgcattcgtccgtaacttacgcgatgtgcaacccttcgaagcttatctgattagtaaagaggcggcagtcaatgcaccaaagctttacagtatcggaggaataggaggagaaatcaccggcatagaagaattaccgtccgacgcattggacggcatagaaatctatgtccgatatggtgttctttacatcaagagcgaccgcgagcgtacactttccatttacgatacagccggacacatggtacgtcaggttgaagtacaggaaggcaccactgctgtcaccggattgggaaaaggcatctatctgctggcaagaaaaaagattctggttcaataagtaaattgtttgttaatttagagaaaggtcctacaccatgatgaatgagtgataggacctttattatcgagtatattcgataataacatattcattttatcgaatatattcgataactattcgtatatttgcctgtcatcaattacaaaaagagatatggacaaagacaccatcaaacgtttaatcattgaatatcagcaatttgttgctaatattacattaatagagcgtgaaatacatctatctcatcagttgaactatgtcttcgtgggactccgacgagccgggaaatcctatctgatgtaccaacaaatacaaagcttgttgaatgatggacatcaaccggaagaaattctctatttcaactttgaagacgatcgcctggtcaatttgactgtagaagatttggaccttatcaaagtttcttacgaagaactttatccgcataaacctatcttttttctggatgaaatacagattgtggagcattgggagaaatttgcacgccgtctggtcgaccaacagtatcgcgtttatattaccggcagcaatgccaaaatgctgagtgccgaaattgctactacactgggagggcgatatatagtacaaaatgtatatcctttctccttttctgaatttctgaaagcttctaaaattgagattggaccaacatggtattacaaaaaccgtacagagatagtccggacattctccgactatttcagttatggaggtctacccgaattaatgctcatagaaacaatagaaaaacggcaatggctcagtaatctattcaataagattttcttcggtgacctgataacccgttattccattcgcaatgacctcgctatgaaagtcttgattcgtaaactggctgaaagtgtgaaacaaccttcttctttcaaccgtctgaccaatatcgtttcaacaacaggcgccaaagtttcaacggacaccattatcgattaccttaatttcttgcaagccacatggctattcttctcacttgaaaactatgccagcaaattagtagagaaaatatcgaaccggaaatattatttcatcgacaatgggctgctgaacttattcctaatagacccggtgacctcgttattagaaaatatagttgccatctcattaaaaaagaaatatgaagaggaactctatttttatcaacaaaatatagaagtagacttttacatccctactgcaaaattggccgtacaagtatcctatagcctaaaagaagaatccacccgtaaaagagaaacagacgctttattgaaaatagcagaaacacaagcggtagagacgttactcgtcatcacctacgatgaagaggagactattcaaaaaaacggcatagagataaaagttatccccatctggaaatggctgctggatacataattttaaaacctaatattcaaccatttatggaacatcctttttcccaattcaaatactgccccaagtgtggttccgtgcattttgaaatcaacaatgaaaagtccaaacgttgtgccgactgtgaattcgtctattacttcaacccgtctgccgccaccgtggcactgataatgaatgaacggaacgaattattagtatgccgccgtgccaaggatccggctaaaggaactctggatttgccgggtggctttatcgacatggcggaaaccggagaagagggagtcagccgcgaagtgaaagaagaaaccggaatggaagtgaaaaaggcggaatatttattctctttgcccaatatatatgtgtattccggtttcaccgtccataccctggatttattcttccgctgtacagtaactgacaccttgcattaccaagcaatggatgatgccgcagacgtcttctttctgccactgaaagatatacatacagaagatttcggactgagttccatccgcaaaggggtaggaatatttctgaaagaaatgggcgaataatgattcgcacagaccacggtatatcctaaaaaagccaaacaagtgtaacaaattcgacttaaaacccgtacttttgtaaaaacgcgttgcattatgaagaataaactctcccgaatactatgcacggcactctgctgtgcacctttgctcgctacggcacagaccagcgagaatatcacttcccctcaacgactttaccaggaaggacagtcactgttccaacaaaaagcgtatgcagctgccatcccaccgttgcaagcatttgtacgccagatagatgcagaaagcaagcccctgcctgtcgcaggcgaacggatggaagccgagtatatgctggtatgtgctgcctacgaactaaaagaccttaaaagtttagacaaattgcaggcctatctggatgaatatcctgatacgccctatgccaatcgcatttatgcacttatggcatccgtatatttcttcgaaggaaaatatgatgaagccatggctatgttcaattctgcccgtctcgatctgttaggaaatgaagaacgcgacgatatgacgtaccgtctggcaacctgctatttgaaaacaggtaatgtgaaagaagctgccatatggttcgaaactctccgtagtaccagtaaaaagtatgcagccgattgcacatactacatttcttatatccgctacacccagcaacgttatgacgaagcaatgaccggcttcctgtctttacaggataacgccaagtacaaagcgcttgcgccttattatatcgcagagatttacctgattaaaaagaattatgataaagcggaaatagtagcgcagaattatctgtccgcctacccgaataatgaatatacagctgaaatgtaccgtgttctcggtgatgccgactatcacttcggaaagtatcacgaagccatggaagcatttgaaaagtatctggaaaacaataaagaggctgccccccgtcgggatgcactctatatgctgggactttcgtactacaactgcggtgtatactccaaagctgccaataccctcggcgaagtaaccgctgaaaatgacgcactggcacaaaatgcctatctgcacatggggttggcttatctgcaaatgtcagataagaacaaggcacgcatggcatttgagcaagctgctgcctccaatgcagatatgcaagtcaaagagcaggctgcttacaattacgccctttgtattcacgagacctcctattccgctttcggtgaatctgttactgttttcgagaaattccttaatgaattcccgaattcccaatatgtagacaaagtcagcagttatctggtagaggtatacatgaatacccgcagttacgaagccgccttgaaatccatcgaacgaatcgctcacccgggcactgcaattctggaggcgaaacagaaaatcttgttccatctcggtacacagtcttttgccaatgcacaattccaggaagctatcggttactttaaccagtctgtagccttgggacaatataatctgcaaaacaaggcggatgctatttattggagaggagaagcttattatcgtctgaaccggatgcaggaagcagcaagtaacttcagtgaatatctgaatcttactccggacagaaatacagaaacttatgcactggcatactataatctggcctacatagcttttcatgagaaagattacacacttgcccagaaccgtttcctgaaattcacacaactggaaaaaggagaaaatcccactgcactcgcagatgcttacaatcgcataggcgactgttatctgcacgtacgccgtttcgatgaagccaagcaatattataccaaagcagaaaacatgggaactcctgcaggtgattattctttctatcagttggctttggttgccggcttgcagaaagattatgatggtaaggttgcattgctcaaccgcatggcaaacaaatatccatcttcaccctataccataaatgctctttatgaaaaaggccgttcgtatgtacagacaagcaacagtcgccaggctatcgcagcatttaaagaattgctggataaatatcccgaaagcccggtcagccgtaaagccgctgctgaaatcggcctgctttattaccaaaacgatgaatatgatcgcgcgatagatgcttacaagcatgtagtaacccagtatccgggtagtgaagaagcacgtctcgccatgcgtgacttgaaatcgatctatgtagatgctaaccgtgtagatgaatttgccgccctggcagccaagatgccgggagaaatccgctttgatgccagcgagcaggattctctgacttatatcgccgcagaaaaggtatatatgaagagagagatcgctcctgccaaatcaagctttacccgttacctgcaaagcttccccaacggcgcattcagtctgaacgcccattactatctttgtgtgattggcaaagaacagaaagatgaagccgccgtattggaacatgccggcaaactgctggaatatccggataatccttattcacaggaagcactcattgcacgcgcggaaattctgttcaaccgtaagcagttcgaccaggcattgaatgactacagacagttgaaagcaaaagctaccactcccgaacgccgccagcttgcagaaacaggaatgctgcgcagtgccgccctgatgcaggatgacgtggaaacaatcgctgctgccaccgacctgcttgccgaaaccaaattgacaccggagctacgcaacgaagccctgtatttccgtgccaaggcctatctgaaccaacgcgccgacaagaaagccatgaacgaccttcagacactggctaaggatacacgcacactttatggggccgaagccaaatacctggttgctcaacaactgtataaggcaggtgaatacactgctgctgaaaaggaaatactcaacttcattgatcagagcacaccacacgcttactggctggcaagaagtttcgttctgctgtcggatgtatatgtagcaatggataaaaaactggatgcacgccaatacttgctgagcctgcaacagaattaccatgccgacgatgacatcgaacagatgattaatgaaagattagaaaaactgaagtaaaaacctcgtcaattataaatatgaaaaaggtacaatatatattcggggcattggcacttataaccataccgaactgggtgcaagcccaaacgcaagctaaagatactaccctgagccgcacggtcgtggtagaacaagaatataatccggacatcatagatgcttccaaggtaaacgtactgcccaaggtaatgccgccaacagtcagtaagaaaactgtggaatatgatgccacactcgcacctgcgggaaatatccctgcaactaccatggaggcgtatacaggagctgaaagccaggataaggcaaaacgcggctacgcccgtctgggatatggcaattacggcaacctggacgctcgtgccaattatctgttcatcctgcctaacagtgacaaactgaacttgaatttccacatgaacggcatggatggcaagttagatctgcctgattccaaggataaatgggatgcacgttattaccgtacacatgcgggcatggattatgtacatgctttccggaaaatggacttaaatgtagccggaaacttcgggctaagcaacttcaacttcatgcccggcagcacaaataataagcagaaattcctgtcaggtgatgtacatttcggaataaaatcaaccagtgaagaattaccgcttcaatttcatgccgaaaccaacctgatgttctacaaacgccagcacgatatacaatatcaggacgcacaggaagttatggtacggacaaaagccggtgcaatgggaacaatctccgaagagcagtttgttggagtagatctctccatggacaatacgttctacaagaacaatctttttgaagattacacctttgtggaattaaatccctattatctgtatcagagcgaagactggaaaatccgtctcggcgctcacgtggattttgcattcggatttggcaagaaattccgggtagcaccggacgtgacagcccaatatatcttctctgacagttacattctctacgcccaggctacaggcggacgacaggccaatgatttccgcaggctagaaatggtttcaccttatggccagagtagtacacaactggatgccacctacgaacagctgaatgccgctctcggcttcaaaaccagtccggtaacaggtttatggtttaatatttatggtggatatcaggatttaaagaataatcttgcttctgccgcaattgcgaactatagcggttcataccttcaattgctccaaggaaatatgcataacatatatgcaggcgccgaagccagctacagttataaggatattatttccttcaccgcttcgggcatttaccgtgactggaaaactgctaagacagaaaataacagcggagaccagctactctattacatgccttctttcgaagcaaacttcaaggtagacattcgtccggtttcttctgtcctgatcaacctcggttatcagcatatcactcgtgagaagataggcaacgagcgtgtagatccggttgggaatctataccttggcggtagctacgaagtctttgaaggcatatcaatctatgtccgtgcaaacaatttattgaacaaagactaccaatattacccgggatatcccacagaaggtatcaatttcatgggtggagtgagttttcgtttttaacaaattgcgtggcaaaaaaagtcatttttgctaaaaaagaatatattctccacatattataaggtggaaacaattgtttttttctacttttgcgggcaaattcagtggcaggagccactataaaacagaaatttatgccaaaaaaccttgtcattgtcgagtcaccggcaaaagcaaaaacaattgaaaagttcctgggaaaagattttaaagttctttccagctatggtcatatacgcgacttaaagaagaaagaattcagcattgacgttgaaaaaaactttgaaccggactatgaaattccggaagataagaaagcactggttaagacactgaaagctgaagctaaagatgctgataccgtatggttggcttccgatgaggaccgcgagggagaagccatcgcctggcacttgtatgaagtactaaaactggaaccggaacataccaaacgtatcgtattccatgaaattaccaaaaccgctatactgaaagctatcgagcaaccacgcaatattgatatcaatcttgtcaatgcccagcaggcacgccgcattcttgaccgtattgtaggttttgaactttctcccgtattatggaaaaaagtgaaacccgcactctctgccggacgtgtacaatctgtagccgtacggctcattgtagagcgtgaacgtgaaatacatgctttccaaagtgaagcatcttataaagtcactgctgttttccttgttcccgacactgacggaaaactcgttgagatgaaggcggaacttgcacaccgccttaagaccaaagctgaggcacagaagctcctggaaagctgccaatcggcaatatttaccattgaagatattacgacacgtccggtaaagaagagcccggctgcaccgttcactacttctactttgcaacaggaagccgcacgcaaactcggcttcactgtagcacaaacgatgatggtagctcaacggttgtatgaatcaggacgtattacttatatgcgtaccgactccgtaaacttatcggaactcgccatcaacggcagcaaagaagccattgccaatatgatgggagacaaatatgtacatccacgccacttcagcaccaagaccaaaggagcacaagaagcgcatgaggctatccgtcccacatatatggagaatgcacagatagaaggtagtgcacaagaaaagaaactatacgatctgatctggaaacgtaccattgcttctcaaatggcagatgccgaactggaaaagacaacagcgaccatcagtataagcaatacatccgaggctttcagtgccacgggagaagttgtgaaattcgacggtttcctgcgtgtatacagagaatcttatgatgacgatgtggaacaggaagatgaaactcatctgctgccaccgttaaagaaaggtcagaagttagaatatcagaacattactgccactgaacgctttacacaacatccaccccgctatacagaagcaagcttggtgcgcaaactggaggaattagggataggtcgtccttctacttatgcgcctacgatctctaccgttcaacaacgtgagtacgtagaaaaaggagataaaacaggtgaggaacgttcatacaatgtaattactctgaagaaagacaaaatcacagatgccacccgtactgagatcaccggagcagaaaaagcaaaactgctacctacagatacaggtacagtagtgactgacttcctgacacagtacttccccagcatcatggattacaacttcacagccagtgtagaaaagcaatttgatgagattgccgagggagatacaaaatggacgactatcatgaagacgttctataaaaccttccatccatccgtggaaagtactctcgctgccaaaaatgcacacaagactggagaacgcatattgggagatgatcctgttagcggcaagcctgtaagcgtcaaaatcggacgttttggccctgtagtacaaattggaagtgctgaagatgaagaaaaaccccgcttctctcctttaaagaaaggtcaatccatcgaaacaatcactttagaggaagcaatggagctgtttaagttacctcgtacccttggtgagcatgaaggcaaaacggttactgtcaatgccggacgtttcgggccgtacatttattacagcggaacttatacttcccttcccaaaggcgtagatccgatggaaatagaattggaagaggctttggaattaataaaagaaaaagcggaagcagaagcaaagaagcacctcaagaagttcgacgaagaacctgagttggaaatcatgaacggaagatatggcccttacattgcttataaaggcagtaattacaaaatcccaaaggatatcgttccggaagatttaaacttggacgcctgcatggaaatcatcaaattgcagagcgagaaagctgcatcagctccagctaaaccgaaacgaggaaaatataccaagaagaaagcataaaaggattataaagcaatcagccccggaatgaccaatacattccggggctgattatttttatagatagttgtttttacattctatccggcacttcaatacccagcaagcccatgctgatgcgaactaccttcgctacgttttccgacaaagcgagacggaaaactttcacagcctcattctcttcacgcagaatactaaaatcatgatagaactgattgtattctttcaccaggtcataagtatagttggcaataatagagggactgtaatccgtacctgcctgcttcactacagcagcaaagtcggctaccatctgaataaggccttcttctttctcactcaactcaataccaacaggaatttcagccggaattacaataccggcttcagcagccttacgcattacagattgaatacgcgcatacgtatattgaatgaacggacctgtatttccattaaagtcaattgactctttcggattgaacgtcatattcttacgggcatctaccttgaggatgaaatatttcaaggcacccaaaccaacaatacgagcgatattgtcagcttcttcctgagacaagccatccagcttgcccaattcattagaagtttctttggctgtactaatcatttcttccatcaaatcatcagcatctaccactgtgccttcgcggcttttcatcttaccttcgggcaattctaccataccataagagaaatgtacgagactctttccccactcaaatccaagcttgtcaagcagaatggaaagcacctggaaatgatagttctgttcgttgcctactacataaatcatcttgtcaataggataatcagcaaaacgtaatttagctgtacctatatcctgagtcatataaacagaagtcccatcagcacgtagtaacaacttatgatccaaaccttcagcagtaaggtcagcccatacggaaccatcttcttttttatagaagaaccccttttcaagaccttccatcaccttctctttcccttcaagataggtatttgactcgtaatatattttgtcaaaacttacacccattttacggtaagtttcatcaaaaccttcatacacccagttattcattttagcccaaagcgcacgcacttccggatcattagcttcccacttcaccagcatttcgcgggcttcattcattagaggggaagcagcttcagcctttgctttagcttcttcttccgtcgcaccttcagactgaaatttagccatcaattccttcacttcagctttatagtgcttatcaaaagctacgtaataatcgcctaccaagtggtcccccttctttccggatgattcgggtgtttcaccgttaccatatttggaccaggccagcatggacttacaaatatgaataccacgatcgttgacaatatttgtttttaccactttattgccatttgccatcacaatgttggctaaagcattgcccagaagattattacgtacatgtcccaagtgaagtggtttgttggtattgggtgaagagtattcgatcatcaccaacggagaattatccgtggcagcaacaataccgtattgcttatcaacatgaatgtcattcaacaattcaatccaggcggaagaagcgatagtcaggttcaggaaacctttgatcacattgaatgcagctatcgaaggctcgttagctttcaggtattcgccaatctcctgtgctgtctgctccggtcctttcttcgacatgcgcaggaaaggaaaaactaccagcgtgaggtgtccctcaaattctttcttggttttttgcagttgcacctgtgcggcaggcacgtcctgtccatacagcgctttcagtccgttgatgacggacgctaccagtttatcttctatattcatgatttaaaagtattttccgggtgcaaagatactatattttggcgaattacgcgttgcatctgtacggataataaaaaaggagacacctcatagcgcctccttttctatttttcattcatagccttcctttattcgatggccaaagtcaactccataccaggtttaaacttagcaactctctttgcaggaatcgtaatgctctgtttggtagaaggattaatgcccagacgtgctgctctctctgctacaacgaacgtaccgaagccaaccaatgatactttgtcaccagcctttagggctttcgtgattgctgccatgaaagcatctaatgctttcttagaatccgtttttgtcaaaccggactctgccgccatagcgttgataagttctgacttattcataatactaaaattaaataattaatatgttacacaaaagatatccgcattagtcattcacaaacctctacaaaaatagagcaatatttctgaatatcaaataaaaacattaaaaaaagattggattttggcgaaaaataaagaatagaaaggcctttttctgttatagaacagaatttattcgtatttttgcgactcattgaacgaaataacagattatgaatgctataccaacagttactaagaacctattaatcattaatgtactggtctttcttgcgaccattgttgctcaaagttatcatcttgatttagcccgttatctgggacttcatttctttcttgccgatgactttaacgtagcgcaacttatcacatacatgttcatgcatggaggtttcacacatcttttctttaacatgtttgccgtgtggatgtttggtcgcatactcgaacaagtatggggacccaaacgttttttatcttactatatgatatgtggtataggtgcaggcttaatcagcatgctggtaacctacatacgcattcaggctgcaaagaccggaatgagtccggaaatgattaacaccgtatatcaggaaggcgctcaaatcatacgggataatatgaattacacctatccgcccatggcaaatctgaatgctctcttaaacggagttaccgtaggagcttcaggagccgtatatgccattttgctgggcttcggaatgctgttccccaaccagccgctattcatatttccgttgccgtttccgataaaagccaaatactttgttatcggatatgcactgattgaactgtacgctggttttgccaacaatcctaacgacaatgtagcgcacttcgcacacttgggtggtatgatattcggttttatactgataatgtactggagaaaaaaagatagaggaaatgggtactattataactgaccttaaagaagcttttcgcagagggaatatttatatccagctgatttatatcaacgtagctgtttttgtagtcactacgctgacagaggtaattctgcaattattcaatcgcagcctcggcggtgtgtttgaatggctggaattgccagcttcactcacacagttcatcatacagccatggtcactgttcacatatatgtttatgcatgcaggatttttacatatcctgttcaacatgttgtggctatactggttcggagcattattcctaatgttcttctcggccaaacatctgcgcggggcgtatatcttaggaggtatttgcggtggattattgtacatggcagcctttaatatcttcccgtatttccgcccgatggtcgattattcattcatgttgggggcatccgcttccgtgcttgccatcgtagctgctacagcgtaccgcgaacctaactaccccatccggctgttcctctttggtacgatacggttgaaatatctggcactgattgtcatcggtacggatttactgttcattacatccagcaatgcgggcggacatattgcccacttgggtggtgcattggccggactctggtttgctgccggactcagtaaaggaaaagatatcactgcctggattaacaaaattctagatgctatcgtttcactgttcagcttcaagccccgcaaaccgaagatgaaagttcactatggtaacagccgtcagaaagactatgactacaacgcccgcaagaaatctcaatccgaagaaatagaccgtatcctcgataaactgaaaaaatcaggatatgaaagcctgaccacagaagaaaagaaaagtcttttcgatgcgagcaaacgatagtacagaaaatgggaataaagcatattggtaaattcgtagcctatctgattttagcggttaatattttctttataagcttgctgcttctcaccgcttacagcccgcacatcaagccggttgctcaccccgtagagtcctgcttcgggctgacatttcctattttcctggtgataaacatctgctttttcatcttttggcttattatccaaaagtataagtttgcactttttccactggtagcatttcttttatgctattcacaaatacggacttatttcccgctcaatttccacacaagcaaattacccgaaaacagtttcaaggttttgtcatataacatcatgggcttcgacggagccgtcaaaaaagatggcgagaatctcattctgaattatctgaagaacagcggagcagatatcttatgcctgcaagaataccaaacgatagaatctccccgttatctcagccagaaagatgtggaaaaggctttaaaagattatccctatcataacatccagatagtgggaagaggaagtggaaaaggccacaccaaccggatagcctgctactctaaattccctattctttcatcccgtacactggactatgccagtgaatacaatggttcagtggtctatgaactgaaaatgggagaagataccgtaatgctcatcaacaatcatctggaatctaacaagctgactaaagaagacaaagtagtctacgaaagcatgctcaaatctcctgaaacggaaaaagttaaaagcggtgcacgcctgctcatccgcaagctggcagaagcatccgccattcgtgccccacaagcagacagtatcgctcaggaaatcgcagcgtcacgatacccttatatcattgtctgcggcgactttaacgatactcccatttcctatgcacaccgggtcattgaaaaaggattaaatgatgcttttaccaagtccggccgcgggctgggtatctcttataatcaaaataaattctatttccggatagacaatatcctggcaagcaaaaaccttaaaccttataactgtacggtggaccgttctataaaagaatccgaccattatccaatctggtgttatctgaagaaaaaagattgaaaacgaatcaataattaatactttatacctaatacttaaaacttatgtttaagaagtgtatttttattttagctacaagttgtatgatgtactcctgtaccacacagacggaaactaatccgttcctgactgagttccaaaccgaacatggcgtaccgcctttcgataaaatcaaactggaacattatgaacctgcctttctgaaaggcattgaagagcaaaatgcaaatatcgatgcaatagtgaacaactccgaagcgccaacctttgaaaatgtaattgtggctcttgacaatagttccccgatactggaccgggttagcgccatcttttataacatgacggaagcagaaacaacagatgatctgaaagaattatctattaaactcgccccgacattgtccgaacacagtgataatatctcactgaatcaggatcttttcaagaaggttgatgctgtataccaacagaaagatgcattgggactgactaccgaacaacaacgcctgctggaagaaacctacaaaggttttgtccgttccggtgcaaacttatcccctgagaaacaggcacgcttgcgcgaagtcaacaaagaactgtctacattaggtatcaaattcagtgataacgtgctgaatgagaacaacgctttcaaactttatatagacaaggaagaagatctagccggactgcccgactggttccgtcaaagcgccgctgaaaaagcaaaagaagacggacaagaaggcaaatggctgttcacattgggtaatgccagtcgtcttccattcctgcaatactctgaaaatcgtccgttacgcgaacaaatgtacaaggcctacatcaaccgcggcaacaacaatgacaagaacgacaacaagaagaatattacagacatcgtaaaactgcgtctggaaaaagcgcaattactgggcttcgactgttattccaattttgttttggataatacgatggctaaaaattccacagccgttatggacttcttaaacaacctgtggagctattcattgccaaaagcaaaagccgaagctgttgaattgcagaaaataatggataaagaaggcaaaggtgaaaaactggaagcgtgggactggtggttctatacagaaaaactccgcaaagagaaatacaatctggaagaagacgaaatcaaaccttactttaagttagaaaatgtacgcgaaggcgctttcgctgtagctaataagctttatggcatcactttaacaaaattggaaggtatccccgtataccaccccgatgtagaagtattcgaagtgaaagatgcagatggctcacacttgggtgttttctacgtagattatttcccccgtccgggtaagagcggcggtgcatggatgagcaactatcgcgaacaacaaggtgccatccgcccgttggtatgcaatgtatgcagcttcacacagcccgtaggcgatatgccttcattgctgactattgacgaagtggaaacactgttccatgaatttggccatgccctgcacggattgctgacaaaatgcaactataaaggtatttccggcacaaacgtagcacgcgacttcgttgagttaccttcgcaaatcaatgagcattgggctaccgaacctgaagtattgaaaatgtatgccaaacattatcaaaccggtgaaactatccccgacagccttattgaaaagattctgaatcagaaaaccttcaaccaaggtttcatgaccaccgaattactggctgctgccattctggatatgaatctgcacaacctgacaaatacccagaacctggacgtattggcatatgagaaagaggccatggacaaactgaggcttattccggagatagctccacgctatcgtaccacctacttcaaccatatcattggcggttatgctgccggctattacagctatttgtgggcaaatgtattggacaacgatgctttcgaagctttcaaggaacacggcatctttgacaaaaagacagccgacctcttccggaataacgttttggaaaagggcaacagcgaagatccgatgactctttacaagaacttccgcggaacggagccacaactggaaccgatgttaaaaaatcgcggaatgaagtaaaaacattcctatacggagggagttaattctttatcatgtgcaaatatttgagttccttttacttccgaatgtgaaaaaaaaactatatttgcagccttgtacgcaacagaaattaattaaaaaagtaatcataataaactaaaagtaacatgcaaaacaaaggatttgtaaaggtttttgcggtattgctcacactggtgtgtgtgttctatctctccttttcttttgtgactcgccattataccaataaggctaaagagtttgcaaaaggcgatgtgaaagtagagcaggactacctggattctctggctaatgagaaagtattcttcggcaattggacactgaaacagtgccgagagatggaaatcagtttaggtttggacttaaagggtggtatgaacgtcatcctcgaagtttccgttcccgatgtaatcaaagcattggcggacaacaaacccgacgaagcattcaatcaagcattggcaaatgctgccaaacaggctattagcagccaggacgacgtcattacgttgtttgtgagagagtatcacaaaattgctccggacgcacgtctttccgagcttttcgccactcaacagttaaaagacaaagttaatcaaaagacctccgatgcggaagtagaaaaagtactgcgcacggaagtaaaagccgccgttgacaactcatacaacgtactccgtactcgtatcgaccgttttggtgtggttcagcccaacatccaaagtctggaagacaagatgggacgtatcatggtggagcttccgggtatcaaggaaccggaacgtgtaagaaaattacttcaaggttccgctaatctggagttttgggaaacatacaacgcaaaggatgttgcaccttatctgcaagcagctgataacaaactgcgtaacattttagctaatgaagcacctgctgacagtgtagctgttgacagcaccgctgctccggttgtagcgcaagctaccagcaccgccgacagtcttgccgctgcattgaaaggtgaaaacaaagcacaatccgtcgatcttgcacaaatcaagaaagaacatccgttgctggctgtactgcaggttaattccagcggacaaggtcctgttgtagcttatgctaattacaaggatactgctgacatcaacaaatatctttccatgaaagaaattcaagccgaactcccgaaagaccttcgtctgaaatggggtgtttccgcttacgaatatgatccgaaaggacaaactttcgaactttacgctatccgctcaaccgaacgtaacggacgcgctccgctggaaggtgatgttgttgtaagcgctaaagatgaatacgatcagtttggtaaacctgccgtaagtatgtcaatgaatacagacggttcacgccgctgggcacagttgactaaacaaaacattggtaagagcatcgctatcgtattggacggctatgtatattctgcaccgaatgtaaatactgaaattacaggtggtaactcacaaatcacgggtcactttactcccgaacaggcaaaggacttagcaaacgtactgaaatccggtaagatgccggctcccgcacgtatcgttcaggaagatatcgtaggtccgtctttgggacaggcttctatcaacgccggtgtattctcattcatcgtagcattgatactattgatgatttatatgtgctccatgtacggtttcattccgggtatggttgccaacggcgcattggtactgaacatgttctttacaatgggtatcctttcatccttccaggcggccctgacaatgtccggtattgccggtatggtgttagccctgggtatggctgtggatgcgaacgtgttgatctatgaacgtacaaaagaagagttacgcgcaggtaagggtgtgaaaaaagccctcgcagacggttattctaatgcattctccgctatcttcgactcaaatttaacgtctatcatcacgggtgttatcctgtttaacttcggtacaggtcctatccgtggttttgccacgaccttgattatcggtatcttgatttcattctttaccgctgtgttcatgacacgtctggtatatgaatacttcatgaataaagataaatggctgaacctgactttctcttccaagatttctaagaacctgatgacgaatgtacatttcgacttcatgggtaaaaataagcaatggtttacaattacaggcattgtccttgttatctgtatcggttcattgttcgtacgtggcttgagccagagtatcgacttcaccggtggacgcaacttcaaggtacagtttgaaaacgccgtagaaccggaacaagtacgtgagttaatcgccagcaagttcggtgattctaatgtaagtgtaattgctatcggtaccgataagaagactgtacgtatcagtacaaactaccgtattgaagaagaaggtaacaatgtcgattcagaaatcgaagcatatctgtatgaaacgctgaaaccggtattgacgcagaacatcacgctggagacattcatcgaccgtgaaaatcacacaggtggcagtatcgtcagctcacagaaagtaggtccgagtattgcagatgatatcaagacttcggccatgtggtctgtagttctcgctcttatcgccatcggtctctacatcttgatccgtttccgcaacattgcatatagtgtgggttccgtagctgcactgaccagtgatacattaatgattcttggcgcttattcattgtgctggggttggatgccgttctctcttgaaattgaccagacatttatcggtgctatccttacggctatcggttactctatcaatgacaaagtggtaatcttcgaccgtgtacgtgaattcttcggcctgtacccgaaacgtgacagaaagcaattgttcaatgattcgttgaatacgaccctggcacgtactataaatacttcattgagtacattaatcgtgctgctgtgtatcttcatccttggtggtgattctattcgcagtttcgcatttgcaatgattctcggtgttgtaatcggtacattatcttctctgttcattgcatctcctatcgcatatatcatgatgaagaacaaaaagattgttgagcctgctgttgaagtagcaaaataagaactatatagtaacaaaacaaaaaagggaagccgaataaatggcttcccttttttgttttgtagtcccgaggggaatcgaacccctatctaaagtttaggaaacttctattctatccgttgaactacaggaccaaaaacatttgcggttgcaaagataaagcattctcccgatttaacaaaggcgaacgaatcttttatcgagaagttaaagaaatacagtctacacaagattttatcaaattgtcaacctaaatcagctacaaacagtagtatattagcgatctaatcttacatttagtcaacagttaggcaaccaaaaataaatgataatatgcaacttttattcgttcaagtcagacacatagtcagagttttgctcactccaaatatcaaaaaacactcatttatcaattcttttagtacacaatcacagattaattcgaaaagattttgccaagtcgcataactttccgacatttgcaaacgcatctttaaaagcgtagtactttttgtaagtaccccaaccaacataagaacagattttaagtgatcctataaattaatcatagtaatacgaaattatggcaaacgacatgatggtaaaagaactggatcaagtggtagtccgcttttccggagactccggcgatggtatgcagctcgccggcaacatcttttcaacagtatcggctacggtgggaaatgacatcagtactttccccgactatcccgcagatatccgcgccccgcaaggttctctgaccggcgtatcaggtttccaggtacacatcggcgccagcaaagtattcaccccgggtgataaatgcgacgtattggtagctatgaacgctgccgcattgaaaacacagtataagtttgctaagtctactgcttgtatcatcatcgacacagactgtttccaggcttccgatttacagaaagccgctttcaagactgacaatcctatcgaagaaatgggtatcaagcaagacgtgattgctgctcctatctctcaaatggtgaaagattgcctggcagaaacaggtatggacaacaaagcaatgctgaaatgccgcaacatgttcgctctcggtttggtatgctggttgttcaatcgtgacctgaagattgcagaagatttccttagagagaaatttgcaaaaaagccggaaatagcagaagccaacatcaaggtgattcacgccggctacgactatggtcacaatacacatgcttctgtagcgcatacttataagatagaaagtaagataaaaacccccggaatatacatggatatcatgggtaacaaagctacagcctacggtttcattgctgctgctgaaaaagcaggtctgaagttgttcctgggttcttatcccatcactcctgctacggacgtattacatgaactttccaaacataaatctttaggtgtcattaccgttcaatgcgaagatgagatttccggctgtgctacagctatcggtgcatcttttgcaggtgcattggctgtaactaccacttccggtccgggtgtctgcctgaaatcagaggctatgaacctggcagtgattacagaacttcctctggttgttctgaacgtacagcgcggtggcccttccacaggtttgccgactaaatcggaacaaactgacttattgcaggctttgtttggccgtaacggcgaaagcccaatgccggttattgccgccacctcaccgacaaactgcttcgatgcagcctatgcagcttgtaaaatggctttggagcacatgactccggtggttctgttgacagacggtttcgtagccaacggttccggttcatggaaactgccgaatctggatacatatcctgaaatcaaacctcagtatgttactcctgagatgaaggataactatactccttataaacgcaaccctgagaaccaggtacgttactgggccattccgggacaagaaggctatactcatatcctcggtggtctggaaaaagacagcaacactggtgcgatctctaccgatcctgaaaaccacaatctgatgtgccacctgcgtgcagaaaaagttgcaaagattgctgtgcccgatgtagaagtacaaggctgtgcagatgatgcagacctgctgattgtaggttttggcggtacttacggacacttgtattctgctatggaagagatgaacaaagccggacaaaaagtagccttagctcacttctcttatatcaacccactgcctaaaaatacggctgaggtattgaagaaatataagaaagtggtagttgccgaacaaaatctgggacaatttgccggttatctccgcatgaaggtagataatttcactccgtatcaattcaatgaagtcaagggacagccgttcgtagtaagcgaattggtggctgccttcaccgagatactgaagaagtgacaagctacaggctacgagtaacaagtactgccctgaacagacttgtagcttgtagctcgtaactcgtagctactaaaaaacttatcaacttaaaacttaagaacatcatgagcgaatatacagctaaagatttcaaaaaaggacaacctcgttggtgtccgggttgcggtgaccacttcttcttgaactcactgcacaaagcgttggcagaaatcggtgttaagccttgggaaactgccgttatttcgggtatcggttgctctagccgtctaccttattatatgaatacgtatgcgatgcagactatccacggacgtgctgccgccatctctaccggatgtaaagtaaccaatcctaacctgagcgtttggcaggtttcaggtgacggtgacggtctggctatcggtggtaaccactttatccatgctatccgtcgcaatatagatatcaacattctgttgctgaacaaccgcatctacggtttgacaaaaggacaatattctccgacgtctccccgtggcttcgtcagcaaatcctctccttatggcacggtagaagatccgttccacccagctgaactctgcttcggtgcacgtggacgtttctttgcacgctgtgtagctacagatggtcccggcacaggagaaattctgaaggctgccgctaaccataaaggagccgctgtgtgtgagattctgcaacactgcgttatcttcaatgacggcacctacgactctgtatacaacaaggacggacgtgccaagaatgctatctatctggaacacggtaagccgatgcttttcggtgagaacaaagagtttggattgatgcaggaaggcttcggactgaaagttgtgaagttgggcgagaacggtatcacagaaaaggatatcctcgttcatgatgcacactgcatggataatacattgcaactgaaattggctctgatggaaggtcctgacttcccggttgctctcggtgtgatccgcgatgtagaagctccgacttatgacgatgctgtaatggaacagattgaagaagtatcagcaaagaagaagtatcacaacttcaaagaactgctgatgacaaatgatatttgggaagtgaagtaagcaaatacaatattctttttcagcaaaagcctcattaccgctgctattatatagtacggtaatgaggctttttgcgaaggacgaatctgcttattagagggattaattcattactataagg

SEQ ID NO: 6362 - DNA, 9697 bp, Unknown
  gut microbiota DNA sequence
aaattaaccaacgctgatgttgtaaagcacggttatggaaggaaagtattcaaactcttaaacactgcctatgctcccctcttcggctatacagaattatcagacaaacaagtggatatgtatgtcaaacgatacttcccgctgatagacaagcaaatgctgcccgtcatacaaaatgagaatgaagaagttataggagtggcaatcaccatgggaagtctgtctcatgccctgcaaaaagccaaaggaaaactcttccctttaggatggtatcatctggttcgtgccctgaaatggaaaaaagaggaaaaagccgaactgctcctgatagcggtgcgtcccgattatcagggactgggggtaaacgcattattcttcgatgaccttataccggtttataatgagcgtcactttaaatgggctgagacaggtccgcaactggaagacaatgtaaaagaactgactcaatggaagcccctgcatcccaccctgacaaaaagaagacgatgctataaaaagaaattataataacgataaaaagagatatggaaagaaaagtagtaatcacaggtatggggatatggtcgtgcctcggaaaaacactcgaagatgtacgcgattcgctatataccggaaaaagcggcattatcttcagccaggaacgcaaagatgccggattccgttccgcattatgtgcagatgtagaacgtcctgaccttaaaccgttcatcccacgtaatttacggcatttcatgcccgaggaagctcaatatgcttatatggccacacggtcggccctagaaaatgcaaagctggatcaagattatatggacagaaatgagatcggcattatctatggaaatgactccgtagctgaagctaccatgcaggcgctcgataagtttcgtgagttcaaggatacatcagcttgcggcagcggtgccattttccagtcgatgaactctaccgtgactatgaatcttgcctgcctgttcaaactgcgcggtattaacctgacggcctcagccgcatgtgcatccggttcccaggctataggattggcatacacacttatacgtagcggaatgcaggattgcattatatgcggcggtgctcaggaaaccaacttatacagcgtggcttcattcgacggtatccaatcattctctatacgtgaagacaatcccgccaaggccagccgtccgttcgaccgcgaccgtgacggtctggtacccggtggtggtgcggcaacagtaatcatagagagctacgaacatgccgtgaagcgaggggcacccatactcgcagaaatagtaagttggggattctcgggcaatggggatcatatttccactcccaatgtagcagggccggcccgttcgcttgaattgtgtctgaacaaggggggtatatctccccaacaaataggttatatcaatgcacatgccacctctacacgtatcggagatagcagagaagcgtcagccatagctcagatattcggcgattgcaaggttcccgtaacctccaccaaaagccagacagggcatgagatgtggatggctggtgccagcgaactgatctactcgatgttgatgatgaagaacgactttatagcaggaaacatcaactttgaaaatccggatgaggaaactgcccgtatccatatattaccggaaacgcgcgaagcgcactttgatatgttcctttccaattcctttgggttcggcggaacaaactcaacccttattgtaagaaatttatagtaaccatttaaaaagaaaattattatgacacgtgaaagtattattgaacaggtaaatgccatattggctgaagaatttgaaattgatcaggacctttttacaccggatgccaatgtaaaggaaacactctcgttggacagcctcagtcttgtggatcttgtagccattatccagcatacctacaagatcaaaattcccgtaaccgatttacagaagattcagaccttcaacaatctctatgactatatagaatcacacttcgggcagagtgaataataaagatataaagagatggtagtatgacagaattctgcataaagatttatcactttttccgtaatcatcgcgcagttttctgggtgtcaatgattgctttatatgccttcttcggatattttgcctcaaaaatatatctggaagaagacatcaacaaactgatgccctcatcgaaaaatgaggatggtactaccaaactcgcctttgccaacctgcgcatcaaggataaaacattcttgctctttgaaggaaagaatggagcctctgtggaacatataaccgaaatatgtgatgctttcattgattctctggaatctagaaatgcagccatggactcaacacagcaggtcatcggaaacattttctacagattgcccgatgacctgatgctggacgttatcgattatatgagtgcgcacttaccggcatatatcgacacaagcgtctacactcgtctcgatgcgatgcttacctatccacacatgaagctacaaatgaaagctaaccacgatgacttgttgagtccggtgggaagtatgtttcccgaacttatacagacggatcctgtaggacttcgtggtttacttatggaacagatgaaaccttttaccgaaggggcagccggcagctacaaaacccttaacgggcatttcttcgtccaagactccacagtgtgtgtagcatttattacacccatgtattcagccaccaatacgggacagggttctaccctattccgcatattgaatgatcagatagaacagttttctgcctctgctcccgacgtaaaaatcagctatcacggtactcctgccagtggattctataattcatggcgaataaaatcggacctgaaaggaactattatcggctcattagtgctggttcttatctttatttctatctgcttccgcaactacaataccataccgctattactacttcccgtggtattcggcactctcttcggacttgctgcaatgtattttataaaaggacatttctcattgttggcactcggtatcggagcagtagtactgggagtggcactcagctatgtactgcatatcattacgcattataaatatatcagtgatcccgaacaagtgttgcgcgatcaggtcaaacctgtttgtttaggatgccttaccaccattggttccttcatgggacttatcttcattcggacagaactgttacaggactttggtctcttcgctgctttcgccattgtggggactacattcttcagcctggtatttttaccacagttcctcaatccaaggaaaaacaagttgaatcaccgtgcattcgccatcatcgaccgtattaatgcttacccgttcgaccgtaaaaagcccctgcttttcaccatacttgccactgcggtagtgtgtataggattctatattgccggagggacccaattcgatgccgacatgcacaacttaggctataaagccgaaagcacttcatattcagagagtctgcttcgttccaaaacccatacaggtgacaaacagaagtacttcgcaagttcaggggcaacgatggaagaagccattgagaattttgaaatcatggctgccaaactcgattccctgcaaaatatcggacttgtgaagagctatacccatacgaatcaaatatttgtacccttgcatgtacaacaagaacgcattgacgcatggaaaaacttctggaccggagaacgcttgcaacttgtacacgatttaatcaataagacagctcccgaagacggtcttattcccgatgcattctctcctttctttgaatttgcaactgctgattatgagcctgacgctctttatgaagcaagtattattccggaaggctaccagtctactctgatggaacagtcctacaacgacgagtatctgtgctttacatccgtaagatgcaaaaacgactctattcatagcaaggaaagtgactataaccgtatctgtgaggctatagtttcatcacctaacctgcttgtgctcgacacctattattataccacagatacactgatccaattgaatgacgacttcaatgtgctgcaatgggtttccatgctctttgtactcatcgtactcttcttcagtttccatttcaatatcaagcataccctgctcggatttatgccaatcttgtcgagctggcttatagtgttgggggcaatggtgatttttgatgtacggttcaatctcatcaacattatcatctctacatttatctttggtataggggttgattatagcatattcgtgatgaacggacttattggcggtaaagagaactcgcgcttgctgggttatcataagactgccatattcttcagtgcatttatcctgattgttaccgtgagttccatgctgtttgccgaacatcctgccatcaaatcagtaggattctccactcttgtgggcatgatttcggcagtagtgatctcttatgtggtgcaaccggccattttcagaatgattaataagaataaagaatgaagtacgatgcagttatcataggtagcggactgggtgggctggaatgtgcacacattctttcgaaagccggtatgagcgttcttctacttgaaagaggaacacaagcaggtggatgcctccaaagctacaggaggcttggattggctttcgatacaggctttcactatgtaggaggtctggacgagggacaatcactacactctgcattcaggcatctgggactgctacgtcttccatggcaacgccttgacaaccatttcgaccgggtaacaatcggaaatcagactttcagcttcgcacaaggatatgatgcatttgtcgaaacattgacagcagcctttccagctgaacgtgatgcgttgaacaaatatgcagatatgctgaaacagtgcggtgaacagcaattcgatgcgttaaatcctcaaaccggagagtcatcattactttcccggttttttgaaacaagcgcttatcagtatctgacagagacattccatgatccgctactaataaatgtactctgcggcacttccctgaaaatggaattgcgaaaagaatctcttccattgttcaccttcgctcatggtaacggaagtttcattgaaagtagttggcgattaaaaggggacggttctctgatagtaaactcactggctgatggcattcgtatgcatggcggcgagattatctgtaataccgaagtccgggagttagtggaaaaagatggtaaactggtgcatgcagtatgctctaatggagaaatctacgaaggcaatatttttatcagcaatatccatcctgctgtcacctgcaatctggtgaaacaaagcagcaggatgaagaaagtttatcgcagcagaattactcatctggagaatactttcggcatgttcaccgtatcgctccgcatcaagccgcaaactctcagatactttaactggaaccaatatatttataaggaaccggatgtatgggcatttcatctgaaaaacaatcctgtaagcggagtactggtaagttgccgcataccggaagatggcagtaagtatgtacaacaggtagatctcctcaccccaatgaactggagtgagtgtgaacaatggagccataccgaagtgggccgtcgtggtgaagattataaagcgatgaagaagcgtgtcgcagacgaatgtatcacccttgccgaacgtttcattcccggccttcgtgataggatcaccggatgctacaccagcacgccactcacttaccgtaattatactctcacacctgaggggtcagcttatggcctgcgcaaggatttcaaaaatccgatgataaccctgctctcaccacgtacacccatccccaacctgcttcttacgggacagaatctgatgctgcacgggttacacggtgtgaccatgacagcgctcttcacttgtgctgaagtattaggaaaggaaccgatatggaatatagtaaaaaactaaaatagacctaacaatgaagtatgcattagtaaccggaggcagccgtggcattggccgtgctgtctgtgtaaaattagctcagatgggctaccacatcattatcaactatgtaagtaacgccacagaggcccaaaagactctggaactggtacgccaggccggacaggatggtgagatactgatgttcgacgtaagcaaccggcaacagaccagcaaagccatcgagtcatgggagaacgcccatcctgaagaatacatcgaggtattggttaacaatgctggtatacgccgtgacaatctcctgatattcatgcctgaaaacgactggcatcgtgtactcagcattagtctcgatggtttttacaatgtaacacaacccttgcttcaatccatgttggcccgtaagttcggacgtgtcatcaatatggcaagcgtaagcggtgtcaaaggaatgccgggacagaccaactattccgcagcaaagggagccatcatagccgccacgaaagcactggctcaggaggtagcacgcaaaaatgtgactgtcaacgctgtcgcccccggatttatcagaacagatatggtagagggactcgacgaagatacactgaagaaaaccattccagccaaccgcttcggtactcccgaggaagtggccgaactggttggctttctggtttcgccaaacgccggttacattaccggtaatgtgatttcaattaatggaggactttatacttaaactacatgtatgaaaagattatatatcctatttatcactgccatcctcttgtgtaccgccttatcggcacaagaagctgatatccggaaagttgccgaacgatacaaaggcataaataccttcacagctaccgtgattcggactaagcaccatgcagcagtggcagaagatgctgttaccaaaggtaaatttcacttcatgcagcctaatgaagcatacatgacgtttaatgaagggaaagatatgctgataatggacaacggtgtcttcaccatgatcaatgatggtcaggaaagcatagctaagggagtaacccataagcaatttgaagttcttctgattgttctcaggaatctactttcgagcgataacgacagtacggatatcaaagaagtggccgacatggaaattacgaaacaagggaatctctgcgcgctgaccatcactccgattattccggatgcgaaagctaagcgcaggatgatgttcacatcgttcgtactgaccatcgatattcaatcatccgaatttaaaggtttacgcatgaatgagaagggcaagaattatacgcaatatgacttctccgactaactaataggagattacaatgggaaaaaagattgtttttttgttagcgtccttcttcttcgtgtgggtggcgaatggacagaatacaataataaaaggaatcgtaaccgattcgattacaggcgaaaggttgccttatgtatctcttaaatttgagggtacaaccataggagcagccaccgatggggatgggaacttttcattctctactccaaccatcgataagattctggaaatatcttatttgggatatgacaagaaacaaatgaaagtcatcccggggaaaaccaatgacctgaaaatacaattagttccaaatggaattatgttgaatgaagtggttgtcagacctcaaaaggagaaatacagcaagaaagaaaacccagctgtaacatttgtgaggcaggtgattgctctacgtgaaagtaatgacccccataatcatgactatttccaatacgaccggtatgaaaaaatggtcttcgccatgaatgagtatgaaccaaagcctaaaaagaatggcaagtcaggcaagttcgatttcctggccgattttgtcgatacgcttgatattggcaccaccattctgccggtttcggaaaaagaaaaagtcgagacggtctattaccgtaaggacccaaagtctaagaaacatatagtaaaaggaaacaaatcgtccggtgtagatgaaatattctcgcgcgacggtatccagcaggttttgagcgaagtattcagggaagtcgacattttccaaaatgacataccgttatttctacagaggtttgtaagcccgctttccacaatcggaccgaactattataaatactatctgatggatacattaaacgtaaatgggcaaaagtgtgtggatctcggatttgttccgttcaattcggaaaccttcggttttaccgggcatctgtatgtcacgctcgactccacttattttgtccaaaaagcaatcctcaatgttcctaaggatatcaatttgaattttgtttccagaatgactatcgagcagatattcgaacggacctcagatagtacccgtattattaagaaagacgatatcagcgtaaatttcaagttaagtgagaaaactaaaggaatgtatgcaaggcgtttgaatgtctatagcaaccagtcattcgaagagcccaatgccgaacaagcccagatctttaaaagtagtgcacctgtcatcatctcaaaagatgcttatcgccagccggatgatttctggataagcaatcgtccgggagaagcaatcaaaaagaatccgaactccgtggaaaaactgatggtgaaattacgctctgttccggtattttatgtaacggaaaaggtcgtcacaactctcgtgtcgggctatatccctaccaataaagacccggctatgaataaattcgaatttggtccgatgaattctaccattagcggcagtgcaatcgaaggggcacgctttcgggtgggaggcacaacgacgcccgcactcaataaaaattggttcttcgatggctatatggcgtatggaacgagagatgaaaagctgaagtataatgcccttgttgaatattcattcaatgaacgcaaagaataccgcaaggaatttccgataaattcaatccggcttgaatatatgtatgatattaacaagttgggacagcagtatatgtacaccagcaaggataatgtccttctaagtatcagacgtcagaaggatacacgggcaacttatttgcgacaagctgagctgacttactcttacgaacagtataacggactggcatataatgccattgttcgtaaccgtcgcgaatatgccacggaatatgctgttttcgaccgtatcaatgcagacggaaccatcagcgatgtcaagcactataatatgacggaactggaactgaagctccgttatggcaaaaatgaaaaattctatcagactcgcaatagtcgtgttccaattacatttgatgctttaatctttaatttcagtcatgtcatggcaaagaaaaacctgcttggctcatcctacgattatcatcgtacggatatcggcatacagaaacgtttctggttttcagcttttggatatatcgacattatcaccaaagccggaaaggtatggagcaaagttccgtatccgctgttaattctgccgaatgcaaacctttcttataccattcagccggaagcttatacgaatatgaacgccatggagtttatcagtgacgaatatgtttcctgggatttgacatactatatgaatggaaatcttctgaatcgtctgcctctcatcaagaaattgaaagcaagggaggtattctgtttccgtgg

SEQ ID NO: 6363 - DNA, 37052 bp, Unknown
  gut microbiota DNA sequence
gtaggttggaacgtataaccatcgcacttttataaatgagcatcacccgaaaaaagaaacaaaacggacttttctacacaaaagccgaagaaagaataaataccctctcgcacgccgcaggcatcctgatggggattattgtcggcacgatatttctcgtgaaaggctatcagagtggaaacttctgggctgtatttggcatctggctctatctcttcggtatgcttggctcttacgtctcctctaccctctaccatgcgctgaaataccataatccctggaagaaacggttgcggaattgggatcatgcagctatttactggcacattgcaggcagttattcacccgtcacgctgattgcactgcggaatgaaggtgcctggggatggggattgttcggattcgtctggctatgcgccataatcggcactatcgtgagtttccgcaagatggaggagcatagcaatgtggaaaccatttgcttcattgtcatgggattgtccgtactggttgccttcaaacctctatatgccattgccgcaggaacttgctactggatgattgccgaaggagtctgctacatcaccggagccgtattctactctttccgacagcgatatatgcattctgtcttccacttcttcgtactggcaggatcggcatgtcacatggtggcggtatggcttatcctataaaataaatacgcaggaaattacattaatccccttacaacacatcacatacacgcccatccgaatttacgcacaagttccgccaacaggctacggtcttttacagggagattaattaccacattctcacgcatatctcctgacaatatatatccctcagcaggcaatttatcttcaggcaacgatttctccatgagcctctcgtgttgatattgccccgtctgaaacactacatcaaaatattcatgtttgttttcaggatgaatgaaaagtgagcgtaaatctataccgccactcaaaaagtcttccaaacgccgggcagaaatacgaatacctgtatagcgacaaagcaattcatcttcatatagcaaacaaagatacaaagtatcaaaggcatcacgtgccacaaaaagctgtggtacatcacagaaatccaatatcttttctatccttaatacattttccataatcagattactttagcttgtgaaacatcaaaatctttcgttctccaccaagaataatgtgcagtgtcgaaagttttctttatcatcccatctttaggcttcaattcaaccaaggcaatatttgcattcctgaactttggaagcttcaatcttttctcagcctcttttctgtcagaaaacaaagaaacggctcttgttatacactcatctacgcccagccccttaaacactttgtccggttgcagtcttctctgcgaaaaaaaatctaccgattgcacaggattgccgtttgctattctgtaataataaccatcacactgttgagcatcttcgggtggacattgttctggcaacaactcaaaccattctacttccattatttccttatctgtgtatttctcgcaaagttactgcttctgtacaagtaaacaaatatttctcagaatatttatcaacccaaatatatcaccatttcacaagatatttatgcaacaagttatcctgaatcgaattcaacacatgttccatttttacttcttcgtactggcagggtcggcatgtcacatggtggcagtatggcttatcctataaacatccatctgctaaaatatattaattaaagtctctcttccttgcttttctccttagcatcatctacgtttgcagtgttgtacatcagtgcaacacctataaagttatgataaagatagagaatataagctacggctataagcctaaacaacctattttcagtgatatatctctaaaagtaggcagtgggatatacggactcctgggagaaaacggtgtaggaaaaacaacactgatacatctcatttgcggacttcttttcccttggaaaggtgaatgcagcatcgataacagtaactccgcccgaagaagtccggaattactgagccgctacttctttctaccggaagaaatgcagatgcctactgaaagtatctatcagttcgccgcccgccattccgtattctatccccgtttcagccgcaaggatttcgaacagaacctggaagaattgcacatcgatggaaaacagaaactttccgccgtctcctacggacaacagaagaaagcgatgctggcgtatgccttagccctacacactcccctcaccctgctcgacgaacctaccaacggcctggatatcacctcccggcaagccttgaaacgtatcatcagtcgcaccgtggatgatgaaagcaccttgttcatctccactcatcaggcacacgatttcgaaaacttgctggatcacctcatcatcctcagcgaaggcgaaatcttactgaaccgctcactggatgaaatcagcgaacggctgctttttgtccgcacagcctatctacccgaagatagcctttatagcgaacaagacctgcatggctacttctccatcctgcctaatgaagagggagaagagaatacgccggacattgaactactgtataaggcagtgctgcaagtaccggagaaaattaaaatgatatggaacgaataaatcataagaagaaattatgaatacaacttttaatctgaaacgtttcttcctattggagaaatacaagaagcaagaaaccggaaaacacttgttatggagtgcaggtgtcgttctggggatttgtattctctgtatgatgtatgatattaataaaggaatgagttattataccgaacatacacaagccaattacttttgtagatatatcttgtggtatatctgcattgctccttgcctattagagccaagtatgaccaagcacaattctaccctttatttgttgctgcccgcttctgcttttgagaagttccttcacttatggatgaaatatatactcatactcccgatattttgtataatactgatattaggaatgaaaggggtacttaccctatcaggtaccggctatctgtcacacttcggtaatcacatggaactttatataatccaaaaagatcagatcctgacatatagcctgttacaaggtaccttttttatcggttgcatagcctttaaacaacaaaaactaataaattcttttgttgtcttatgctcctgccttattgcctttttcggaatcatactttctataagtttatgggaaccggccgacaacagccacggatattggatagcaaacatatcctatccgatatataactttccgatgagcagtacgggagaagccatcatcgctttctgcaactatgccactcccccgctgtttatcatcggaacatgggtatcagtctacttcctgctcaaagaaaaacaactgtaagctatggagtttaaaaccaacaaaccaatataccaacagatcgtagacttctgtttcagcaagatactcacccgggaatggcgggcggaagagcgggtagtctcggtcagggagctttctacacagcttgccgtgaattcgcgcaccgtaatgaaagcctacgaatacctacaggcggaagacattatttatccggaacggggtatgggcttctatctggcaaaggatgcggtgaagaaagtgatgaagatacagaagaaagaattcttcgacaaccaactggccgatgtattcctcaatatggaactgctcggcatcagcatagatgaagtgatagaacgatataataaacttaaaaacagcagttcatgaagagatacgcaaagacagcattatggattaccttcggactcctcttcgtgctcatcatagtcaaagtttttactctgatgtacgaactgaattccgctgtacagtcttaacttttacagcctcgacgccgaaagtataaacatctgaaatacaaattatagaatcttccctgacagggaggagtaccttctacatctctaatcaaacagtaacctactaacaggaacgaatatgaaaacaaaactatttttactactgactgtcctttccgtactcagtacgcaggcacagcaccttacaatcaaaggacgtgttacagatacttctcaagaagccatcatagccgccaatgtatcgctatggaccacggactccactctggtgaccggagtgacttcggacacgcagggtaagtttgccctcaataaaatcaaggcgggtaattaccgcctggccattacttttatcggctatcaaagtgaagtcatcctactgaaactgaacaacaacctcgacctgggcgatgtacagttgcaggaagatgccgtaagcctgggtgaagtgaccgtatccgccagcaacgtgcttcaacgcgtggaccgtcagattatcctgcccaccgagagccagctaaaacgctcgttcggtgcctacgatctgctgaataacctcggcatcgcccgtctgcaagtggacaagttcaccaatagcatgagcatcagcggtggcggagccgtacaaacccgtatcaacggcatcaaagtgacggacaaggaaatagccgccgtcagagccaaagacgtgctacgcgtggagttcatcgaagacccgggcaagcaatacggtgacgacgaactgggtgccgtagtcaatattatcctgcgtcgccgcgaaacggggggtgtggtgaacttccagctttccgactcgccccataccctgtggggagagaatttcctgagtgcgaagttcaactacaagaactccgaatggggcatcgactacttcaacaagaatggcaaataccacagccgcctcgaatctcacgaaacgttctatctgggcgaccgtaccatcgaccgcatcaaggaaggtatcgaagatgaatctcccgcactcagtttcatcaacaacctgaatctgacttacaatctgacaaaagcggacaagtatgtattcaacgccatctttcgcaataacctcaacaacgctccctatcagaatgaactgaacaaaatgtgggcggcaggcgatacggaatctatttattcgtacgtcaacaaccattcgtccagctattctccggcactcgacctttacttccagcataccctgccccatcagcagagcattcagatgaatgtgacgggaacgctcatccataccaaaaacaaccggaaatataaggagtacaaaaatgagaatacgccactggcagacattcagacactggtggacggtgacaaacgctccatcatcggtgaggccatttatgaaaagagtttcaaggatgtaaaactaagcggcggtgcccgccactatcagatgaggacggaaaatgagtacaaaggctccaaccccacaacttcgaagatggatcaggcacagacctccgctttctttgaggtgcagggcaaggtaaaggagttcagttatgcaggcagcgtaggtatgacgcgcgcctggttcaaggaaagtgacgaagaccatgcttactatactttcacgcctaccgtacgattgagttataatttgaagaaagcgggtttcctgcgctatcggttcaatattagtcccgccataccttcactcggttcgctgacggatgtggaacaggctattgataccatacagattgttcgtggtaacccgttgctgaaaacataccagcagttcacaaattccttgtcctacagttattctaagaaacagttcaatgccaatctgagcctgcgccatcagtattacgacagtcccatcatggaaagtatcttcgtcgaggatggaaaactgatactgaaagatgaaaaccaacgctcgtttcagagtctgaatacggaactgatgatcggcacaaacggggcaacactgttcggactgaaagatttcctgactctttatgcttcgggaggatacactcgcagttggtcggaaggtttggaatacagccacacgtacgatgaattttactacagtgtgatggcgcaactgcaatacaaaggcttctctttgctcgggcaattcaggaaggtgcagaacaacttcttcggtgagaccatcaagaagaatgaaaatcagacggcatttatggcaatgtacgccaagcagaactttcaggcagggattggtgttctgtttcctttcactaataattataaggtgggaaaagaacgcatcagtgaggtggctcccttccgttcggaaacttttgtgaaggagacggggcaaatgttcatactccgcataggctatatgttcgagttcggccgcaagcacaaagccggaaacaagggattgaacaatagtgatacggacagtggcatcattgacatgcagagataaagatccggatataatttcatttcagccctctttgtgaaaagaggaagtccaaagggcgaggtggcggattatacaaattgcttcatgtataattcattaattacctgactgccgcctcccctgcggactttttctatttataaacgggaagaaaaatctttcttccgcatgatccctttttcatccttattcttcatttccagtttcaaaggatgaaaccagcagtttctcggtgtgaaactgtcagtttcaagcaatgaaactactggtttcacggcatgaaactgagagttccaagccatgaaacaaatctgggaacatggagatgaattttatcaggttgatagctcctgaaaagcaggtccggtattacttaataatagtcacagtgccttctgcaagctgcctttccttaaccggggcagctgccgcataacctaaagcagcgcaaccgtacacacgatgattttcgggaatacccagcttcgtcaggaaagcacgtacctcaggatcatcataagtctgccccaattgattgatccagcaggagcctattccgagagattttgcagcaaggaagatattctgcatggcacaggcacaatccatagctgcccaccactgcgtcggttcattggatacgatgacaagcgtaggcgcatgataataacagcaataggtctggctgtgtccacgctcctgcaaacggggctcttcactcttggcaaaagcgcctttgatcttctcattcagttcttccagcaccgcggcattctgaatggctgtgaaatgccacgtctgatagttcataccactgggagcataggttgccgcttccaaaatagcattcagatcttcttgtgaaatctgttgtgccgtataagcgcgtacactgcgacgcgacttgatggcttttaaaacttcattcatactctttatttttttgtcaatccaatctttacattcagtctgaaataatacacgccgttctctttttccaaaaagccgtacttgtccttgtctaccgagcctttctccaaacgggtattcaggaagaggaaatcggcaaatgtccggtgctccgacttatgatagcaaagcacttctccttctgcatccaccagcagaataccttctacggcagagtccgtaccgttataaatctttgccggacgcatgccaaaggcaagtgccaacaagaactgcttcatcttaaactcgtagaaaccatgcttgtttatcagctcatcttttatcttcaagggatttatctctttgatgcgttccgtcagttcactgatacgggctataccgtcgagatgcatcatacgcaccatttcagccagcatacgaggaaaatgcaaatcaatcatcagcaaattacaacggaatacacggtcggctacatcggaatatttcagtactccgcccagacgttcaatcatcagcatacgctcagccacctccgtaggagactccggcaaagcattcaccttattcaccgtaggcgtagcaaatttaacacccgactgttccagtttcagatttgccgtacgtccgccatcaagcaacggattcattgaactgagacgacaacggacattgaatcccgtcagcggagcctcgggatgccagaaagctactgagaaatccgtacggtcttccgtcttcgcttccaagtcgtagatattgaccgcatccagaaatgcctccagtccttcgggaacttcaatggcgtcagtgccactggtagtcttcagtaactcaaggataaactcggccgctccaccaaaatcttcacggggaatgacttgttcctccttatcggctgcaacaaatgccccctccttctctatcacaccactgacaatgcggacattgccctgctctatataataacgacgcgtaccgtcatgttcctccctctgtatcagcgcaacaggccaacacttcgtttcatccttccggacttgcggtgtacccagtgaaacctttccgtctgccaggaggcgaaagaatgtgtagagttcgcccaactcacgttttgtagcttcgaatgccataataaattgttttttttcctaattaacaagtgtgcaaagataatgcaaatcgaaggtagaactttcatgctggcatgaaaaagttatgctgaagcatagcttattttatttaaagataaggaaatccccccaaaagaaagtgaatggacaaactatttccatgtagaagcgttctacttaaaacatcaaacatttaactccctatagcatggaaaatgaaaagaatatagtagccatcacagctacaccgaatgggcctttcattgtggaaggcaattttaaactgatagacagagaaggaaaagcggaaatacgaacaggcagaattgccttatgccggtgcggtaagtcctataaacaacccttttgcgatggtacacaccggaaaatccactataatgatttatctttgaaataaacgtactggatcaccatgaagccggagacattacacttcctcgaagcgtaatgtctctactttttccagacgcgccttcaacttcggcatcatcgacttccggatgcgaagtgtcatacggcaatccatatcatacgactgttccagaatttccggttcttcttcctttacgatacgcattacatcattcataaagggatattcaaacaagaaggtcaccgcttcgtccaccgttttctctatcacttcggcaacagctatcgcctcggcagcggcagctttataagcaacaatcagtccgcttgttcccaactttatgccaccgaaatagcggacaacaattatcagtatatccgtcagttcattggagtttatctgtcccaggattggctttcctgccgtaccggaaggctctccgttatcattggcgcggaaatctttacgttcgggccccagcatataggcgtagcagacgtgacgggcatcataatatttcttctgataaacttccagatgcgattttacctcatcgacagtacgcacgggcaaagcgatagcaatgaacttgctgcgcttctctgtgtaaatcccttcggaaggggcgcttatggttttgtaggtatcttcactcatgctgcaaagataagtattcttattgttatgagaaaatagtttctaatcctctctctttttcagacgaaacaggcagactttagaagttttttcgtaagtttgtcaaaagtacagcgcattccatagaaaaaagtctgattatgagtatgcatcagggcctcatactgataatcttagcatgcaaggtcctcccataagtaacatttattactatgaacaacaagctgtttacctttctcgaccctctgctgggttacatcgacaatggtcgtttcttccgcgaacccttccgctggctctatgtcatctttgccgtattgaacttgctgtttcctatttttatactggcaaaggtcatcgagatggacttcttcaaatatgccgaagggaaattaatccttgctttcattctgctgttcattatcctttgcgcaggagcatggggaagctatctgctctggatgaaccggaaaaacaaactgaaagaagctatccaggaagaaaatgaattcattgccattcctgttgtatcgcacctgacgcagacgatgggtgaatggctgggactttatatcggtgtcatcggtacactgtgttcggtggttattgcaatctttgctgccaatgaaatcagatacatactgccgataccttccggtatgttcttcctgatgcctatatatggcttcctgattgtggtgttcgcacgcctgcttgccgagttgtatcgcgcattggccgtcattgccaacaacaccaagaaattgacaaagacagaagcaaaagccgaagccaaactggaagatatagaagatatagaggaaatctaaatatatgaagaaagtagtcatagctattgactcctttaaaggatgtttaccctcggtagaagctggaaaagcagctgccgagggtattcgttccgtatacccggaatgtgaagtcatctgcctgcccatagccgatgggggcgaaggaatgctggatgtgctgattatggcaaccaacggtcaggaagttccgatctccgcccacgatccattgatgaggtggcgcaatacttattacggcatttccgaaaatgaggaaacatctttcatagaaatggcaagcatcagcggattgcctttagttccaccggaaagaagaaacccgatgctgactaccacttacggcacgggagaaatcattcgtgatgctctggaacgtggttgccgcaactttatcattggcattggtggcagtgcaaccaatgatgcggggttaggaatgcttcaggcattaggctttcgtttttcagacaaggagagtaaagaagtagggacaggccgtggagaagtattaataaaagtagcgcatatagacagcacttgtgtccatccggctttaaacagttgccgatttactgttgcctgtgatgtacaaaatccattctatggtcccgaaggagcggcttatgtctttgcacctcagaaaggagcaaaccgggaaatggtggaggcattggatgcaggactgcaaaactttgcagaagtcatccgtcatacgacgggaaaagatatttcccatcaccccggagccggtgccgccggaggtatgggtggtggtctgctggctttcctgaatgcggaactgaaacccggcatacaactgatgctggaagctcttgacttcagtaataaaataaaaagcgctgacctgatcattaccggagaaggaaaagctgaccggcaaacattgatgggaaaagttccttccggcatacttgctgaagcccggaaacaaaatattccggtaatcctgttagccggcaacatagaagattcggatgaattacaacaagccgggtttgaaggggtcttctctgttaaccctccattcatatcgttagaagaagccatgagaccggaagttgcacgcaaaaacatacagcaaacagtcgagtctatttgcaagaaataaatgattagatgcaagtgtgtctccgtatcagagtttatgtatcactctgcgacaacgtttcatttccctttccgtcagtccgggatgttgtttcgttccgcctttctcgatggctgaaacaactttaaagccgctccatttcaggatttctttcagcgcttttactactccccttgtctgattaaagaatatattgaaaggatatggagtagtgcaagtgcttacgataactgcctttttacctttatgcaggccgataggaatacctcgtgaggtctctcccatcattccgtaaacgatgcggtcgaacatcactttcagttgtcccggcaggtttccccaataacaaggagcgccgattatcagtgcttgtgcttcttctatctgcttcagcacacgttgtgcatcatcctcaggcaaacaacatttcagtttctcacggcaactcatacagccgatgcagggactgatttgcagatcagccactctaatcacggtaacttcgtctccattcgcccgggcttccgtttccatcaattgcagcattttcgagatatgtccttgcttgcggggacttccgttgataatcagtattttcataattagtccgtatttacgcaattcccaatagctggacgtcaaacaccaaagtagagaaagcaggaatagggccactgctacgtgtatcatatcccattgcataaggaatataaacaatccaatgatctcctacatgcattcgttgcagggctatctgccagccttcaatgacttcattcagacgaaaagcctcagggtaattccgtttccaggagttatcgaactcgcggccatttatcaaagtgcctttataatgcacagttacgatactattcaaacgaggagtattgccgccattcccttcttccaatacccgatatagaattccgcaaggcagttcccggatatcattctctgcacgcaaagcctccaggtaccgctcattctgcaatttatattcttcttttcgtcccataagttataaatgattcttctttcccacaaaagtacaacatttatgctatccacccaaatatggaataagctcatcgtgcgtttttggagattatatgaataagcggtatctttgctccatgaaaaaattagttattgtcggatgtggacgactggccggaatagtttcggatgcagttgttaatggcttattgccggaatatgatttagttggagtttactcacgcacagcagaaaaagctgaacgtatagttagtaaaatgcagcaacacgggaaatcctgcgtagcatgcacaaccccggaagatttactggcactgaaaccggattatctggtagaagcagcctctcctgctgccatgaaagagtttgcattgcccgccctaaagaacggtacttccatcgtcaccttgtctatcggtgctctggcagacactgcattctatcaggaagtgatggagactgccaaagcgaacggtacgcgtgtatacatcgtttccggtgctacgggcggtttcgatgttctgcggacagcttctttaatgggaaatgcaaaagctaaattctttaatgaaaaaggtcctgatgccttgaagggaacagctgtatatgatgagacattgcaaacggagcaacgtgttgtcttctcaggaaatgctactgaagccatagccatgttcccaacaaaagtcaatgtagccgttgctgcttcactggcctccgtcggcccggagaatatggaaatgtccatgcaatccactcccggattcgtgggagacactcaaagagtggaaataaagaacgatcaggtgcatgccgtaattgatgtgtacagcgccaccgctgaaattgcagggtggtctgttgtgaacaccctgcttaacataacatcaccgattgtattcttctgattacattatcggttatatgcttctatattggccagtactttctcgctcaggcggtcaaacgcctgacgggtacggcctgtagacacctgcatacagcggacatgcggatggcttaaaagatgcgctccacccaaagctcccagtgtatcacaaaaacaaaggttatcacctttcagccacttaacgaacgcgggttcgtcccacgccggagacagcccggtattgaacaatatctttttatttccgagttgttcgaactcagcctcatgcaacaggactgtattcttattgagacaacagaaaacgacttcactctgagaaagaagttctcccaagggtaagaaacgatatcctttggcagccgcatcctctttttcactacgggcaaaataagcgatatccgccccaaagaatttcaatgcatcggcaatcatgccaccggatttacccaatcctatgacacctactttcagccctgtgatctcccggggcatttcttcccaggattcctgaccaaatccatgcaggcaacgcaccagttcgctgactacatattccaccacaccttcatccccataatcccggataccggttacagtaatcccccgttcgttcgcataacgaatgtctacattggcactctccggcgaatacagcgagcagcacataccgatatatcttatatttggacacttctcgagcacactcctgtttatttgtgaagtataactcaatagcacagcatcggcatctccgatacggactactatttcatcatcccctgccggaacatcagggaacatcactaccttttctgcatacgaatgcagtgctttttctgctgacggaatcagacttacgggttctattgctacaagtttacgaaacatagtttttttattttagagaggacgaagttagcaaaaagagtgatataaaacaaaagagctgccatcgatcatacgtgacaactctttcttactatctttacgacaatactttttcttgttcttatgcggacgatcttttgcaatccaacgtccaccattgcgttccatctctatcaagcggttcgcttccttgaatgccgacagggcatccctacgttttttcgtcttcattgttctacaatttttatacattacaatatagctgaaaggctaatgttttgcaaagataatgcaaattgagcgcagaactttcatacttgcatgaaaaagttatgccgaaactatcctctgctgcccaaactattcttatccggatttatctccgaaaccatattgcgcacttctttcttatcgactttggaatataagcccaattgtcgtccaggtaatgttccttcagcatctttttgtatcttgctcttctcttcaagagccttttcatcttttttatccatatcgttatctggtttaggttatttactgatatactaacaaacagatgctccttaaagttctactttgctgcaaaaaaagagagttgacagggacattgccaactcttttttttttattcttcagaatagagtattatttcttactcaatttcagctccgtaataaaagcggcaacaagccctataccaccaaatacaagtacacatgctccataaaccaaggaaactgtttctctatacacacgccaatcatccatattcttatccaaatatccgggaaccgatgaagtacagataataaaacctatcaacagacctaaccccatacccagcagaagacatcctatcttcaacgccgaaaaagaataattactgtgaaatctcggtatagatgccacatccggttcatatttatctcccattttctcaataagcatcaaccgctctttcttacatacaaacagttcaaacagtttgtaaatccctacagtaatgattgccattatcgcaggcaccataataaaatccatcatattcgtttcgttttaaattagtatttttgttcctttgtacactttagacgcagtgtcttgtgtaaggttacacatttcatcgaaaaaaaatatttctcagaaacaatgtaacctcctacaaagagttgcgtctaaaaggcagaatggagaataacgaaatacatattatccaacgcatactgagaggggaaactgctctatacgaatacttcctgaatcaacacggtcaacaggtcttttccctgattgcccgcatcatctgtaaccaggaagatgccgaggagttgacgcaagacgtttttctgaaagcgttccagcacctctcctctttcaaagccgaaagttcgttctcaacatggatttattccattgcttataatacggcgatttcggcaacccgtaagaagaagttcgatacctttgccatggatgatacgttgctcgccaacatttccgaccaacaagtagatgaaacgcttaatgatgaaagtgaggaaatgattatcagattaaacagagccatagaaaaacttaactcagacgagcgtgccttgattaccttgttctactacgaagaaaagtcattgaatgaaactgccctgattctgggcctgacggaaagcaatgcaaaagtaaaattgcatcgcgtacgcaaaaagatatatgtactcataaaacaagaggaagtatgaacgaagaacaaaaagacaaagggctgaaaaaagccataaaagaggaaaacggatttcgtctaccttccaatttcgcctaccataccatgaggaagatggaagaagctatacgcttacgcgaaaagaaatcggaacgaagaacgctgtttgctacgatagccgcttccatattcttaataggatgctgcattgccggattagtgatttatttcggtaatacaatcagagaagccttcacccgccccgaaatactggaaacggaaaagatccaaattccctcattttatttactgatacttatcgcaatgcctctgttccttatctttgaccgctggatgaggaaacgatattttaataagcatcacccttaaagaaaaagcgaggatatcctttgcaggaacatcctcgcttcactttttttattccatattttaatccagcttatgaatcaccaaccccgaacgtagtttcggttcaaaccacgttgtcttaggcggcataatattgcccgtatctgcaatatccatcaattgcttcatgctgacaggataaagtgccaaagccactttcatttcaccactatccacacgcttcttcaactcacccagaccacggatacctccaacaaaatcaatacgtttatccgaacgcagatctttgatgccgagaacttcatccagaataaggttggaagagatagtaacatccagtacaccaatcggatcattatcattgtaagtacccggtttagcggtcagactgtaccacttgccatccagataaagggagaaattatgcaaaccggcaggtttatagatttcagtgcctttttcttctaccgtaaaattcttgctgacagcagtcaggaattgttcaggcgtcaagccattcaagtcttttacaacacggttgtaatcaataatggtcagttggttagcagggaaacaaacggccatgaagtaattatattcttcattaccggtatggtttacattttgcttggctttctccgctcctaccaaagcggcagcggcactacgatggtgtccgtcggcaatataaagagcaggcatcttagcaaattccttcgtaatggcatcaatgtcttcctgcttatcaataatccagaaagtatgaccaaagccatcaccgggagcaataaaatcatataccggcttttcggctgtataatgagcgataatagcatccagagtagcattgtcaggatatgcaaagaataccggttcgatattggcattattaacacgaacatgcttcatacggtcttcttccttatcgcgacgggtcagctcatgtttcttgatgacaccgttcatataatcaggtacataggcacctactactaaaccgtattgcgttttcccattcatggtctgcgcatagacgtagtagttttctttatcatcctgcaccagccatcctttgtcctgaaacatctggaagttttcggcagctttctgataaacacattcatcatgttcgtcggtacctacgggaaagtctatttcgggtttaatgatatgatacaacgatttttcgtttccttttgcctcttcacgcgcttctgctgagttcagcacatcatacggacgggaagctacttgctccaccagatcctgcggtggacggatacctttaaaaggtttaattattgccatggctagatttatgatttatgatttatgatttataactcatgaactatgaagacttttgcttggtagtgagaatactacgcgaacagcatacttcaacgccttatcatacgtcagtttttccttcataaatcataaattataaatcataaatctgattatttcttattaacacggaatttctcgcaaccgtctttcaggaaaccaacaatctgttgtgcagcggcaataccggcattgatgttagcttcagcagtctgtgcacccatcttcttcggtgtagagaaataacggcctacgaacttggcagcaaatgtttcgtgagctgcgggcataatatcagtcatgtatttcagatcaccgcgttcttccatcagctgaatcagttccgcttcgttgataacttccttacgtgcagtatttaccaatacaccacccttcggcattttatttaccaaagcatagttgatagaattcttcgtttcagcagtagccgggatgtgcaatgaaactacgtcacaagcagaataaagctcatcagcagagtcaacagccttcacaccgtctttctcaatcacttctttcggacagaaagcatcgaaagcaaagatttccataccgaaccccttggctatgcgagccacgttgcgaccgacattaccataagcgtgaatacccagtttcttacccttcaattccgtaccggaagtaccgttatacatattgcggacagccatcaccatcataccgaaagcaagttcggctacggcattagagttctgtcccggagtgttcattacgcacacaccatgagcagtggcagcttccagatctacattatcgtaacctgcacctgcacgtactacaatcttcagttcttttgcagcgtccaatactgcggcatctataatgtcgctacggataatgatggcattggcatccttcactgcgtccagcaactgggctttttctgtatatttctccaacaaggcaagttcataacctgccgcttcaatttctttgcgaataccgtctacagctactttagcgaacggtttgtcggttgcaattaatactttcatgattcttatgatattaaaaaaaagactcaccacagattacacagattatcacagattttaatcataaaacaatctgtgggatctgcgtaatctgtggtgaataaatattattaatgaagtttctcaaattcctgcatgcagtcaatcaaagcctgtacgctttccttcggcatagcattgtagcaagatgcacggaaaccacccactgaacggtgtcccttgatacctaccatacctctttctgtagcaaacttcatgaagtcagcttccagttctttgtattcgggagccatcacgaagcagatgttcatgcgtgaacggtcttcctgtgcggctgtacctacgaacatcttgttgcggtcgatttcagcatacagcatatctgccttttctatggcacggcgttccatttctttcacaccaccctgtgccttgatccaacgcaaagtctgcaatgcagcatagatgggaaccaccggaggagtgttgaacatagaaccgctgtcaatatgtgtctgatagttcagcatcgtaggaatatagcgggataccttacccaaagcgtcattcttcacgataacgaaggttacacctgaaggagccagattcttctgtgcaccgccatagatacagatatatttagacacgtcgataggacgggagaaaatatcggaagacatatcggcaatcatcggaacgtttacatccaggtcttctttaagttcagtaccataaatagtgttattggtcgtgatgtggaaataatcagcatcagcaggcactgtataatccttaggaatataagtataagtagactctgcggaagaagcgacttcaactacttcaccgaaagctttggcttctttcatggctttcttagcccatacacctgtattcaggtaagcagctttcttttcgaggaagttgaaggggaccatgcagaattccaaactggcaccaccgcccaagaacagtaccgaatacccttcagggatattgagtaattctttgaatagtgctacggcttcgtccacaacaggttggaagtccttagcacggtggctgatttccatcagtgagaggcctgagccgttaaaatcaagaatagcttttgccgtatcctcaatcacctcacgaggaagaatagaaggtcctgcattgaaattatgctttttcatttgaagtttgttttggttatacaatttcgttcattagtgtctttagaccttgcgaaattacggaaatatttctttaaaacaaacctttcataatgaaattctattttaacagcgcatttagcttacttttttatggtttatacaggatatatgcaccattttgttatccatacttatcaagaacggacttttagaagaatctaatagtaatacgattttattgctttacattcagaagtttagacgcaaaaaaagtgaatatttataagaaaacttacttagcttcctcaattatcgtctttactcctttaattttctcaccttgtatcaacgtgagcaactgtttcatcttactacggcgcacagctacgaaagcataatgttctttcacatccacttgtcccacatcttcacgcgccagtccacctttcttatataagaagccgacaatatcgactttgttcagcttatctttctttcctttacctatatataaggtagcccatcgggacttggccggcttcggcagtacttccggaaactcaaagacttcaatatcttcgggaatgtattcaggaacccgttcttcattgtgcaggatgagataggaatttccatcagcttcccaacgagccgtacgtccgttacggtgcgtataggcttcttcattgacaggaagatgataatgaactacgttttctataccggggatatccagtccgcgggcagcaagatcagtagagatcaatacggcacaactgccattacgaaacttatagagcgcccgttcacggtcgggttgctccataccgccatggaacatatcgcatgggaatttctttgcttgcagatatccggtgactcgttccacactttcacgatagttgcagaatacaagggtagaatgataaccaagcacacaaagcaggttatagagagtttccagcttatctttttcgggagaaacaactttatgaagtttcagacgcggtgcaagggcatcagggtccaggaaattcagtttgacaagtcgagaactgtcagcagaaagttggtcctcacctcctactccggcaaattgaggaatttcttcagcatccgtagccgaaagcagaatacgcttctttaatgacggtaactgtccgatcacttccgccatttcatcgtgaaaaccgaactcaaggcatttatcgaactcatctatcaccaatgtggtgacggtagccgcatcgaaattctctttccgcagatgatcgttcattcgtcccggcgtaccgataatgacggaaggatgaatccccttcattgtcctgtgctcttccattgcaggacgaccgccgtaacaactcatagctttaaacggggtccccatggatttgaataccgtttcaatctgcaatgccagttctcgtgagggcaccagaacaacggcttgtacgccttgcgcatccgttttcagagtctgcaccagcggaagcagaaaagccagtgttttacccgatcctgtgggtgaaagcaacaccaagtctttattttcacggtaagcttcccgggttgcctcttgcatcggggtaagttgctctatttgcagattacgcagtatatcttgaatttccataataatcttttgttatgacgagccaaagataatgcaaattgggcgtagaactttcatgcatgtatgaaaaagttaataaaaaaactcctgctcagccgtagccttgcaggagttttcaaaaatatcgaagtcatttaccaattttagcgtatgccttatccgccgaagttgtcgaacatcaggttctgagccggaacaccgagatcgtcgagcatcttctcgacagctttcgacatcgggccaggaccacacatgtagtattcgatatcttcgggagcttcgtgattcttcagataagtttcgtaaatcacctgatgaacgaagcccggagtatacttcacgcctgctgcatctgctgcgggatccggacggtccaaagccagatggaacgtaaagttcgggaaatccttctcgatttgcaggaagtcttccagatagaacacttcattcagcgcacgtgcaccgtagaagtaagtcatcttacggtctgtagtatgcaatgtcttcgtcaagtgcatgatctgggcacgcaaaggagccataccggcaccaccgccaatccacatcatttccttcttagaatcgaatatcgggtggaagtctccgtaaggaccactcatgattaccttatcacccggtttcagtgtgaagatataagaagaagcgatacccgcaggtacatccataaagccttgtccctgatctttcggcttgaacggaggagttgcgatacgtactgtcaacatgatacggtcgccctctgccggatagttagccatagaatacgcacggatggtttcttcgttgttgtcacacttcagtgtaaacaaaccgaatttctcccatgccggcagatactcgtcaccaatcaggctcttgtcaatgtccttattataatccattgagtatttaggtatcttgatctgtgcataagatcccgggataaagtccatgtgttcgcctttaggcaacgcaacgatgaactctttgatgaacgtagccacgttcttgttggagataacctcgcactcccactcttttacacccagtacagactcatcaatcttgatgcccatatcactcttcactttcacctggcaacccagacgccaatgatcttgcacctgtttgcggctgaaatgaggaacttcagacggcagaatctcgccaccgccatccagtacctggcatttgcactgtccgcaagaacccttaccaccacaagcggaagaaaggaatataccgttcacagacaacgtattcagcaacgtggaaccggaagctacgtccagtacattatcgccgttgatagtcagttttacattacctgaaggtaccaggaagttcttggcaaccagcaggataacaacaagcagcagaataaccaccaggaatactccaatgctcgctaatattaaattcatatccattgttctattcctttctttattagatgttcaaaccagagaaacacatgaatgccattgccatcagacctactgtaatgaacgtgatacccaagcctttcagcgcgtcgggcacgtcagagtaagccattttctcacgaatagccgccagacctacaatggccagcaaccagccgataccggaaccgagtgcataagagatggcatcccatacgtcaccgatgtatttcggatcgctctcgcccacattgatacgttgctgcatgaacagcgaagcacccatgatggcacagtttacggcaatcagcggcaagaagatacccagtgaagcatagagggagggactgaaacgttccacaaccatctctaccaactgcacgataccggcaattaccgcgatgaaaagaataaaactcaggaagctgaggtcaacgccttcaatgatagcgttggcagccagtaccttggtttgcaacaagtagttgaccggaagcgtaaccaccaacacgaaagttacggcgatacccagtcctactgcggttttcacgttcttagatacagccaagtaagagcacatacccaggaagaacgcaaatatcatgttgtccacgaatatggagcggacaaataaacttattaaatgttccataatctttattgatttatgaattatgatttatcggttatgatttatcagcactgtaagtagcagaaaataaatcataaatctgaaatcataaatctacttacttttcttgcaattctttgtgacgggcacgttgataccaaatgatacaagcacagatgatcaaagccatcggcggcatcagcatcaagccgttgttcacataacccaggtttgtcagccattcatggttcagaatattgaaaccgagcaatgtaccggaacctaacagttcgcggaagaaagctacgataatcaaaatcttggcatatcccaaaccgttacctataccgtcgagacaagactcccacggaccgttctgcatggcaaacgcttccagacgtcccatcaggatacagtttgtgataatcagacctacataaacagaaagctgcacacttacgtcataagcaaacgccttcagtacttcacttacgatggttaccaaagcggctaccacaaccaactgaacgatgatacggatacggttgggaatggttttacgcaacaacgagataaccacattagagaaagccgtaatcactgttaccgaaagccccattacgatggcaggttccagtttggcagttacagccagtgcagaacagatacccagcacctgtacggtaacagggttgttcatgcccagcggggttgagaatacttctctatttttctttgaaaataactgtcccatatcctttattcctcatcattattggttaaaaaactcttgtaactattcagacaggttttcaacataacgtctacacctacagatgtaatcgtaccaccggagataccgtccacctggtaatcaggtttttccaccttaccgttcttcacaacacccagggcaacttcaccattgtccagcgtcttcttgcccaggaattcatcctggaattgttgtccggcgatttcggcacccaaacccggagtttcactggcatgagagaagtaaacaccgtaaacggtatccttgtcactgttcagtgcaacatatccccagatagcaccccaaagaccggcaccgtaaacagggaatacatatttggtttctccattcacttctgcaacgaatacgtgcaggcgttggtgttctttagcttctttttcgtagccggtagcaaatgctccggtgttctcggtcagagtaccgtctacgttcatcagcatatctccttttacatacttattatattcagcctcggcatcttccacattcttgatgttcaatgcagcgagtatttgcttcttcgtatccagttccacgtttttatcctgaatgcttctcagtgaggaactaacgaatgccagcaagaatgccacgataacaaccattaccgaagcataaatgatagtataactattactattggtattcattttcttcggtattttaattgttagacttaattgcacgtttctcgcgacggctgatattgccctgtactacacagtagtcaatcagcggagcgaagatgttcatcagcaggatggcgagcatcataccttcgggataaccggggttcagcacacggatcacgattgccatgacgccgatcaggaaaccgaagatatacttacccgtctcggtacgtgccgaagttacagggtcggtagccataaatacggcaccgaagcagaaaccacccagcacgaggtgttcgtaccaaggcatctgagccatcggagtgtcaggaccgatagcgttgaatacccaagccatgaacgcaccacccacgaatacggagaacatcgtcttccagcttgcgatacccgttgccagcaacaggatagcacccagagcgatagcaattacactggtctcaccgatagaacccggtatcaagcccgtcaccatatcccaggagaatggcggaacagcccccgatgtggcagccgcacccaacggagtagctacggtcagtccgtcaaccgcttgtcccagaccgaagattgtgtcgcctgatacccaaacggcatcaccggacatcttcgtaggatatgcaaagaaaaggaatgcacgagtgaccagggcaacgttgaacacgttcatacccgtaccaccgaatacttctttagcgaaaattacagagaatgcagtagccaccgccagaatccacagcggacaatctaccggaacaatcataggaatcaggataccggaaacgaggaaaccttcctggatttcttctttcttccactgagccacaacgaactcaatgcccaaacctactacataagaaacgatgattttaggcaatacagccagaaaaccgtaggcaaacatttcaatgaagctacctgtagcaccggtattcgtgaaatgctgataacctacgttatacataccgaacaacaacgccggtaccaacgcaatgaccaccatcgacataatgcgcttgctgtcgatagcgtcgtgaatgtgcgttcccgatttcgaagtcgtgctggggacgaacaggaatgtttcgaatccgtcgaacacagactggaatgcgtggaatttgccgccctcttcaaagttcggctttatcttgtcgagataatttcttaacgctttcatttataagtattaattatataagtattaattattaggccatttcggcgcgaagcatgtcgagtcctgcacgaacgatacgttgaacttctaccttcgaagagcaaacgaattcgcagagggcaaaatcctcgggagctacttcgtagattcccaaagcctccatacggtcgatgtcacccgcaatgatagctttcaccagatattcggggaagatatccatcgggaatacacggtcgtactcattggacatgatcatgtggcgttcaccacccttgatgcgggcatccagcacatattccttgttgttgcccagcaaccagctgaagtaagaacggttcacgctgaactgattgaaacgcggcataatccaacccagcatttcgtggatgtcatcgccttcggggatcaccgtgagctggctgtcgaatgcgccgaggaaagcgttcggagaaaccttcttgcctgtaagcacattaccgctgatgtagcgcaagtctcccttgcccgagctcacgtttccactgaatacgtttgtcagcaaagcacctactttcagtttgcagtatgcaggtttcaacacttcggaacctgtaacggccaccttgcgcgtcatgtccacacgtcctgtattgaacaggcgtccgatgaatataacagcttccggactgattgtccacacagtttcgcctttcacgataggagaaatgtggttgatctgtacgcctacattgccggccgggttcggtccgtcaaatgcgttaatcgttacattcttagcttgcgtcaacgcggttgccttttgttttacactaatactcagatacgtctttgccatcttggaaagagcatccaatcctgtctggaagtttgcttcctcgcctttcagaacgaattcgaaatcgggtgccagcgggttactgtcgaaggccgaaacaaagatagctttcggatacatcgtggggtcagcaatcacgtcatagggacgctgacggatgaacgcgaacatacctgcttccagcaatgcggctttcactgactcgccgttcagggaactcacgtttttcttaccgaattcttcatagtcttgctcagccgcagcttcaacgacaatgttcagcactttacgacgtgcgccgcgctccacacttgtcactacgccgctaacgggcgaaacaaatttcaattcaggatgattcttgtcgataaacaagggtcctccggccatcacatattcctgttctttgactactaccttcggagtaatacccgtaaaatcttcaggaaccaatgcgtagaatcccggttctttcacagacataaactcctgagaagccttacctttcaggttgatgtcaaggcctttacgtaacttaattacatttgccatgcgtttatataaaataatggtttcattaatttgccgcaaaagtagcaaaaaagaacgtgaataaagagcaaaaaagaaaggaattacggataaatttccgtaattcctttcgttaacgaacacgatgacaacaagatgagttattgtgtttaatattcttctgcaaacatcggatcccaagcgggcaaacgaatgggtttctgcttgaatatatccattactttggcaggaacgtatttagtctccagcaccagacggaacatatattcgtcgaaccattcatcggtcatgatcagatgtccctgataaccgctggcaggtccccaactattttcaaccatccatttcacgggttttccgtctttattcagatccacagccataagggtcatggcatgagatgagccgctggagaaggtttggatgcgttgtttcttatccatattgaaggtggtgcccatgagcgattcataatcatagtttttcacatcgagcaagccacgctcggaattcaggaacttgcctacgtcgcaagagaaatacatcatggtgctgtccttcagagaagcgatagccatctctttgatatcttccacaggcagattgacgtacgtccagttcttcccatcgtagcgatgacggtcgtaatctatttcatagcacttgtagtactcgcgcgagggatcgttcataaccatcacataattggtcaacagattctcgtcgccatacttcttgaggaatgacatcggagtgtggtgttccgtttcggcaggattgccctgggcatctttacgcacatagtcaaattccgtaggaggaacgccaagattcagcaccagcatgcgataaatggtaccgagcatcgcagtcttttctttatccagcgccgcaggttttgctccgttagaagccagatcacgcagttgcagaccgtattcctttaacttcaaagaaatcagatttgccatacgcgacgtattgtcgctgctgttcgtttccggcatggcttctttaggaaccaaaccatatttacctacaatgtctgcaacgcccgtaaaagttcctccatcgcttagcggatgttggaaaagccattctacggttttatcgttcaagggtttgtcacgggtatcaatgatgccttgcagaaagaggtttgccttctccagctggtcccagaaaaaaggataaatttccgagaattcaaaagactggaaaccgtatttaccgatggctttggcacgcatcacattcagtcctgtgaaaagccagcaacgaccggatgatttctggtcggtgatgcctttcgaatttacttttacggagaaatgagtatccattccggtcagattctcctggttgagggcaagtttgcggatgtcattgttgccaatggcattacgcagagctttgtcggcactggttccctcgtaactctgtttgatctggttcagcatcgcatcgctgataccgcctttcctatcttgcgcctgtatggaaagtaatgcggcgctgaaaacaaaaacggataaaattcgtttattcataaattatatggtttttatagtaattggtctgtttctcttgcttcctgttacccgaaccgtaccaaatccgtgtttgctccgtatctaagactttggacttggtacggaccaggtacgggccagacacggaccgggtacggaagggttctgaatattggtctaattatccgatatgtcgaaaaaacttatttagaatttctcacagccaagcttcagattacatgcaaaaatagccgtttttttgaaacttttagtgaaatctttagatttattgtctatcaatttgaaaacttatccaaataaattagttttctttgcactctcattcgcacgatatgaagaaatatataataggtattatgacgttactgctttcagtaacaagcctttccgctcaggaagctacaaatttggttagcatcagtgacactacaccggcattgactaaacgtgaactacgaaaacagaaggtagcgcaacgaaatttgcactacaacattctgggtggtccgagttacacccccgactttggtgccgtactcggtggaagcgccctgatgaccttccgcatgaacccaagtgacaccacacaactgcgctccgtggttcccgtagccatcgctttcctcttcaatggcggtatcaaccttttctccaaaccccaacttttttttaaaggtgaccgtttccgcatcttcggaaagtttgcctacaagaatacggaagataacttctatggtttgggctacagcacgaacaagaattatgtccggagcgacactaccagtcagtatcgctacagcggcatccagttcaacccctggttcctgttccgcctgggcaacagcaacatattcgccggaccgcagatagatataaattacgacgacatcacgaaaccagccaaatatctggtggacgaaccgtcgtacaaagcagccggaggaacggacaaaggatacaagaatttcaattccggtgtcggtttcctgctgacctatgacagcagagacatccccgccaatgcctatcgcggcacgtacctggatttccggggaatgatgtatactaaatttcttggaagtgatgacaatttctatcgtctggaaatagactatcgacaatataagactgtcggtaagcgcaaagtcattgcctggactgctcaaagcaaaaacgtattcggcgatgtacccctgacacaatatatcctgacaggaactccttttgacctgcggggatattacatggggcagtatcgcgataaatcgtcccacgtagtcatggccgaataccgtcagatgataaataccgataaaagtacctggctgaaacgcatgctcaatcacgtcggcttcgtggcctggacaggctgcggattcatgggacccacccccggcaaaatagaaggtgtgctgcctaattatggcgtaggattgcgcatcgaagtgcaaccacgtatgaacgtacgactcgacctgggtaaaaatacggtcaacaatcagacgttgttctatttcaatatgacggaagcgttctgaaaattatggaaatgaactaaatgctgatagtaatttaggcgcggattacacggattaaaggctgcgctatcacactatattacagaaaataaatccgcgtaatccgtgtaatccgcgcctaaaattattatcatgacccgtttacaaacaaacaactcccgccagcatctccccccttatcctttccgttatttatttttccctcttttcttgcatcagtaaaagattatccatacttttgagaaatattttgtttaccttgaacaaacaactctgaggacattacacaatgagaactttcgagatattattctggataagcctgtttatcgtattctatacttatataggatacggaattgtgctatacattctggtcaaaattaaagaaactttccgcaaaccggtacactaccccatgcctgctgacgaggaactgcccgaagtcacactcttcatcgcagcttacaatgaggaagacgtggtggacgaaaagatgcagaactgcctggcgctggattaccccgcagacaaactgcaaatattctgggtcacggacggcagcaacgaccacaccaacgaacggctttcccactggccccgtgccaccgtcctccaccaacccgaacgacaaggaaaaaccgccgccctcaaccgcggaatgaagttcgtgaaaacaccactcgtcgtattcaccgatgccaatacccacctgaaccgggaagcattgcgcgaaatcgtccatgcttttgtcaaccccaaagtgggctgcgtggcaggcgaaaaacgcattgccatgcaaagcaaagacaatgccgcatcaggaggagaaggcatttactggaaatatgaatccaccctgaaagcactcgactcacggctctactcagccgtaggcgctgccggagagctgtttgccgtacgccgggaattgttcgaagacatgcggacggacacactgctcgatgatttcatcctctccctccgcatcgccatgcgtggctacaccattgcctactgtgccgcggcttatgccaccgaaagcggctccgccaatatgcaggaagaagaaaagcgcaaagtacgcatcgccgccggaggcttacagtccatctggcgtttgcgcccgctgctgaatcctttccgctacggtctgctcaatttccaatacgtatcccatcgtgtcttgcgatggtccatcactcctatcctattgttcctgttgctccctctcaacgtagcgctacttttcaccaccgcacaaccattgttctacgccgttatactgggactgcaaatcttgttttacctgatgggaatctggggatatatcctttccaggaaacacatcaaaaacaaaattcttttcatcccttactacttcctcttcatgaacgtcaatgtgctaagaggattccgctacctgagcaagcgcaaaggcaataaaagcggagcttgggaaaaagcacgaagggcaagttaagacggaaatacctcgacaaaaatctaatacaaagaaaataatgaaaagcattctgaaagacacaaataactccgaaaaactactgaacatggtatcagacaccctgatactcatggacaaggacggtatttgtgtagacatggccgtacacaacgtagacctatggtttatgaacgaagagagattgctcggaaagaatctgctgaacctgctacctccggtgacatacagtgagttttatcctgaattcaagaaagttttgctccggagaacaaagtctgtccgcaattacgaacttatgttgcgggatgacacctacttcttcaaatgcatcatgcagccctacggtgacctcgtgctttgccaataccgggatatcaccgaacgcagccagcgcaaactggagctggaaagaagaaaccgggaactatatgagatacagaaagccgcattcatcggtaggtgggtgtttgacacggccacccgcgaattcggttatgccggacatacgggcatcatgtgcaagacggatgagcaagccattccactggatgcatacctgaacctgatcttgcccgaagacagaaatacttttgagaactggctcggcgataatctgaaaggtaacatggaaaatactgtggactaccgcattctctacaacaaagatgtacattatatccgcctgaaaacattcagtcgcgaacgcgataaagacggcaacatctcgctggaaggatacatacagaacattactgacatccaaaaaagccgcaatgacatcaacctgctgacgcacgccatcaacaattccacagaagatatcttcgccgccaaggaagacggtaccctgatttttgccaaccgcctcttcaagttgcaccatgaactgggaagtacggatgatatcagccaactaaaaatatacgaaatcggctcgtatacacgtaccctggagggttggcaaaagatgatagcttcaatcaaggagggagagaaacatcagtcctttatggtatacaaccccttgccgcacttcccggaaatactggcgtacgaaggcaatgcctattgggtgaccagcgatgaaggcgtaggaaccatctgggctttcggccgggacatttcacaacgcatccgccacgaacaacagatcaagtggttcaaccagatattggacaaaaccatggagcatctgcccgcaggaattgttgtgaaagatatcaggaacaacttcaaatacctgtaccgcaatcgtgaatcgtacaaccgtgacgtccctatggaagaggctttgggcaaagacgacttcgatttctatcctctcgaaatagcccgtgagaaacgccgacaggacaaagatatagccaccaccggacaagagatgcactggattgcagaagaacgtgacggtcatgggaatccgcttttcctggacaagcggaaaatgaaaatagagagcaaagacttctcccccatcctgctgaacatagaatgggacatcacagaaatggaactgatgaaacgggaactgatggtagccaaagagaaagccgaaacctccgaccaactcaaatcagccttccttgccaacatgagccacgagatacgtacaccgctcaatgccatcgtaggcttttcacgcatcattgccgaaagcgaaaatacggaagagcgcaaagaatattacaacattgtggaagccaacaacgaacgtctgttgcaactcatcaatgaaattctcgacctctcgaagatagaggccggaattgtggagttcagcatcgccgccgtccgcctgcacccgttgtgcaaggaaatccatgatgcgcatgtattccgctgtccgtcaggtgtagagctgatattcgatccatccgacgaagatattctgatagactctgataagaaccgcatcttccaagtgatatcgaacctgataggaaatgcgttcaaattcaccaccaaaggcagcatcagctacggataccaccgggaaggggaaactatcgtattccatgtgactgacacgggcacaggcatcgcccccgaaaagataggaaaggtattcgagcgttttgtaaaagccaacaattttgcacagggcaccggattgggtttagccatttgcaaaacaatcatcgaacgtctgggcggaaaaatctccgtgacctccgaactggagaaaggaactaccttcatctttaccctgcccgccaagaccacccaagacgaagataaggaaaaaactgaaaacagccccgaagaaaacaaaacggcagccggagaacaaagtgcaggcagcgaaagcacggaaaatgtacaggcatcgccacaagaaaccgtctcgctgaaaaccgttttgatagccgaagatacggatagcaattatatcctgaccaaagctattctggggaaggaataccatctggaacgtgccaaagatggtatggaagccgtcaatatgtttgtagaaataaatccggatatcatcctgatggacatgaagatgccgaacctggacggactggacgcaacaaaaatcatccgggaattatcgcccggcgtccctatcatcgccctgactgcctttgcctacgatcatgaccgcaaagctgcactcgaagcgggttgcaacgatttcctgaccaaacctttcacacaggagaaattgaaggagacgataaagaagtgggttaataagtaattaacccacttatcactaatcacgcaaagatatcgcttctttgaatataggcaatcacatcgcccttattcacagtatcgccttgtttggcgcatatctctacgacgcgtccggtgaatccggtcaatatcttttcgtattctccccacggggtggagaggtaacagaacacttcatcatgctggtatttacgccctatgaacggagccacggaaggaccttccacagatacttcccacaacacctgtcctttatccggtgcaataatcggatcggccttggcacgtttcagtttccggatttcttcttccgaatatccattcttcaccatagacgcgtctttggcacgttgcaattcatcctcgaaacgcttcttggctgtgccggacttgtaatcacgatactgacggtcgtgcatggcaagttcaaagagttcttcttcatcatctccatattcccaaccgttctcgtccatttctttccgatattcatccagagcatccggatagttcaattgcggatcggtatccacaaattcatatccttttgatttcgccaattccacaatttcaggagccagctcgcccggcagacgtccgctcttaccgataatcatatcccacgtatgattatctatcatcgtccagcgctcctcacctttcaccaactgcatgaggttcatcaatgccacattcttcacatactgactgaaaggcgttaccaacggaggataccccagcttaggccatacgtattccacctcgtcgaagagcatcaccaacaggtcgtcaatgctgagttccggttcattcttccctcttaatatcatgtttatacccgaatgtactcccttcagatcagccatcatggaacccatcataccacccggaaggccacacttcaacagcaaagaggacatgtgtttattggtcggatccatgaaatagcccaggaagtcatctataaattcctgtgtcatggcacgtgccttcatatatgccttcatattgatatcgggcacctggaagcccttatctttcagcatggcttgtacggaaatcacgtccggatgtactttaccccaggacatcggttccatagccacatcaatgatgtcggcgccattctcgcaaacttccagaatagaagccatcgacagccccggtccgctatggccgtgatactggataatcacttcgggatgcctttccttaattgtcttcgtcaaccgtcccagcatacccggacgaccgatgcctgccatatctttcagacagatttcgggtgctcccgcttcaatcagctggtcggcaacatgggcataatattccaccgtatgcacaggcgagtgtgtgatacaaagggttgcctgcggtatcatccctgcctccaatgcatatttaatagaaggaattatattccgcgtctcgttcagtccacagaagatgcgggtgatatccaccccttgcgcatgcttcacacgatacatcagacggcgtacatcggcaggcacaggatacatgcgcaaagcgttcagaccacggtccagcatatgcgtttgtatacccacttcattgaaaggtttggtaaaagcgcgtacggctttgttaggattctcaccgtacaacagattcacttgctcaaaagctcccccgttcgtttccacacgggcaaaacaccccatttcaataatcaacggagcgatacgtaccaattgatctacacgaggttgatatttaccggaagattgccacatatcacggtaaacaagactgaatttaatttcctttttcatcgcagtcaacagttagcggtttaacatatatgaattactcggttaacttaacaagtacaaatataaaggtttattctgacatatagtcaaatttatatttgaattatttagtataaaagatatgtttaatatcacatcgaaacttatttttcattttataacatttctcgtcatttcattcctctatgattcagacgataatttatcggaaaggatggaggggagtaattatagtacagtaatgaactaaatgctgataatgatttaggcgcggattacgcggattacacggattaatggctgcgctattacactatattac

SEQ ID NO: 6364 - DNA, 26021 bp, Unknown
  gut microbiota DNA sequence
aagtaattattttaatattataacaatttattagtaaaaaaagagcccgcacaacaagattgtgcgggctacttcacttatttattttaagagttagaactctgcattacgcggcgtacgcgggaaaggtattacgtcacgaatatttgccatacccgtcacgaacagaagcaagcgttcaaaacccagaccaaaaccggagtgagggcacgtaccgaatctgcgggtatcaagataccaccacatatccttcatcggaatatgcatttcgtcaatacgcgtcatcagcttgtcataatcagactcacgctcagagccaccgataatctcaccaatcttcggaaataatacgtccattgcacgtactgttttaccatcttcgttctgcttcatgtagaacgctttgatttccttcggatagtcggtcaggataaccggacgcttgaagtgttcttccacgagataacgttcgtgctcagaagccaagtccacaccccagtataccggaaattcgaacttatgacctttagcaacagcctcttccagtatcttgatgccgtccgtataaggcaaacgtacgaaagattctttcaatacaccttgcagacgttcaatcaagcctttgtcaaacatatcgttcaggaacttcacgtcgtcagcacagttatccaaagcccacttcacacagaatttgataaactcttccgccagatccatattgtccgtaatatcgttgaacgctacttccggttccaccatccagaactcagccaaatggcgtggagtattggagttttctgcacgaaatgtagggccaaaagtataaatagcgcccagtgccgtagcagcaagttcaccttccaactgtccggaaaccgtcagactggtttgcttaccaaagaagtcgtcatcataaatgatggaaccggcttcatccttcttcaaatcatagaggttcttcgtcgttacctgaaacatctgtccggcaccttcacagtcagatgccgtaatgataggtgtatggaaataaacgaagcctttctgatgaaagaaagtatggatagctatcgccatgttatgacggatgcggaacaccgcaccgaaagtattcgtacggggacgcaggtgagcaatctcacgcaggaattccagcgtatgacctttcttctgcaaaggatatgtattatcacaagtacccagcacttcaatctcacgagcttgaatctcagccttctgaccggaacctactgactccgtcaattcaccgttcacactcagacaggcaccggtggtaatatctttcagcatctcctcatcaaagtttgccaaatctactacaacctgcacattatttattgtagaaccgtcattcagggcgataaaattaacttgtttactacctctgcgggtacgaacccagcctttcacgttgaccatagcgccgaaatcttcgcgcttcaacacgtcaacaatctttgttctactaatcttttccataaatttgtgttaaacctctatattatataattactcaaaagagcccatgcgcaggtagtttacttcctgttcgctcaaatagcgccattcaccacgacgtaagcctttcttagtcagtccggcaaagaatacgcggtctagtttcactaccttgtaacccagtgactcaaatatacgacgaacaatacggttcttacctgagtgaatttcaatacccacttcatcccgtctaacatcatccgtataactgatagcatctgcatggatttcaccgtcatccaactgaataccggctgcaatctgatccatatcagctttcgtcacatttttatctgtatgtacgtgataaatcttcttcttcaggaacttcggatgtgtcagtttagaagccaggtcaccgtcgttcgtcagcaacaacacacctgtagtgttacggtccaaacgacctaccggataaatacgctcatcgcaagcacccttcaccaaatccatcactgtacgacgtgcctgcggatcatccgaggtagtcacagtatctttcggcttattcagcaagatataaatcttacgttcaatgctcaccatctgatcatggaacttcacttcgtcagcacgtttgatcttagttccgagttctgtaaccactactccatttactgaaaccacacctgccgtgatgaattcatccgcctcacgacgagagcagacacctgcattagccaagaacttgttcaaacggatcggttcattaggatccgtaaactgttccttatattctatctgtttcttacggctgtactttgcattcggatcataatccggcgtacgacgctgctggggacgaccatatccgcctcttccgccatccggattgaagcgtggacgctgcgggcggtcgccataagaagaacctccataagaagagccaccataagaacgttgtggacgatcaccaccatcaccgctattatagcgaggacgataaggacggtcgttgttataagaacgctgtccgtcaccactattgaaacgcgggcgttggggacggtcaccataagaagagcctccataagaaggacgctgtggacgatcaccaccatcaccgctattatagcgaggacgataaggacggtcaccaccactgttgtttccataagaaggacgttgcggacgatcgccgccttcacgattataggacggacgatcaccatacgagcgttgcggacgatcgccaccctcacgattgtaagacgggcggtcaccataagaacgttgtggacgttcaccaccttcagcattagggttaaagcgcgggcgatacgggcgatcactgctgtaagcacgctgtgggcgttcgccactctcgctgttaaaacgcggacgatagggtcggtcaccaccttcacggttgtaagacggacggctgtaattgttttctctttcaaatctgttgcctgaattctcctcactggaagaatcgtcacgccaattttcgttttctgtactcattgttttattcgaataaaattaaacgttggcctcacggccattctattatcactcttataccttatattatatatgtatactatattaacaatcgccggatttaaaatgttggcttcattatacagctaaatttaatatttccagcttagattcctgtatatgtatgaggagtaattgcacgcaattctttctttatttcctcatctacattcaaaccttcaataaattcctttatagaagcttccgtaatagcctgattagtgcgggttaaggccttcaacgcctcgtacggatgcggatatgcttcacggcgcagaattgtctgaatagcctcagctaccacactccagcaattatccagatcgcgatagatagccgtttcgttcagcaacaatttacgcaaacctttcaatgagctctgaatggcaattacgatatgtccgaacggaacgcctacgttacgcaatacggtagaatccgtcaggtcacgttgtaagcgggacacaggcagtttcaccgacaaatgttccagaatggcacttgccacacccagattaccttccgcattttcaaagtcaatcggattcactttgtgcggcatggcgctggaacctacttcaccgactttaatcttctgcttgaaatattccatggaaatatattgccagaagtcacggttcatatcgatcattaccgtatttatgcgcttcatagcatcgaatacagcagacagattatcataattagaaatctgcgtagtatattcttcacgttccaaacccagtttttcagcaacaaaccggttaccaaatgctttccagtcgaactccggataagccacatgatgcgcattgtaatttccggtagcaccaccgaacttggcagtaagcggacaagacttcaaagtagccagctggcgttcaagacgatatacaaataccatcacctcttttcccaaacgagtaggtgaagccggctgaccgtgtgtcttggcaagcataggaatagccgtccattcttccgcatacgtacgaagttgcgcaatcagttcctctatttgtggataataaacctgttccaaagcctctttgatagacaaaggaacggaagtattattgatatcctgtgaagtcagtccgaaatgaataaactctttgtagtcatccattccacccattttatcaaactcttctttcaggaaatattctacggcttttacatcatggttcgttacgctctcaatatctttgatacgctgcgcgtcagcttcagagaagttacgatagatatttcttaatgtttcaaatacgtttttgtctacgccttttaattgcggcaaaggcaattcgcacaaggtgatgaagtattccacttccacttgcacacggtattttatcaaggcaaattccgagaagtaagctgccaaagcatctgtttttcctctgtatcgaccatcaatcggagagatagcagtaagtaaatcaagttccatacgtgtatattagataattatcgagccgcaaaattagcttttttttctgagtaataagccataaagggaaaagaaagttaagtaaggaagttaacagataaaaaaatagccttacaacaacttgtaagaccactcattatataaatcgaatgtgggcgctgagggattcgaacccccgaccctctgggtgtaaaccagatgctctgaaccagctgagctaagcgcccttttgttcgaaagtgtgcggtttttagtgtgggcgctgagggattcgaacccccgaccctctgggtgtaaaccagatgctctgaaccagctgagctaagcgcccgtacactttcgtttcaaaagcgatgcaaaggtacagcttattttgagattaccaaaataattgcgaactattttctaagaaaaacatacagaaagatatatacttattgaaattcagcaatttaacaaaaaactttttttcatcaaagaatcatccttataactcatgttttctcttcccggtttacgggaggatataacttcccggtggaagtaccttttctttgccagcaggcaataccactacagcagtagtacccggaggaacgattacatgtatattcacgatatggtcttgtttctttatatctacccgtatatcgccgtaaagagtaggtaccactgccgatgcctcgtttaacataccaagctgcggagctacccgaaaatgcttgaagccaggcttcagaggttctattccgcataacttttgactcaatatagtcaacggaccaccgctccacgcatggttgatagtaccacccccgaaaccttcggcacctattccccacccctcgaataaggtagtataaggatatgccatcattttagtataccggctacgcatacgctccaatgcaaagttcggttcccccatcacaaagagagcttccatgatatacttttccatatagggactggcatgatattccttcttgaaaaccttcagcaaagccttatatcttcccaccggagccaatccactcacaacggccatagcctgagagcggtcatcagtttcacctttatacgatctggaacgataagcggtacccgtccaataacgattatcaaaagcagcggcaatacgcttcatcatttcgtctacccgattggcatcgttttgtttatataaataaagtgcgaattctttctcagccttaagagccaaataataccaacaagtagtaagaacttccaggtcaacgtcagtcccccagtcgccccaattccagtcaccgggacggggaataggaaatccctgcgcatccacctcccacacttcatgcaggtattttttcattccctcataaatgtgaggaacaaatgaataatcaccactataaaatgcctgtgtataaaatccataccatccgacagaggcgagcatttgcagaggcaactctttacaccagttagccgatggaaccggagaggcaataatcccatccggccgttgccaattcatcagttcataaatgcctttgacagccaattgccagccacgcggatcaagtgcatagaaagcttcacccagctcgttcacttcatctccccaccactgcgcacgttcgcgatcggggcaatccatataattgtcgcgcatggtaatatataaggtacgggcactccgtttccagagctcggtaaagaaagcatcatcacaggtgaaagtcccctttatgtctgcattataacccgtttcccgatatttaagccccaatacttccactccagcaggaatcacatacagcatttcatgtccgttcatccatccaaaactttcatagttctgttcaccttcgcgagtaatatattccgcccgcacattgtttgcactgccacctgtataattatcagtcagcataccaatcttcaatccggcaggagctttcacatgcaagtaaggagtaatctggcaattatatggcagacggcaacgaatagtatccccggtttcattcttcaccacctccgggtattcccttaatccgctatccttccacatcggaatgggacgaggcaccaattttccaaacggcatttcattcggaaagccaatttcaatggccgggcctaacttaccctcaaaagaaggttgattccagcctgccaactctttgcgtgcatcgaagcggatattactttcggacaaacgataattagggaatggcgcttctgtattctgataagcctgatacacactgcactgccaattcttatcactgacaatagtcacccccgatgcccggacactaaaaagcagagcagcagtcccactgtttacatgactgaacccattctttccaaaatgccacactaacaaggcaataacattgtttcctttcttcagataaggagccatatccacccggtcataataagtagctccgggagccggaccacgcttcagcccaccttcaaaaacgaccagttctccattaatccacaaccagtatttagagtccacggcaatgttggcaatcatctcaccgggaacaccgggaagctcgattgttttacggaaacaaagccaagtgttcggagtactttgagaatgttcactgccaatccatctggattggggaagaaaatcgtctgctgcttttaattgtccagccaacatacaaactaaaacaataaagaaaagggggatttttttcatggttcaagatcgtattttgatttaacagataactgaattcacatcacttcattgttccggcatcacctttctgatcaccttcgccggatttcctaccgccacactatcatcgggtatgtttttcgtcaccacacttccggcgccaataatacagcgatcaccaattgttacgccgggacaaataacagcaccaccgccaatccagcaatcctctcctatcgtcaccggataggcatattccttcggagtacgacgttctacataatccatcggatgttgtggagtataaatctgcacacaaggtcccaccaatgtatgggcaccaatcgtgatataacctccgtccagaaaagtacaatttgcattcacaaatacgtgttcacccagacgtataccatccccatgatcgcaatggaaaggcgggcacacaacggatgtctccggtattcccggtatcaggtcttccaacaatcctctgtaagcctcatcgtaagtactcaattgccgcatccttgccaacaacttcttggcatattcaaactttacctgtacttccggggcagacatatccgccagttgcgaactacgcattttctctacttcattcatatatttcaattaccagattatactctcaaaagcgtaattattcaccctttcactattacactctccacaaaaatagatatttattccaaacagctaactatactgataaaaagaaacagtaaatattttcaaaataaattgcagctatactatttcatatacaaaaattattcgtacatttattgcaatttaaacagaaacaagcattcgcaataaaactattttaaagacaaactggtaagttcccgcacttttttcttttatcaagaagaaagaatcataataatactgctctgagaactggcagtacagtgtattaccttcaaattttgtattatgaaaatgacgaaactaatttatttatttgctgtaccactactagtggcttcatgtattagcgaagaagtacctattacagatgcatctgatcacttcttcaaagtttccgctgccaacccagacattcagcaaattgttttcctgctaaaacaaaaaaatgattcagtggaatttacctctaagttcattaatgcttttaccaaggagaatcaacaggaatatgtcttggcaggcagatggaaagcaatcagctttttcatgaaatgatgcatgcttaccgagcttatcaagaaaccactgcgtcatacaaagaatcaactctgaatggagaaatagaagcatggtacgcacaatatctttacacgagcaacttaccagaatataaagacagtaagtgggaagacagggacaatacagacccccgtcgcagaagaataaaaagtttaacgaattacattgataataaagggaatttacttcccggagtgaatcgtaccgatttagaaaataaaataaaagatgatatcgtccctactttccataagtatcactacacagcggataaataccccttcgaatataaccgaccgggattagagaattttaaatgtataaataagctaacaataaattgctgattatgaaaactatattcttttttatatgcatatcactttgtactacatatatatatgcacagacaaattattatgctgtaactaaaacattcaatgaaaatggttacacctaccaatgcgatgtggcagcgtcaaagacagtcacactctataacaagagtaacaaattactctttactactcaaagttacaaaaatacaggagaaactttctcacaaacagatgaaggtatcgttttactccaatatgacgcatggacacgagcagagcgcctttccattgtaaatgctgcattttctgctagtgaaaaacaaagagtaaaaggccacgagctcataataacaatgtgcataaattcagataccggcaaggttgatgaggtcgaattttctttcatgaacttcggtacttatgccacaatccctatctctgtttaccgtaaaatcgaaacagatttaaaagaaaaggtctggtatatccctactgaagagggcaaaaaattaaattatatatactattggtgggcacaagagccccaataataagccttatagtcagtggtagcgccagaaaaaagataaaaaaggaggacactctttctgatagagcatcctcctttttatttcctcttcagttacttatattcctgccaattcttgatagcaatatcttccaacttcagttcgcagaatgcttcgatgaaagcacttgccagacgagcattcgtaatcaacggaatgttatggtcgatagcaccacgacggatacggtaaccgttcgtcagttcacgtttcgtatgattcttcggaatgttgacaatcaaatcgaacttgtgttcggcaatcatcttcatcacgttgttctctgcgtcaggacgttcatcgggccagtaaacagcttcagtgcccactccatgagcattcaggaaagcggctgtacctgccgttgcataaatcttataccctttattgaagagcatgcggctggactccagcaaatctactttcgatttcatggcaccggaagagaacatcactcccttttgaggaatctggaagccagtagcaatcatggcgctcagcaatgcttcggagaaatcatcaccgatacagcctacttcaccggtagaagacatatccacacccagtaccgggtctgccttgtgcagacgggagaaagagaactgagaagctttcacaccaatccagtcgatatcgaatgccgacttgtcaggacgagtataaggagcatccagcatgatgcgggtagcagtttcaataaagttacgtttcagcaccttagacacaaacgggaaactacgtgaagcacgaaggttacattcgattaccttcacctcattgttacgtgccaggaactgaatattgaacggaccggagatattgagttcctttgcaatctgacggctgattttcttgatacgacgtgccgtagcaaagtaaatcttctgtgcagggaataccaatgtagcgtcaccggagtgtacaccggcaaactccacatgctcggaaatagcatattccactacctcaccattctgagcaacagcatcaaattcgatttcttttgtattctgcaagaactgagaaattaccaccggatattctttagatacttcagcggccattttcaggaagttctccaattcttcttcatcgtagcatacgttcatcgcagcacccgaaagtacataagacggacgaaccagtaccggataacccactttctctacgaaacctttcacatcttccagactggtaagctcttgccaagccggctggtcgatacccagttggtcgagcatagcagagaacttattacggttttcagcacggtcaatagaaagaggagaagttcccaggatgggcactgactgacgatgcagtttcattgccaggttgttcgggatctgtccgcctacagatacgattacgccgcgcggctgttccaggtcaataacatcgagtacacgctcaaaagacagttcatcgaagtaaagacgatcacacatatcatagtcagtagatacggtttccgggttatagttaatcatgatggacttgtaacccagcttacgtgcagtctgcacggcatttaccgaacaccagtcgaactctacggaagacccgatacggtaagcaccggaacccagtacaaccactgacttttcattcttgtaatagtttacgtcataaccctcaacggcgtacgtcatatacaggtaattagtcagttcaggatgctcggaagcaatcgtattgatacgttttacagccggcaggatgcccaactctttacgacgtgcacgcaccatcagattttctttctccatattgccttgcggttcgagtacgaaacgcgcaatctggaagtcagagaagcccagcacttttgcctgacgcaatacgtcggccggaatatcttccaccttattatattgggaaagtttcaacttatagtcaacaatgttcttcaacttgccaaggaaccagggatcaatcttggtcaggtcaaagatgcggtctatcgtatagccattctccaaagcttcagcaatagcaaatacacgcaagtcggtaggacgtgaaagctcacgatccagatcatcgaagtgcaggtcgttgcctacaaatccgtgcataccctgaccgatcatacgcaaacctttctggatgatttcttcgaaagaacgtccgatagacatgatttcacctacagacttcatgctggaaccgatttcacgggatacacctacgaacttcgtcaagtcccaacgaggaatcttacaaatcagataatccagttgcggagctacatacgctgaatacggagtacccatttcaccaatctgatcgagcgtatagcccaatgcgatcttagcggccacgaatgccaacggataacccgtagccttagaagccaaagcagaagaacgcgacagacgggcattcacctcaatcacacggtagtcgttagtttccgcattaaatgcatactgaatgttacattcgcccacaatgcccagatgacggatacactttgtagaaagatcttgcaacatcttcacctgctcgtcagtcagcgaacaagtcggagccaccacaatagactctcccgtatggatacccagcgggtcgaagttttccatgcttgccaccgtgaagcagtggtcgttagcatcgcggattacttcgaactcaatttctttccaacctttcagagactcttctacaagaatttgtttagagaaagcgaaagagctttcggccaacttcaggaactcttctttatcctggcagatgccgctacccaaaccgcccagtgcataagcggaacgaaccataaccggaaaaccgatgcgttcagcagcagcaattgcatcttccatactttctacagcctggctgacgggagttttcatattgatctcgtccagcttcttcacgaagaggtcacggtcttccgtatacatgatagcttccaccgaagttcctaatacgcgcacaccgtacttagccagcacaccgcttgtgtacaactcggcaccgcagttcagagccgtctgaccaccgaaggccaacagaataccatcgggacgttctttcttgatgatttcttctacgaaataagtggttacaggcaagaaataaacctgatctgcaataccttccgatgtttggatagtagcaatattcgggttcaccaacactgaactgataccttcttcacgcagagccttcaatgcctgcgaaccggaatagtcgaactccccggcctgaccgatcttgagtgcacctgagcccaagaccaacactttcttcaaattcttttccatatattctcttgttgtctattaagtttcttcctatacattcgggcacaaaaaaatgcgttacccaacaaaggattaacgcattaccaaagaactaacaatatcttctcagagaaagagaaatcatcgactaacgaatgaaattcattcgaatacagattatatgtatctctttttccgtgttgttgcatcgttgttttaaaatttgtgcaaagtaacgacttatttcgataataaacaaatttagagcctgtctttattctctatatttatttaaaatagcaattgcctcctattaagctatttaaaagcatgatatagtaccgccattagtttcatcagctgaaacttgtagtttcatgccttgaaactatcagtttctcggtgtgaaactacaggtttcaaggcatgaaaccgccagttccacaccgagaaactaatcaccacttatagacttccgaataagactcaaactgaagtgcgtcggtaatgccgttctgagtaaatatatgcctgatatatcgctgaccttcaggcgtaatgaaacgctctttacggtagatccgataataatgcgtcttgccgaagtaggaaacaatctggtgccgcatatcggctgccaagctaagaggaacatcgtcaaataagtttcttaccccccatgccacacgtatcttctggataggcaggaaataggaacactgagaagaatcggcaggaacagctgccggactgagaattgtaatcaaaggtttatcagccgtgcaatgccgcgcagccaaacggcgcaagcaagtatctgacctggaacaatcgttcttgaaacaatgaataaacccttgagggaccgcttgataatcaaaatctgttttcatcgcgttttatattaagtatatttccacaaaggtaaactcttttttcaggaaaagcaacaagagtatggtttctctttcgcttctctaaagaattatgaagctaaagtcagagaaaagcgttacctttgtattcattttcaaagaaaaacataataaatagaataatataaatatgtctaaagagaaaatcatcctcacgggcgaccgccctacaggacgcctgcacataggacattatgtgggctcattgagaagaagagtggagttgcagaactccggtttgtatgacaagatattcgttttcattgccgatgcacaagcattgactgacaatgtggacaacccggaaaaggtacgtcagaatgttatcgaagtggcgcttgactatctggcatgcggactggacccggcaaaaagcactatcttcattcaatctcagattgccgaactgtgcgaattgagtttttacttcatgaatatggtgaccgtaagccgcctgcaacgtaatcctacagtaaaggcagaaattcagttgcgcaacttcgacgccagcatcccagtaggtttcttcacctaccccatcagccaaactgcggacattgccgctttcaaggcaacaactgtccctgtgggcgaagatcaggaaccaatgttggaacaggcacgcgaaatcgttcgtcgtttcaactatatctatggcgaaacactggttgagccggaaatcctcctgcccgaaaacgccgcctgtctgcgcctgcccggaacagacggaaaagccaagatgagcaagagcctgggcaactgtatctacctctccgactctgccgacgaagtacagaagaaagtgaaaggtatgtataccgatcccgaccacttgcgtgtacaagacccgggtaaagtagaaggtaaccctgtatttacttatctggatgctttctgccgccccgaacacttcggcctttacctgcctgaatatccgaacctcgatgaactgaaagcacattatcagcgtggcggtctgggtgatatgaaggtgaaaggattccttaactccatcatgcaggaaacgctggaaccgattcgcaatcgtcgcaaagaatttgaaaaagacattcctgccatctatgacatgctgaagaaaggttgcgacgcagcacgcgaagttgccgccgctacattggatgatgtacgcaaagcaatgaagatcaactatttcgacgatgcggaactgatagcagaacaagtgaagaaattcagcggagaataaaaaacaatatcctctgttacgagtaacgccctagcctcccgtagaatctacgagagaacagggcgttccctttttaatggaaagactatatttagttagcagatttcactaataccacacggttcaggatcggttgaccaaatttgtctacaccaccaccggcttccacattcaagcgatcggcagcaataccgtaattcttaaccaatgcattcttaacagcttgtgcacgtttcaagctcaactccttgttgaatgccggagtaccggttgcagagtcagcataaccgtttacggtgtacgttgcattcgggaactgtttcatttgttctgccagataagacaggttcatgatttcacgcggagacaattcagcagaaccaatctggaagaatacggtacgcggtgcgatatccggatccggaacaatcacctgtgtttctgttacttcagccaccggctggttttcagcctgtaccagtgcattcttcaattctgcattctgtgcacccatcatagccaacttatcctgcatagcggccaattcgatctgagagatcaactgcggcatcgggcgacggaaaccacgggcggggaaacgataagtcagaccaaccgtagcgctcaatacgccatcatatccgtgatcaccacctacttcaccatcaaatttatcttcagcagccattgcgctcaattccaagttaatatctaccgcattcgaaatacggaatttattgataatacctgcatttacagacaaagcttcgcgatgaggtttggagtaattgtgagtgaaaccggcacctacataaggaataatctcataaacacgatgctgattataacctccgaaaagagcattcagattgaacatcacgtcaccgtgcaagttcatatagtcaaaacgttgtttatagtaaccgtctttcagctcggcacccttcacgtagtcggcacctttatcataagtaaagcctctagcctgcaaaccgctatattgcagacgcaatcccaaaccgggagtaaaccatttaccgacagagatattcaatgtaggactgatacgcttaccaaaacttcctgcactatcattatcaccaaaagtagcttcagcaccgccgccgatagagaagaaccaattgctccaaaaaggattggtgattacctgatatttatcctgtacctggataatttcgtattcgactacttcagtcttctgttgcgccatagcagcagaagacaaaccggccaaagccagtaacattagaatctttttcatataccttaaatagttaagtggttaatttaaattcattattgtaactgtttaaataacaccatccgaactaaaaggttttacgaagatagttttttttgttccgaccgcgccacaagccgggcaggaaggcttctatacagataaataaataatgattcgcccctacaagcaccttaatcagtcctgtaggggcgaatatcattcacacgtatgtgcgaaattgttttaacaaatagattatactactttaacgagcaaatagtttttcaatatcttcttctttaatcgttgacaatacggtacgtccatccggtgtataattcggagtaggacaagcaaacagattatctaccagattagccatttcttcattgctcaacacctggccgtaaacaatggcagcagccttcgccagtgtcagagccaacatcgtttgcacttcttccttcacgtcatttcccttttccattgccgtatgcaccatattacgcaccagctccaccggattcaacccttcaatgccggacggaatgccattgatcgcataacttcctcctcccagaggtgtcagttcaaacccaactgccgagaagtcttccatgatgctttccaacaccgcagcttccgaagcgggcaattgcacgatttcaggaaacaaaactccttgagaaaccccttgtttctgacgtatttgattcatataacgttcaaacaacacccggatatgcgcccggtgctggtctatcagcatcaaaccggattttaccgaagtcagaataaagcgccctttgaattgaaaatgctgcgcacctttctccactgccggttcgttggtatacaacgatgcagatggagaggatacagtttccgtctcctgaacatacggagtacgctcttcggacatatctaccgatgcaggtgcagaagtccagtccgtttcgtctacaaaaggttcttcttccataggcgtattcatcttgctggctttctccagaccatcatacagtccttcccaatccactttcggccgggaatagctgcccccaccactataagaggaagctgaagaagtcttgaacggattgaagtctgaattataatgcaccttcggaggctctatcggacgagtctgatcaaatgcgggaatatccggcataccttccgtatcgaaatcaatggacggcacagcattgaatttacccaatgactcttttaccgctgcggaaacgatctgccaaattgcctgctcgttctcaaacttaatctcggtcttggtaggatgtatattcacatcaatgttggccgggtccacatcaaagtaaatgaaataggaaatctgttcgcctgccggaatcaattgttcataagcatccatcaccgctttatggaaatatggatgacgcatataacgcccattcacaaagaaatactgatgagctcctttcttacgcgccgtctccggtttggcaacaaagccagataccttcaccatagtagtatctacatctaccgacagcagatgctggttcaatttcttgccaaatacggcaagaatacgttggcgaagtggcatcgcaggtaggttgaataattcggtatcattactatataagtagaaagccacttcgggatgtaccagagctatgcgttcaaattcagtaaggatattgctcaattccgtcgagttcgctttcaggaacttgcggcgggcaggtatattaaagaataagttcttaatggaaaagttacttcctttaggacacgaaacggcttcctgactttctactttagagccggctatcacaatccgtgtacccagttcctcattagccatacgggttttgagttctacttccgccaccgcagcaacagaagccaacgcctctccacggaatcccatcgttcgcaaggcaaataaatcggcagcctgccttatcttagaggtggcatggcgttcgaaagcaaggcgcgcatccgtttcggacatgcctttaccatcgtcaatcacctgtatacaggttttccctgcatctgtcaccaatacgtgtatttcttgtgcttcggcatcaatcgcattctctaccaattccttaatgacggacgccggacgctgaatcacctctccggcagcaatctgattggcaaccgaatcgggcagcaaatgaattatgtcgctcatgataattacaaattatgaattatgaattacaaataacgaataacaacaggtcccatgatgctacattgtaattcgtaatttgtaactcgtaattaaattaaatgattccggtgcttatggcataccacaagtatatcagcaaagcaataatcaccagtatcacccccaggtgtaccggtttacgctcgctttccttgcgtcgtttcaagtgggtagtgccttcaacgaactttccccggatatcttccggcgaaaactccttctcaggcaacattcccaattcacgtttggcgctttcttccatcttcgccaacttctctttccgctcatccacatatatatatggatgattaaagccacgaggctttctcattgtgaacattcccatagcgcttatttatttctttttatattcatattccttggtgaaactataggcttacgatctgatttctgcaattgttcgccagcccttttacctctccactcaaatatatcttccttatttctcggtcggatatagtcaaaccagacaaaaggcggcaacttatatttgtcagccggaatctgatccatcggatagagcgtaccattcgctttccctataaaggctccttgctccatacgcctttctttcagcaacatacgcaggaaactgccctcagaatagttcaatcctatcatggtactgtctttatcgtctatcggatagaagacaaccagcacattaccgttcacatccacctgacgcatatctccgccaacaaaaaagcctttcatctccttgcccgtcacctggttgtaatgaacagaatctttctgctccacagccaaagcctgattgattatgtgcgcccagtctatggtactgtcattcatatagactttaatttcctcacccaacaattgttgtgagccatgccataagataggatcagtatacatagtcatgcaagagtctttagaattatacaccaaagaatcgcatactgcctgaacatccgtacgataagcacgtactttatgatacaccctcatctcacgaaacatggagtccgtatttatatgataggtaatcaaccgcagtgtatcaccgtgcataaacaaactgtcaccttgtgaataatcaatagcaactgcacgttgagtagcaagtgcacttcccgtgatctcattgtagaaacaatagttacctgtgagcatattcctgttaatggtatcattcatctgcacattgtcaaatgcttcaccatatcccaaaacacgatcatagaaaatactgtcacccgtcagtttcttgccttcgttggtcagcacggaacgatccagcagttcagcctgctctgtagtggtgttataaatacctcgttcggaatagatgtggttcttatcactcacaatatccgaagggcccagaatcgtagcaatcttcgtatcggtgctatatttcaaggtatccgaagtcaatacaaatttcggattaaccaacttcacatcatggttgaatacggatattttcgtggccggactatattctccccactcggaagtcagcacattctcttcatcggtcagtgtaccaccatcgaagtaataacccagattatacaaacggtcgtagtttaaactatccgttgtcaataccgtattccggttaatcatgcggacattctcacgaagcattgccaactgcgacataccgtcataatacagataatctccataaataaagagcgtatccccctgttccatacggacattaccgaaagcttccaccgaatttgtcttctcgtaaatcaacgcactgtcacagtacatatacatactgtcatgacgcagctttaccgaccggatcagaatctgaacatccggaagcagaattttatccgcctgcgcctcctcagcgtaaagcaaatcaacccgggttttcttcttttccggctgtttcggcttatcctgggcactcagcaaacagatgccaaacaggcatagaaggcctgtgagaaggaatctatgcctgttcagaaaattatttcttgtatttttcttctgcatacaaaaagttagtgtatcacccgggatcagtctttaatccaacccggatacttaaatgtacagttcttccaattttcgttgatacgcacgtacgtatgcttttgtttttcacgaatccatttatccagcatctcgtcacgacgtttctccaatacaatttccttcaggttctgatagtcttccgaaatagttgctttgtgtccgttgatgcggcttttcagttttacgattacacattcttctttaccagtcttctgcggaatcatagtgaatgcctcggagatttctcctactttcatcttatccaccactttagcaatctcgggcggaagttcctgcatctcaaactttgacgtattggtttgagggttaggtaacagaccgtgattgttacgtgtatccttatcctgtgaaagtacggaagcagcttcttcaaaagtaaacttaccgttacggatgtcatcggcaatagagtccagacgggcagtacctgccatcagcgcttcttccggtacgtggggcttcaacaagatatggcgcactttgatacggtcaccacgtttttccatcaactggataatatggaagccatattcagactctacaatcttggaaaccttattggggtcttgcaggttgaaagccacattggcaaatgcaggatccagataaccgcgtcctgtaaatggcatttcaccaccattgatagccgtaccacggtcgtcggagtacaaacgtgccaacatagagaagctttctcccttattcacacgatccgtatattcgcgcagacgactttttacatcttcaatttcctccaaaggaattttcggttgttgtgtgatgatctgcacctctacctgggtagggatataaggaatactgtcctgcggcaaatccttgaagtggcggcgcacctctgccggagtgattttaatctctcctaccagtttctgctgcattctctgcactttcaatccttcacgggcattctcgcgcaaggcttcacgaatctgactggatgtcttattgaagtattcctccatcttttcacgcgaaccgatattggcgatatacatattcgtcatctggtccacacgctggatcacctcactttcagcaacttcaatactatcgagagcagcctggtgtaaaaacagcttctgtacagctatttcttcaggaatcacacagtagggatcaccgtcaaatttacgtccttcgtacagagcactcatccgagcttcttctacttcagacttcaatatagcctcgtcgcccactacccaaactacttcgtcaatcacgttgtcttgtccataaacggcagaaccggtcatcagcgccaaggcacataaaactacaaacttaaagttcataaaatttttcattctgtgtatctaaactaattatatttaatctcattcttcttcactgcctgctgatacaagtcatccttcacctttttcataaactccacttgtttcaggttcagcatcatatctttcactttagggcgtgcaaactcataaggttcctgctcgcccaccgaacgaaaatcgctcacattcaggaaataataaaacgccgtatctttcaattcgatatgacggttcttattcacataatcttctacttcgggtactttcaacggtatcagatcaagcacatctgccatcggtacccatttatcataaaagtactcgtacttcacggcattctgcaagctatacttttccagatgttctactgcatcttgcgtagctgctttataccaacgacgtacattgtttagttgtggtgcggtgagggggactttgatgaacaacccctgcatcagcggccgttccaacctgaaaagctctttattcttttcataatagtccgccaactctccctctgaaatttcattcgagagtctttggtgaatcaatgcctgctgataggtgtgcataatcagcgccttgcgataattctccacaagtttctcaatctccccgttatcgggaatattactctgcgctttctcatataataagacatcttccacccaattgcggatgtaatgttctgcgaacagtaaactatcatctttcgacaatctcgccggaagcgcagattgcaggtcttcccggtaaaggaaattgccgtccaattccaccagtggtgtcttccctttatggtcgtgttgctcgctacaggccacacacaaaaggatggagaggagtcccaggaaaaatattcgcattaccgattgatatttactttatttcaaggtacgaagataacggtttaatcggttgcatcagtgcttattaacggtttttaaaacctcttggtttatttcaaccttagcggtgctccgtaattgtgcaatccaacgctcctccaaatagttctgataatcgcctacaagcagtccacgcacctcttgataagtctccggccccttcaccttttcacccagaaaagtggtaaaaggaaatgacgtcataggttcagttttcccctttttgaagatttcttcatctacataggcattatctccgggagcaaataaaccttgttccgcctgcacttgccgcgtctttgcattaaacgtcagccggatggcattctgccactcctcttccggcaaagatttcaggaatttgcgagcttgctttccaagttttttcgttgtagtatgtaatacaattcctttataacgggggactttccaatgataatccgaatgatgcttttcaaaataggccgccagtccgacctcatctgagggtacacgttcccaaatctcccggttactgatttcaaacagtaacattccattccgatactcttgcatgagcatacggaattccggatatttatcttccaggcgactatactcataatccagtacggacttcatgataaatcctttcagctggcgttgcacaccctgagggtgggaagctgcaaaagcggcaaacatctttcctgtatattccctgccgtcaagtgtaaacagtctcttatctgtctgcccttttgacagtagttcatccactccagtcttatctgccgtatattgatattcctttttcagtttttccaccaaagcctccgctcctctgtccattccgtaacgacggctctggcgacgcatgatttcatccttcactttttcaaagggcaggatttctttccgttcaatcgccttgacaatatgaatgccttgcggtgtaaaaaaaggtcgggatatctctccttgctttaatgcaaatacaacatcttcaaactcaacaggcatctgtaaccaacttacccaaaaagattttttttcatcagagaaattacgtacacactcatcaaagtccgcctgcccattctgcaatgcggcataaagagaatccatccgagcttctgcagaacgcagcacatgactggtaactatttggggaagagacttaaagatatgacttacccgtatctgtccggcacgattgttagctttcattttatcatatacctgacgggctgcaagctctgatacagactcatccgtcaaataagcttttgccaactggcgacggtatccctccagttcttcacgaaaagcccgggtagtatctaatccggcagcttcggctgcagcgactttcagcttaaaattcacaaacaaatcaacatattcactcaatgttttctgttcgataccagcaagggcattattcttattatagatatattcgaactccgaacggagaatttctttcccgttaatacgcatcagcaccggatcttgctgagcaaaaactgccaatcccaggcaaaggagaattattgtcaatccacttcttatcataactattatcttagaaaagaacaatgtaataacggggaaacatcttttatattgcctcaacaccaaacagatgatgccttttctttaaacgaaaaatacccggaaaagtatttgttactccccgggtatttctatataaattgcctatattttattcgggacgactgtaattcggagcctcgcttgtaattgccacatcgtgcgggtggctttcaagcacgcctgcattagtgatgcgggtgaacttggcatcgtgcaactgctctatactacctgcaccacaataccccataccggcacgcaaaccgcctaccaactggaagatcacttcgtataaagttcccttataaggtacacgggcagcgataccttccggcaccaatttcttaacgtcattggtaccactctggaaataacggtcttttgaaccattctccattgcttccagtgaacccataccacgataagatttgaacttacgtccgttgaagataattgtatcaccgggagactcttccgttccggcaaccagcgaaccgatcattacgctatatcctccggcagccaaagctttcacaacatcacccgagtagcgcaaaccaccgtcagcaatcaaaggaacacctgtccccttcaacgccttagccacatcatatacagcagacaactgaggaactcccacacctgccacaacacgagtggtacagatagaacctggtccgataccaactttcactccatcagcgccggcttccaccaatgctttagcagcttctccggtagcaatgttacctaccacaatatcaatgttcgggaaacgcttcttagcttccttcaatttttctattacatagatagaatgtccgtgagccgtgtcgatgacaatcgcatcagcaccggcatccaccaaagcctgcatacggtcgagagtatcagccgttacacctacaccggcggcgacacgcaaacgacctttcgagtctttacaagccatcggtttatccttagctttcgttatatctttataagtaatgaggcctaccagcttaccttccttatctacaaccggcaacttctcaattctgtgttcttgcaagatttgagaaacagcctccatatcagtggtcggattagtagtgataatattttcttttgtcatcacttcgtcgatatgcttattcatatctcttacgaaacgaaggtcacggtttgttacaattcccaccaaatatctctcatcatccactaccggtataccaccaattctgtattccgccatcaatgccaatgcatcgcctacagtagaacctctcttaatggttacaggatcataaatcataccgttttcagcacgcttcacgatggctacctgacgtgcctgttcttcgatagacatattcttatggataacaccgataccaccttcacgtgcaatggcaattgccattttcgcttcggtaaccgtatccatagcggccgttacaaacggaattttcaactcaatgtttttagaaaactttgtcgagagttcgacagttttaggaagcacttcagagtaagcggggattaacaaaacgtcgtcataagttaatccatccattacaatcttatcagcaataaatgacatagggctatgcgtttaaaatttattgcgtgcaaatatacggtttttcttgtttaaccacactatgtctgcataaaaagcttataacagttcactttttttaaaccgtatagcctcaaaatccctttatttcctttcgaaatagaaaggaataaaagtgattagtgtttggtaataagtgattagcgccattcggtatattattttttagacgcggatgacacggataacgcggatttaaa

SEQ ID NO: 6365 - DNA, 53799 bp, Unknown
  gut microbiota DNA sequence
ataaaagtggataaaaaaagatccgcgttatccgtgtcatccgcgtctaaaagattatttatcatttagttcataacccgtccaaaaagaattaacccttcctggattgattcctttatttttcgtatctttggccctcattattcaaaaaaacgactcaacatgatacagttattccatcgcatgatttccgccgccctcggcatttccgagaagcaaatcggccatacacttgatttattggaagacggagctaccattcccttcatcagtcgctaccgcaaagaagctaccggcggactggatgaagtgcaaattgaagccatcaaaacacactatgagaagctgaacgaaacagccaaacggaaagagaccatcatcaacaccatcagcgagcaggggaaaatgactcccgaactgcaaaaacgtattgatgaaacatgggacagcaccattcttgaagacatctacctaccctataaacccaaacgccgcacacgtgcggaagtagcccgccagaaaggactggaaccactggcgacattactgatgctgcaacgggaacccaaccctgagaaacgtgcggaagcatacgtcaaaggagaagtgaaagatgccgaagacgcactgaaaggggcacgggacatcattgccgaacaggtcagcgaagacgaacaggcacgcaacaccgtgcgttttgccttctcccggcaagccgtcatcaccgccaaagtagtgaaaggaaaagaaactgaagcagataaataccgggattacttcgaattcagtaaaccactgaagaaatgtacctcgcaccagttgctcgccatccgtcgtgccgaagccgaaggtctgctgaaagtcagcataagtcctgatgacgaggaatgtgtagagcgtctggaacgccgctttgtccgtagcaacaacgcttgcggagaacaagtggcggaggccgtacaagatgcctacaaacgcctgttgaagtcgtccatcgaaactgagtttgccgcacaaagcaaggagcaggccgatgaagaagctatccgggtattcgtccagaacctgcgccagctattgctcgcttccccgctgggacaaaaacgggtaatgggcattgatccgggcttccgtacaggctgtaaggtaatatgcctggacgcacaaggcaatctgctccacaatgagaacatctatccgcatgctccggtgcacaaaaccgcagaggctgtatccaaaatacaaaaaatggtggaagcttatcagatagaagccatcgccgtaggcaacggaaccgcaagtcgtgaaaccgaagattttctgaaacatcaaactttcagacaggacattcaggtatttgtggtgagcgaacagggcgcctctatctattccgcatccaaaattgcccgggatgagttccctgaatacgacgtcacggtacgtggagccgtatctattgcccgccgcctgatggacccattggcagaattagtgaaaatagatccgaagtccattggcgtgggacaataccagcatgatgtggatcagacgaaattaaaaaaatcactggatctgaccgtagaaagctgcgtaaatctggttggtgtaaacctgaatacggcaagtagccacctgctgacgtatatttccggtttaggccctcagctggcacaaaacatcgtgaactatcgtgcggaaaacggtgcatttacctcccgcaagcaactgatgaaagtaccgcgtatgggagccaaagcatttgagcaatgcgccggtttccttcgtattccacaggctgaaaaccccttggataatacggccgtacaccctgagagttattgcatcgtagagcagatggcaaaagacctgggatacagcgtagcagaacttatcgccagcaaggagctccgcctgaaaataaaaccggagaaatacctcactcctaccgtgggtatgccgacattaaaagatattctgcaagaattggaaaaacccggacgcgacccgagaggtccgataaagattttcgagttcgacaagaatgtacgcaccatcaacgacttgcgcgaaggtatggaacttcccggtatcgtaggcaatatcaccaactttggcgcatttgtcgacataggtatcaaagagaatggtctgatccatctttcgcagctggccgaccgtttcgtttcagacccgaatgagattgtctctattcaccagcatgtccgggtcaaggtgctgagtgtggatatggaccgcaagcggattgctttgaaattggttagtgacgcttcatgatacaatcatatccagatcacgctatctaataaaatagtataattctctatttttaaaccttctcaatattgtaaccattacaatattaattatctttgttcccgaattggttccgaatggctcttctgccattcggattaaaagggaatcgggtgaaagtcccggacagtcccgctgctgtgaagctctatacaacttttcaataacaccatagccactgaatgtcttgcagtagaaaagaagacatcgggaaggcattgaaaacaaagagtcagtcagaagacctaccattcatcaaaggctgtttctactcgtgggattagggaaacagtgcgaaataatacaataattttatacataaacatctcatggaaataaccaagagaaatggaatggcagagccttacaacaaggagaaggtagccattgccatacgaaaaagcttcgccagcaccggacaaagtgttacggatgaagcaatactcacgctggtaaatgaagtggaaaatttcatcctcagtgacaccggcaatcgccacgtagaacggatccaggatgaagtggagcggtccctgatggaacatggcttttatgccgaagccaaaaactatatcctttatcgctggcaacggacagaacggagaaaagccctcaaccacatagtaaatgaaactggcgacgaaacaataacgggtactctgaaaggtatcgggcaagacttcccacgcaatgaatacagcctgaccctgctcgccgaaaaattctccagtttctacaaaccggaaatgacaccgaacgaacggttaacggctcttataaaagcggctgtagagctaactacccaggaagcccccgactgggagtttattgccgcccgattactcaattttcagttaggcaagaaattgactgaacaggcagagttcgccggtgttctgtctttctatgaaaagctgcgttatctcacggacgaaggattatatggcagttatattttagcctcctattcaccggaagaaatagaagaagcagcaggatttatatgtccggagcgtgacaagctcttcaactattccggactggatctgcttgtcaaacgctaccttatccgtacacgctcccatgaaccgattgaatccgtacaagaaatgtatttgggtattgccctccatcttgcaatgccggaaaggcacaaccgtttgcaatgggtaagaaaattctatgatctgctgagtaaactggaggtaaccatggctacccctacacttgccaatgcccgaaaaccttatcatcaattgtccagttgcttcatcgacaccgtgcccgacagtctggaaggtatataccgaagcattgacaacttcgccatggtcagcaagttcggtggaggtatgggaatgtatttcggcaaagtacgtgcggccggtggaaatatacggggtttcaaaggtgtggcaggaggagttatccggtggatgaaactggtgaacgacacagccgttgccgtagatcagttgggaatgagacaaggagcggtagccgtatacctggacgtatggcacaaggacctgcctgaatttctgcaactgcgcaccaacaacggggatgaccgcatgaaagcccatgacatatttccggcggtatgctatccggatttattctggcggatggcaaaagaggatttgaaccaatcatggtatttattctgtccgaatgaaataatgaccatcaaaggatattgcctggaagattattacggagaagaatgggagaaaagatatttggattgcgtaaacgattcccgtctttccaaacgcagcatgagcattaaggatatcgtcagactggtgctacggtcagcagtagaaacaggcacacctttcactttcaaccgtgatgccgtgaatcgcgccaaccccaacaatcaccggggaatcatctattgttccaacctttgtacggagattgcacaaaacatgtcggccatagagacagtttctactgagatacgcacggaggatggggatatggtagtggtgaaaacagtccgtcccggcgacttcgtggtatgtaatctcgccagtctttcattgggacatctaccgttggaagacgagcaacagatgaaagaaaaagtggcaacagtggtccgtgcactcgacaatgtcatcgacctcaatttttatccgatcccttttgcacagataaccaaccatcattatcgcagcatcggtttaggagtcagcggatatcaccatgcacttgccatccgtggcatacgctgggaaagcgaggaacatcttagcttcatggacaagatctttgaacgtatcaattacgccgccatcgaagcgagtgctgaactggccaaagaaaaaggacggtacgactactttgaaggaagcgactggcaaaccggagcttactttacaaaacgcaattatgactcccccgcatggaaagcactggccgcaaaggttgcagcatccggaatgagaaatgcctatctgctggccatagcccctaccagcagcaccagcatcatagccggaaccaccgcaggaacagatccggtgatgaaacgctttttcctggaagagaagaagggagccatgttgccacgtgtagccccgtcactgtctgacaaaacattctggctatacaaaggtgcctacctgacggatcagcaatggagcatccgtgccgccggtgtccgccagttgcatatcgaccaggcacaaagcctgaacctttacatcaccaatgaattcaccatgcgccaggtgctgaatctctacctgctggcatgggagtgtggagtgaaaacagtctattacgtccgtagcaaatctctggaagtagaagagtgtgaaagctgcgcatcataaaaacttaaaaactaaaataatatggaagcaaaaaaactaaagagaaatgccctgttcaacccttcaggtgatacggaaatccgcctcagaaaaatgatcggtggtaatacgacaaacctgaatgatttcaataatatgcgatacaaatgggtaagcgactggtatcgccaggctatgaacaatttctggattcccgaagaaatcaatctcactcaggatacgaaggattatcccctgctggatgaagccgaacggactgcttacgacaaaatcctaagttttctggtatttctggattccctgcaaagcaacaatctgcccactatcagcgaatacatcacggccaacgaagtaaatctttgcctgcacatccaggcttttcaggaatgtgtgcacagtcagagttacagctatatgctcgatacaatctgtagtccggagaaacgcaatgacattctttaccaatggaaaacggatgagcatttattaaaaagaaatacctttatcggtaactgttacaatgaattccaggaaagtcaggatggctttacgctaatgaagactttaattgccaactatattctggagggtatttatttttatagcggttttatgtttttctataatctgagccggaacgggaagatgtccggctccgctcaagaaatccgttatatcaaccgggatgagaacacgcatctctggttgttccgcagcatcatcctggaactgaaaaaagaagaaccggaattatttacccccgacaaagtgcagatatacgagaatatgatgcgtgaaggagtgaaacaggaaattgaatggggacaatacgttataggcgacaacatacagggactcaaccggcaaatgattgctgactatattcactatctgggcaacctacgctggagcagtctgggaaatcctccgctatacgagcacaaccggaaagaaccggaaagtatgcactgggtgttgcagtattcaaacgccaatatggtgaaaaccgatttctttgaagccaaaagtacggcttacgccaagagtacagcgctggaagatgacttataatcgttgattcactttccggctttgtatcttcagaataatcgcaatagcaataatcatcaacgcggtgcacaggacagaaccttcgaacccgaatgcaccgccgttgatgatattctcttccggtaattctaaagacaataaagtaccgcccaatcgtcctccgcttacttcgaaaccaagaatcggaccttgcagccaattccagaaaagatgaagagcgataggaaaccataaattacgcgtatatatgtaggtagaacctattaaaatccctgccaacaaaatattcagaaaagcaatcagagaaaagttgggattaaaaatatgcatcagggaaaacaatgcagacgaaagaaacaatgccacaaaacgattgacacctgcggtcagcaaatgccccaggacaaaaccgcgaaaggcaatctcttctgcaagggcaaccagcaacattaatatccaagacagcagaaaatcgtacgcgctaaagtgtacggcagtaatttcaacctctcccaacccatataatattccaaatccgacagtatagatagccaaggcaacgaatgtaccccagaagatgtctttagcccgccctttcagggataaacccaagtctgtaatcggaaggtggtcccaattcttcagcagaacccaggccgccaggaaagttcccgccagaaaactactttgcatgacaacttctttcaaaattccatctatcttaaaaaaagagaccgctttgatgcaaacagcccccaatactccggcaaatcccagcatcaaaagtatataaacgataacttttgctgcaacaaccagataaatgacaagtttcgactcttgcggggcaatatttatattttcgttcattgattccatatccttagtttctatatgttaataccccagcaaaaatacctataaaattaaaaatagaaagcgaattcctgcaaaaagcgtatatttgtctaaacatatctattactgtcatgaaactaaaacgaacattagccactataatgctggctgcatgtacttacgcagcagttgcacaaaatgcaggcacaccagctaataataaaactttttttgtagccaagcccggcactctggtatccatgctcactgaggatgaagccaacagcgtcacccatcttacattgaccggaaaactaaatgccattgacttcaaacatctgcgcgatgaattcaagaatctgaaagtgctggatatctccaacgcatccatcagtacatacgcaggtaaaagcggcacttaccccgaccgtttctatatttatccgcccaactgtgtaccggcttatgcattctgccagcagaccagcgacagtactttcaccggaaaagcaactctccagaaaataattctttcagagaaaatcaagaacatagaagacgcagccttcaagggttgcgaaaatctgaaaatatgccagttgagaaagaagactgctcccaacctgttaccggccgctttggcggatagcataacggccattttcgttccgttgggtagcagcgactcctaccgtggcaagaagcattgggacacctttgccgtgatagagggagaacctgtagaagctttcgtacaagtaggcttaatgggaagtcttgccagtgaattagtggctgcgggcttgcaaccgaaagatgtgaatttcctgaccgtagaagggaaactggacgaagctgacttcaccgtaatacgtgattatatgcccaatcttgtggctgttgatctgagcaaaagtaacactacggttattcccgaatatacatttacccagaaaaaatatctgttgcgcatccagcttcccaaaggtttgaaaagcatcggacaacgtgcatttagtggatgcggtcgcttgtgcggtacgcttgaattgccagccggagtgactgccatcgaatatggcgcgtttatgggatgtgacaacctgcgttatgttgtagctacaggaaacaagattacgactttgggagatagcctgttcggagaggacgggaggaataagctgatttataaataagcatggaaaaaacatcgccttgcaatattcggttattgcaaggcgacatttttttattgaaagagcagatatttactgtgcatacatcttagctcttaattccttaatatggtcagaagtgatgtattcgtcatattccatcatcttatcaataataccgttcggagtcagctcgataatacggttggcaacggtctgtatgaactcgtggtcatgagaagagaacaggatattccctctatacgtcttcaggttattattgaatgcctggatggactccaaatcaagatgattggtaggagtatctaaaatcagacagttggcattgcgcaactgcatacgggcaatcatacaacgcatcttttcacctcccgacagcacacttgctttcttcaaaacctcttcaccggagaacagcatacgacccaggaaactcttcatataaacttcatttccttcgccaaactgactcaaccagtccaccaggttcagatccgtattgaaatactgagtattgtccagcggcaagtatgcagtggtaatagtgacaccccaactgaaagttcctgcatccggcttcatttcttcatttataatctcaaacaatgaagtcatggcacggggatcgcgagaaaggaataccaccttatcccctttctctatattgaagtttacatcgcggaaaagcacagtgccgtcttccaaagttttggtcagcccggaaacttccagaatctgattacccggttcgcgctcgggagtaaagataatacccggatacttacgcgaagaaggcttgatttcttccacattcagtttctccaacatcttcttacggctggtagtctgcttgctctttgccacattggcactgaaacggcgaataaattcttccaactctttcttcttctcttctgccttagccttctggttctgctgctggcgcagagctaactggcttgattcataccagaaactatagttaccggcaaacaggttaatcttaccatagtcaatgtccaccgtgtgcgtgcagacagagtcgagaaagtgacggtcgtgactcacaaccaacaccgtatgttcaaaattagccagataatcttccagccacatcacggtttccatatccaagtcattggtaggctcatccagcaacaagttatccggattaccgaacaaagcctgtgccagcatcacacgcaccttctccttaccgctgaggtcacccatcagcacataatgcttatcttctttaatgcccagaccgctcaacaaagccgccgcatcgctttctgcattccagccgtccagttccgcaaatctttcttccaattcggaaaccttcagaccgtcctcatccgtgaaatcttctttggcatagagcacttcgcgctgcttcatgatatcccacaaaacagtatgccccatcatcacggtatccattaccgtaagtgcatcccacttaaagtggtcctggcttaatacggagaggcgttcgcccggacctaacataatagaaccggtcgtagggtccaaatcaccggatatggcacgcaggaaggtagattttccggcaccgttggcaccgataataccatagcagtttccacttgtaaacttcaagtttacatcattaaataacaccctttttccaaactgtacggaaacattagagactgtaatcattgatttatttactatttatcgatttactatttactatttaatacctattgttctgtattttgcgagtgcaaagataggcatttttccatgaatactcgtagaaatgcgctgtcaatctgacataaaagtattacctttgcggcgttttagacaaatgctgcctatttggcaaagtttttgttagtagagcgatatactaacttaaacccttgacagcaatgaaaacaaatcctttttacaagtataataagaatagaaatatggacccgaaagaaaaagaaaacatcaacgaagaagagttaatgtccgaagctacgcaggatgaagccgcggaaaatgaagaaattcaagaggaggacgtacaggacagtgcagctccgacagaagaggaaaagcttgcccaggaactggaagaagcaaacaaagtgatagaagagcagaaagataaatatctgcgcctctccgccgagtttgacaactaccgcaaacgcaccatgaaggaaaaggccgagctgattctgaacggtgccgaaaaaaccatcagcagcattcttcctattgtagacgacttcgaacgcgccctgaaaaacatggaaactgccacagacgtagcagccgtgaaagaaggagtggaattgatttataataaattcatgtctgtattgggacaggacggcgtgaaggtgattgagaccaaagaaaaacctcttgacaccgattttcacgaagcaattgccgttatccctgcaccggacaaatccctgaagggaaaaattctggattgcgtacagaccggctacacgctaaacgacaaagtaatccgccatgccaaagtggtggtaggagaataacataatatatatggaaaaaagagattactacgaagtactggaagtcgaaaagacagcatcggtagaagaaattaagaaagcctaccgcaaaaaagccattcaatatcatcctgacaagaacccgggtgacaaagtggcggaagaaaaattcaaagaagcggcagaagcctacgatgtactaagcaatgcggacaagcgtgcccgttatgaccagttcggtcatgccggaatgagtggtgctgccggaaacggtggaccgttcggtggtttcagcgagggcatgtctatggatgatatcttctctatgttcggagatattttcggtggacgtggcggtggcttcggaggcggattcagtggtttcggaggcggattcggcggtggaagttcacaacgcccgcgtttccgtggttcggatttgcgcgtaaaagtaaaactgaatctgaaagagatttctaccggagtagaaaagaaattcaaactgaaaaagtacgttacatgtgatcactgtcacggttcaggggctgagggtaacggcggttcggaaacctgctcgacctgtaaaggtagcggtacggtaatccgtaaccaacagacaattcttggtacgatgcagacacgtgccacctgtccgacttgtggcggtgaaggcaaaatcatcaagaataagtgtaaggtatgtgccggagaaggtatcgtttacggcgaagaagtggtaagcgtaaatattcctaaaggcgtaatggaaggcatgcagctttctatgagcggcaaaggaaatgccggaaaacacaacggcgttccgggcgacttactgattcttgtagaagaagaacaagacaaagaactgattcgcgacgaaaatgacttgatttacaacctgcttctcagcttcccgacagccgctttaggtggtgcggtagaaataccaaccattgacggaaaggtgaaagtaaagatcgaatcgggtacacagccgggcaaagtgctccgcctacgcggaaaaggtctgccaagtgtaaacggatacggtacgggagatttattggtaaatgtcagcgtatatgtaccggaagcacttaacaaggacgagaaaaaagcacttgaagaaatggaaagctcggataacttcaagcccaatacttcgattaaggaaaagattttcaagaagttcaagagtttgtttgactaaactgactttaaactgaaaatggattcatgtctgtatggttttgagggaaagttgacgagttaacaagttgacaaggaaacaaggttccatgcggcataggagcattgcgcagccccttgttcccttgtcaactcgttaactcgtttccttcctttctttcccgttttaaacgatactgtttttttataattgaaagattctttgcgttataaaagaaaaaacgtcaaaactaaccctattcatctggtagcatagtatagttttactatctttgccgacacttaattctatgagtagaataggtaacctgatgataattgatataactgatgagactaaaaacaattctgctaactacagtggctacaggcaccttgatgtgtgaacctgtgatggcgtatgctgtagattctacacccgattctatgggatggttccgaaagaaaaagaagagtgaaccaaacgacagtgttaaatccaaaaacgagtacgagaaactgaccggagacggtagcatcattcaccgtggtatgttcaatgtgtaccagaaaaagaacgactattattttgaggtaccggtgaacttactgggcagggatatgttggtagtgaacaaacttcaacgcgttccttccgaactgaacgaggccggagtgaaccgtggtacgaattatgaaaaccaaatggtacgcttcgaacaggataaggcgacgaataagttgcttatccgtcaaagccgccctctccccctcgctcctgccggagatgcaatcagccagtcagtacgtgacaactacatctcgccattgatagccggcttcaagattgaggcattcaataatgactctacgacgatggttatcaaggtgaatgatatttatgatggaacggagacgagtatcaacaacgtatttaccaatattaatctgggaacgtcttccatcaaaaacctttcacgtatcctttccatcaaagcattcgagaataatgtagtggccacgtccgaactgacaacgaaagtgaccgaaggaacaacttccgtctacgtaaccgttgaagttagttcttcactgatgctactgccggaaacacctatgaccggtagactggataatgctcgtgtagggtattttaccaatcctttgctcagttacagcgacggacaacaacgggtcagcaagcaacagttcattacccgctggcgtctggaacctaaaccggaagaccgcgaacgttatctgcgtggcgaattggtggaaccggctaaaccgattgtattttatatagaaaactctactccgtatcgttggcgtaagtatatcaaacaaggcattgaagactggcaggtggcatttgaacgtgccggattcaagaatgccattatcgccaaagaaatcaccgacagcatgacggtagatatggatgatgtgaattactccgtactgacctatgcagcctccaccaaagcaaacgctatgggaccgtctattctggacccccgatcaggggaaatcctggaagcggatatcatgtggtggcacaatgtactgaatatgcttcaggaatggatcaccgtacaaacaggtactgtacgtccggaagcccgtggcatcaagttatccgatgaactgatgggagatgccatgcgttttgtagcctgccacgaagtaggtcactctttaggattacgccacaatatgatgggatcatgggcattccccaccgattccctgcgctccaagtcattcaccgaccggatgaattctacctcttcttccatcatggattatgcccgtttcaactacgtggcacaacccggtgacggaataaccgctctttcaccgcatatcggtccttacgatatcttcgccatcgaatacggttaccgttggtatggaaaagaaaatccggaagaagaaaaggatttactttatgatttcctgagccgccataccgaccgtctgtataaatacagcgaagcgcaggatgtgcgtgatgccgtagatccccgtgcacagaacgaagatctgggtgatgatgctgtacgttcttcccaatatggtattgcaaacctgaagcggatcgttcccgaaattataaaatggacgacgaccggagaaaaaggacagacttatgaagaagcttcccgcttatactatgccgtaatcaatcaatggaataattatctgtaccatgtactcgccaacatcggtggtatctatatagaaaatacaattgtgggtgacggacagaagacttatacttttgtagaaaaagaaaagcaacaagctgccctgaagttcttactggatgaggtactgacttatccgaagtggttattcgacacagaagtaggtgaatatacctatctgcttcgtaacactccgctgggtgtggtagaaaatgcaccgacgcagatactgaagaatgcccagtcctatattctgtgggatcttttatccaacaaccgcctggtacgtatgcttgaaaacgaagcggtaaatggcaaaaaggcttttactgccgtagaactgatggatggtttacatcgcagcatttttgccacaacagaacggggagcattgcctgacgtcatgacacgcaccttgcagaaaaacttcctggatgccttgattacggccgctgccgaaagcgaaggggtaaaaatcaacaagaagcttatggacaatcatttcctgctggataaccagttaccgctttgcagttgtgatgaacatgctcatcgctcgttggatgcagaccggatgggtgcccgtcgcgaattgaacttctacggctctcaactgaaccgcatctcagatgccatttccgtgaagcgaggtgaactgttacggatcaaggatctgcttcaaagtcgcctgggaacatcggatgtggcaaccaaatatcattataaagacatgattctccgtattaacacggcattagggctttaagttagcgcgcaaagcacgctaaagggtgataaggtggtaatgtgataaagtaccaccctatcacattaccactttatcacactattaactcgttttcaatttaagtattaattttattattttaacggatgaaaagacgcttatctgtcgcattcctattcctaataggaacgttcacgtacgcccttgccgcaaaccggcaggtagagggtgtagtcatctcttctgaggataatttgcctctcatcggcgcttctgtctatgtgacagccgatgatttgaagaaagttgggaataatcagtccaccattggtgtcattactaatattgacggtcaattctccatctccattccggagggagttacccgtttttattgtagttacgtcggctatgatgtgctggaagtaaagctcataccgggcaagaataaatatgatattactctccaaccttccgcccacatgctcgatgcggtagttgtgacgggatatcagactgtggaacgccgtaagttgacggccgccgtatcgaagatcgatatctcggatcagatgatgggtgcaaccaagagtatagaccaagcattggccggacagattgccggactttccgtaagcaacatttccggtactccgggtgctcctgccaaaatccgtattcgcggtacatcctccctgaatggtacgcaagaccctttgtgggtgctggacggtattccattggaaggaacgaacattcccaatatggaagtattgaaagacatcgataacataggtcaaaccgctattgccggtctgaatcctgccgacatcgataatatcaccgttctgaaagacgctgccgcaactgccatttacggtgcccgtgctgccaatggtgtaatcgtgattactaccaagaaaggtaaagtgggcaaaccggttattaacttctccactaaactgacctattctccgaagttgaatatagaccgtttgaacctgttgaactcagaagagaaggtaggtctggaacttgacttactggcatccggttatccatacagggaaaccaaaggcgaggtataccgcattatttccgggttgggagaactcaacaatttcaaagacggagggtggaacgccttgtcatccagcgctcaaagtgcaataaataaactgaaggcaacaaacacagactggagtgatatcctcttccgcgacgcattcacacaagagtataacctgtctctttccggtggtagtgaaaaggcaacttactatacttctttcggatatatgaaagagaatggtaacgttccgaatgtatctgccgaacgtctgaacttagtgatgaagaccagttataaagtgaacagcattctgaaagtaggtgcttctatgtttgccaaccgccgtaagaattcaagttatctgccggattcggatggtttaaccaacccgatattctattctcgcctggctaacccttacttcacgccatacaacgaacacggtaattacaactacgacattgacgtggagaatgatgtggatatggactttggattcaacccttttgaagaactaaaaaacaccaccaacgaaaccactatcaatggtctctcatctatttttgatgcagagttacgttttgacgaccggttcaagtttaccacccagctcggtttacaacttgataaaacatccatcgagaagattgccgatgaagaatcttttgccatgcgtaaagaaaagaagaaccatcgcagcaatggcgtaacttacctacccgccggaggatttcacaaggccaatgaaaattcattgtcccaactcacttggaaagcgatgggagaatatcgcgatacctacaacgacatccatgagttcgaagcaatggtaggaacggaaatccggaagacatgggaagaaaagctatacagtgccggttatggatttgaccggaagacgctgacaacaaagccgatcatcttcccggaagaaagtcaggcattcaaattgcatgagaaggctcatgtggagaatgcatacgtgtccgctttctcaaccctgtcctattctttactgaaccgctatacattgggaggaagtatccgtttcgatggttccgaccttttcggtgtagacaaaaagtaccgttatctgccattatattcagtcagtggtttgtggcgcatttcccaagaaccttttatggcaagtgccaaatggatagacaacctggtagtccgtgcatcatacggtttgcagggaaacattgacaagaacacctctcctttccttttgggaaattacagaattgaaaatatcctgccgggaggttcagaagatatgattgacgtttccggtgcaccgaacaaaaagctgcgctgggagaaaacacattccgtaaatgcaggatttgattttgctgtattgaatcaggctatcaacctgagtgtggactactactacagaaaaggtgtagatttgatcggaacccagatgttaccgctggaaacaggtttcgaaatgttgaccgtcaactgggccagcatgcgaaatcaaggtgtcgaggtcgctctcagcacacgcaatgtccacaccaagaattttatgtggaccactaacttcaacttcgcatacaataacaataaggtactgaaagaagcactgcgtgaagatgccttagaaccgggtcgtgaaggatatcccgcgggagccttgtttgccctgaaaacagccgggctggatgaagaaggttatccgatgttccaggacaaagacggaaaagccgtatcggccatggaattctttaaacttcaggaatggggatttggagcaaccgacctgacagcccgcgagcgtcgtgaactttacacgtatgttggtactgctgactgcccttatacaggcggtttcaataatactttcacctacaaagcttttgaactgggtgtcaacttcagcttcgacttcggtggaaaggtacgcagtcaacccacctactctatcgttgatttcgacaaaggacgcaacacgaaccgtgatatcctgaatcgttggactccggaaaatacggaaacgatcttcccggttctgctgagtcagaacgaacgtctggacgaatatatgtggtattcaaatcagaatgaaatataccgtaacctggatatttggatcagagacctgaactatgtgagactacaaaatatccggttgggctatacattgcctactaacttcacccgcacgttgggaatgacttccgccacagttgccatagagggacgcaacttattggtattcggctcaagctacaaaaattatctcgatccggaaaccatgtccaatgcttatgcaacaccggctcccaagtctgtgaccttaagcctgaacttgattttttaattttatagagagtaacaacaatgagaaagatatatatcatgttattgatgagcagtgtagtattgctgactgcttgcgatatgttggatatccagcctacgggaaaagtgatcccccagaccttagctgagtacagagcgctgattgccacagcatataaaaacgttcccgatgccagaggactcgcctgcttccgttctgatgaactgtatgtaaaagatgatagttgggaacaggaccgttatggtaaaatagaatgttgggatgacttcagtgctccgggacagactacttcctttgaatggaagaatttctatagcatcatgttcaccgcaaactataccatagaagagcgaaactcaatcaatgaaggaagcgaagaggacatcgaccaattgatcggtgaatgttatctgctccgtgcatacatgcatttcctgttggtaaatctctacggacagccttatacccgtccgggagcgttagaaacgaaagcagtgccactgaagctgaacagcgatatcaacgaaattctgaagaaaaataccgttgcacagatttacgaggcggtactctcagatatcaatgaagctgaaaaactgattaataaagaatcctgggaacagaagttttcttatcgtttcacaaccctatctgtaaaagctctgcgcgcccgtgtatatttgtatatggggcaatgggagaatgcgtataaagccgccgaagctgttcttacagaaaagaatacactggaagatttcaatgacgaagcgttcattctgccaaacaactaccaatccgtagagaatattacagccttggaacgcggcatgagctccaactacactcaagcagcggttctgtccgaagctttagcgtcttcatacggagaaggagatttgcgtctggatgcttacttcaaaccgactgacaagaacggctaccgtttcagccagaagagtggaaaagatgatttccgttgttctttccgtgtaggcgaaatgtatctgaattcggcagaagcagcagcacaatcggacaaactgtcccaggcacgcatccgactgctggagctaatgcagaaacgctataccccagaagcttatgcagctaaagcaactgcggtcaacgcaatgaataaagaagccttgatacaagagattctgaatgagcgtgcccgtgaactcgctttcgaaggtcatcgttggttcgacttacgccgtactacccgacctcgtattgagaaagttctcaaaggaggaacctatgtgctggaacaggatgaccaacgctatacgattcagattccgagagaagcgatagcggctaatccggagttgtctaattaatacaaagagaggggtgcactgaaatgtacccctctcttttattctgatatttacgttctaatagttattccgtgaacttggctatgatctccttcagttggtcaggataatcagtagtaatgagatcaacgcccatagccatgaaatccagcatctcttgcggagagttaacggtccagacattgactgtcatgcctttttcatgtgcattcttaatccattccggatgcgcccttaaactattcatagaataatctatgcaattaattccatcttccatactctgcgggtccttgtcaccgttcaagtatccgataactgttccggaaggaatactctgattcaatttttgacatacataataactgaatgcgatataatcgatctgatcgcctactcccttttcactgaccatttcagttacagtttttacaattctgtcatggcttgcattagaactgtgagattttatttctataatcaatttcatttctgaatttgccttcagttgttccagatacgcttcaagtgtcggtatcttttcaccattggcaagttgctcattccggatatctgcataattgacatcttctatctttttcccattaatagtgggatcatgatgacagactacaacatcgtctttcgtgatatagaaatcggtctccgaaccatatacacccaatttctgagcggcaataaacgatgcaagtgagttttccgaagctttattgtccgcagtatggaatccacgatgcgcaatcactttcggaacgacaaatccgaccggattatcagtagaggtaagtgtagccatccctatcgggtattgggcactttcacgcatcaataccaacctgtactttccggaaacgaagccggaaggtatttcagcatcaatataacggtcggtggcagttgtattgcagataaagctctcctttgcactatccaacgattctatcttgaccttgtctcccgtcttgaaaccttttcccactattctgtatttgctacccgctttgacttcaaagttagcgaaaaacatcaagtccgatatgtcaatggtattttgtgattgtttatctttcactttttcccatagtccggtgacatcctctgctgaaagtggatcatcatagattcgtgacaaaattatttcacctctccaggctgcttcagcagaaccggccgctgcatctccaccgataccaaaccattggcaagtagcaggggtagggaatttaaagtctcccttggcatcaattgtacctttcagttcaccattaacatagacagaagctttctgtgctcccttatcccatacacctaccacatggtagtatttgccccgttcgggaaccactccactacgattccattgccatccaccggaagtcaggttggggagaaacgtaatttctcctttttctttagccagtaagaatcctgtaccaccggcttgcatggaactgaacatcttgatttcagtgccagtctgaggctcagagtcatacatgaacagggcttccaaagtgtgtccgtctgccaatgcatccttaaatgcctgattactttggtaatctaccttatagtagccagaactaatagccgtgcccggtgtatgattgaagcgagccacgtaacagccatagctatcattatagtaagtcatcaaactggatccttcaaatgtctgcacagtgtgtttcatcggagatgcatcagtagctgtcccatcattattgaatataatatccagaagaagagttttctctttaatgggtaagtcttgcggtgcctgccgtacagtcatagaatggatttttttgtcattcatatagaaatccactatactttcgcgcgtttcagtcgtttcattggcttcagccgagaaagtaacggagccgtcattttctccacttgccggagtgatggaaagccagcctgccgtttgcggtttgtctattttccaagaggcattcgatttaacggaaatcgtttctgaatgtttatccggccccatatcaaatgtagtaggattgctttcaccggagatctcaattgtgaatgatgcttctgctgtatcttctgagctatcacatgcatagccaatgaatgtcagcaaaaaaaataaaagtaaattctttttcataatattaattattaattagtagttggttaataatcgttcaacattacatgataatatgattttcatcgtttcggtatgcgttgtatggcagtgtttatagtcgttacttcacaggagtaattttcacaaaagaaactccgtgatagggaacctgtgtccggaactccccattgtattcccctaaatctttttgccgccacagatcgcgaacagacactttgcctgtaattcccagttgcttgaaagctaattcaaaatcatacgtcttcatctggatagtttcagcctcatcctgatcccacaggataaaataaggatctatctggaagaatcctactgcatacgagccatcatatagtttcttgtaccatatctgcccattgtcagtcagcaattttgtggccggtgctgccaacgggtcctgattcacagcaatcacttcattatttgtcagtaaactcaatgtaaaatcatctatatcggacatatcacaaccgatcaataacggagcggagagaatgcaccatagagagatatgggaatattgttcatcaggagtcagagccgattcatgaaccttctctctccaagccttacccagttttcctaccaccagcatatcgggatcattatagttccccggtgtagtagcctgagcacaaacatcctgaaaacaaccaatggctgtcacaacattccattcatcggtaatgtcacgggtggtgcgccacagttcacctcctgcttcccttgcccagttccagacattgggagcaccatatcccacacaatagacaatatcccgatccactttatccaatgcatcacgcataacaatatagggttcccggattgttttctcttcagaatccttctgaaccgcatgatagccgcaatgatcatatttgagataatctactccccatctgccccaagtccgtgcatctatttcctcatgctgataactgcccagataatcaccacatgttgtcggtcccggtgaagaataaataccgaatttcaatcccagggaatgaatataatcagccaggcctttaaaatcagggaatttctcattagagagcagttctccctgcttggtgcgttcggcagcttcccagccgtcatcaatgttcacatacgtccatccgtatgcatgcaacttttcattcatcatgcgggcagcctcgcgcactttctcatcatctacagaaagtccccagcaattccaactgttccatcccatcggaggagtcagagcaatccggtctcctattttcaaggtaatttctttttcggctacacctttttcgttcatggctttcagaagcactttgaaatctcctctaagttcggtctttcccgtaataaagccggtggaagtatctaatttcagtccggcagggagtcctgacgcttcaaaagtcataggccggttaccacttgccataatcgtcatcaggaacggatttcccggacgggcaccatataccagaggattattaatccgtggagtttccggagcttccggtgtcagaatgtacttctccttagctacaggcttcggccaggcaggtatcggggtaatatctccacgagtcacaaacttcacattcaaccagtcggcatggtcgtacataatgccatcgccacattcttccaccaatagcaacactttatcaatgccggagaggttgacattgaactcttttacgggatcgcccttctgcatcacaccgcttttccaaagttcttttttatctccgattatcttgaactgcaatttaccggcatacaggttgttatcatcggctccaaccaagccactcactgaaacagctttaccacccaaatcatacagcatacggctgatggaatgagctccgatcccccgttcatacacaacaccatttaccgtaagcggagtccataccacagactgatttatctgcggtattccccaatcctgcacaaaacaggagtccttataaacttcatccaaccagagttcacgcttcggcccgttattacaagaggaaacaaaccacaagtttgccaaaagagccaatgcgataattacttttgttccaaatttcatagtactttgctttttatttcaggaccggattaataaacaactcatctatatatacctgttgcggagcttcaaaagccacctttacatagcgtacattttcatccagttggtcaaacaatatgctttcaatccaggcatcatgcttgttgttcgggaaataaggggcatcttttatggaagacagattatactctttaccgtctattgaagtatacagatatgtcttcatcggcatacctatcttttccggattataattcagcatacgcaacatagctttctgaacacgggttttcttttgcagatccactacaaattcatgatagccagcctcaaacttcacccagcgggcatccttactgtcctcttcagcaaccttaccatccagtaacggttgcaaaccggcctttccaagcatcatttccggagtcgccccattgactaatttctccataaaagccgcttccatcagtttccaatattcctttccgttcttccagtccatatagtcagtatacactttgttcgaccagacaggttgccccagttggtactttgactcaggatcctcaatgataccgtagaacataaatgaaatgatcttatcaacccccgccgcagatgctgcaacctgctgggacagcagcctcggataggcagccggaatcaaggcagaagtacggtcattggtaccctcttcccaagtgaaagtctcacaatttgcccacatttcaatattcaggcggttatgaatatcacgcaatctctgccagttcttcttcagacggggaagtgtgaactgatcgcgtacacaccccacttcatcctgataggcaatgatatccacttttagtttttgcatttgcttctcatattccggattatcaaattctgacaatccgattccataaggagaaatcagggttttcttgcccggagccaattttttagccttctctgataaagtatttaccgactgcaccgcatgctccgcaaaaataggacacagacaatcttctaccggtaaataccagccataaaaggccttgtggtttttataaagggatgccaactcttccataatccggagttgccgttccttaattgccggatcaagcagattatcatcctgatcctttgcccagccactactcatgaaaatcttcatattatgtttggccgcttcatccagaatagcatccacaggacttttcttatccttattataccaccaaggcattatttgcgaaggataataagatttcccttcattggcaacctccattaataccagatattcgatacccatagccgacaattcacgtactttagcctcccacaatttcgggtccatattatcgaagctctgaggattcgtatatttattacgtacatccttgtatgccaggttgatccagctacctgtaacaggtttcacacccaaagccgactcggtggttttctcttttttctgcttgccggaagcggcattatccgcacccaccgtaactatcggcagcgtaaccaataaaactgacagagcaaatcctatcatttgaaatttcttcttcatagtacacatttataaatctataattaagttatcaacttcctccagacactataatcagtaccaaaccggagataaaaagaataagcatcagcgtaagcaacagattagtagactttgaagcccccttaaactctttccagatgaagaggccccataaggcggctaccatcgttgccccttgccccagcgcataggaaatagccgcaccggcttttccggcagcgatatagctgcaagcagttcccaatgcccagattataccgcccaacacacccaccagatgcgtattgaagtttcctttgaaatactggctgtaggacacaggttctcccataaaaggtttcttcatcaccagtgtattgaacaggaaattactgataaagatacctattgcaaacacgaacaaagcagaataaggagtcatcatgcctgctgtgggtacttccagattttccaagtccatagctgccgccacaaaacggtaaaagaatgccatcaggataccggcgcatacagcaaccaggatacctttcttacgggtgctctgaccggatgctttggaaacttttccggatgctattccattaaagataatagccagcacaatcaggaaaacgcccaggaaaagaatgacgggatctcccttcggaacactgaaataattgacaaatacacccagcaccaatgccagccccacccctacaggaaaagcaaccgacatccctgccaatgacatagaagccgatagcagaatattagaagcattgaatatcacaccacccaggaaagcactccagaagttctccggactcacttgcaacaagtcctgtataaatcctcgcccggcctctcccgtgctgcctaaagtcaatccccagatcagagagaaaagaacgatgccaatcacgtaatcccaatagaacaactcgtagcgccaggtctttgccgccaacttctgagtatttccccacgatccccagcaaagcatcgtaacccaacacaacgccactgccaatccgtaactttcaactataaacataatcggtatttttagaggttaatttattcattcaggtccagttctttacgatgaggaatagaagactgcgctcccattcttgtcacggcaacagatgaagctttagaagccattacagcagcttgcctcaagttcatgccttctgccagtcccacacataaagcaccattgaaagtatcgccggcagccgttgtatcaacaggttccactttaaaagcatccacgcaatatgaagtatcgccttctctcaccaaacatcccttcgaacccaaggttacaattatattctgtactcccatcgcactgatttcttttgcaacccgttccgcatcagcatcattcacaatctttataccggtaagcatttcggcttcaatccggttgggagtaatcataaacaggtatctgagtaactctttcggaaggctccgggcaggggccggattcaagactaccttcacccctttttcaaaagctctcctggcagcatattccaccgtttgaatcggaatttccagttgcatcaacaagatgtctccttcgcacatttcctccacaactttatccacatcctgctcgttcagcaacatattggctccggaagctaccactatactattctccgcatgatcgtccacactgatcaaagcaactccggaagcagagttttcatcaagagtgatatattttgtatctattccctctttcttgaaataatccactgactgctgtcccagtatatcattccccaacttcgctacaaagatcagattaccacccaaccttttcactgcaactgcctgattggctcctttaccgccctggttcataaagaattcaccacccagaatggtttcaccgggagccggcagatgagaggtcctcaccaccatatctatattggaactgccaattactataattttcttcatggtactatattttaaataaataaatgcatgtatgtatcaccgtgacagaacgaacgtaggagcaacgccccctgcatccgatactgctacacgggctgttatcaccttctcatctcccggaaagagcgtaatgaagttatcactccagaacaccggattaatctcctctccccgggcatccttcaaagtcaggtggttgaagtgtgacaatcgggcagattcgttcttcaaacaaatagaaaagacatattctccttcctctttgcttactttaacctctttcttcaattccggtttttccatagaagtaaaccagaaaaagtccatgtgctgtgagtagaaccaatataaattctccgacaacagctttcctgctttatcgtgaagttccagcttcacaaagtagttataagaatacttgccatgctgaggcaccgtaataatctctttatagcaatcgggagaaaccgtcagttgctgagaatgttgccaagccaccctcatatcattattgattactttcgccgtcacctttacatcatccagcacccggtgggacgcattaatgaccgatatcttaaaatcattggcattcaactgtacgtgtaccggctccatcgctttccttgcaaaatagtaagaagcgttcggcgccagataccagtcataaatctgccagcacacatcgggccagcaggaattaatcttccagatcatcacgccggaagttatatcccacatccgatgattggctgcctcaaacatagcacgataaccgtcagcactcaggaactgggcattatcggcatattctttcgccgtcttcggatcaccaaacatcgtgcggatggcattgtcataagaacggtagcaataattactcacatcccaggcgccatgttccgcccaaatgctatccaacgggaagatggggctgtttacattggctgtactctctgcggtaggaataaatttccggagactgttgtacatcggcaccgaaggcatacccaattcattgcggaacatctgcaaataaacctcacgtactttatcgaagaagtaagaggaaggcgcccagttatagtcgggtgcaccgtcatccgtggttccggtgggcaggtcttccttcagatagggagtcagagcatccacatcccagtggtaactggtggtagggatgtatatacgtgtagtatcaaggctcttcactttctctttcgtcagcctgtataagttttcattcatcaatacttcattgacgcctacccacgaaataatggaagggtggttacgataccgaagcatcatatcttccacacaagcaatcgccagattatgatccaagggattgttttcggtttcagtgccgggagtcatgcgatagcattgatagaaaacatgccaccacataaggccgtacttatcaaaactctcaaaccacgtttcggaaggagaaggcatatcttcactgcctatcaggttgatgttagcctccgccatcaggcgtgcctcatcataaatacgcttatccgattcctccagcagaatgtccggctgaatccagccgcctttgcagaacactcttttgccattcacatagtagacacggccgtactcaacctcagctttgtccccgtcaacctcaactctgttcagcccaacctcaacttcacggatgccaaagtcgaactcttttgtatcggatacttttccacctgtattatatgacaacttgatgtgatgcagatattgttcaccatatccgttgggataccacaggtagggattctttatcaacaaggaaggaaaatcttcggaagtcagttccacgactttcttttcacctgcacccaggctaactttctttgtaatctttataggcttcagataaccttccatgtgtttggtataggtggggaacttcacatcgtttaccagggtaatcaaagcattcacttttccctctatcgcttttcctgaggtattctttacctccagtttgatgttcacatccgccagcgaagtatcctgtttgggtaaagtagtaacaatgaaaggattctcgatcacgacttcatcggtagcctctatcgttaccttctgatagatacccatattccggtctcttaccaccggagcacagtcccatccaccggatatctttaaagtctcatctttaaagatgtcataagaatgtccacgcacagggccgaacactttcagctgggtacccggagtaggaacacccggatgatccacctgatatatcttcaccgcaacacaattgttcgctccgggaagggcatagtccgtaatatcgagcttgaaacggcggaacattcccacaatatcatttttatcggctacaagccggccgttaacccagacgtccgcccgatagttaatgccgtaaagggtcagccatactttcttacctttataagatttgggcagagtgatttccgtacgataccaataagggtcctgccaagggtttcttccactcttcagatagttatatttagccagatccatccgggcattgaactcgtccgaaacatcggggattaaataattattgagtccgatacgcgggtcgggatatacattctctttcaccaaagcattcagcacagtagtgggaaccgtagcctgataccacccggttgttggataggatggttgcgaaaccttggcatccgcatcggctatctcggatgagtttataattctccaatgctccagttccagagattgggctttcagcaacatgacattgcaaagtagcaggataaataatatgtttctcataatttctgttattctattgcggtaacctttgcaccatgcgtaaaactaccgggcactaacttcatttcctccgcccacgcatttaccatcagctgcacgggaataatggatggaatggcaaataagtcagaacgctcacaacgaacgtgtacttccagcaagtccggactttcaatgccggaagccgcatccgatatgagaatcactttacctttaaaactcaacacatcctccacaagtctgatactcggatgataagcgccggattgtgaatgagcataaacaatgcagataaaatcaggtcctaccatttccaagggaccgtgccgaaactccccgcccaataaggcggaagagggaattttggtggcttccataaacatcagagcagtttgggcaacggcagcgaaaaccgttcccctgcctatcacttgcacaaacgaatgtcccttcaggaaagtgagcgaacgggataaatacgtatctctttccgccagctgacgttcaacttcacggattattccgtctaaagcctccccattcacttcatgcctcttcagggattctgcgagcagataaaccgccagataggttgtaataaaagttttcgtggaggtcatctcttctttgcctgccttgcacagcaggcaatgagtagccattacggccaaagaacttccggattcgttcgtgattccgatcaccgttattggcaaccgacgctgctttttaagcaattcaatcacttcgtagctttcacccgactgtgaaacggcaatcagcaaagtgcgttccgtcaacgaaggagattgaaaatgaagcaattctccggcattaatcgcggaagcgggtatgggagcagatgagatcattgtcgcagctgcctgcgatataaagtaggaacttcccatgccggtaaatacgatcctgtcatattcaccggatttccataaggcacagacagtcttcaagcttttcttcccttcttccgaacggtaatagcagaaagtctgtttcaatgcttccggttgttcctgtatttcttctaaaaacttattcataataaagtatttcccgtttactgattgagcataccacgagtttctttcagtttcaccgggtgaaactgagagtttcatgctttggaaccaggagtttcatcccttgaaacaaagggtttcattgcttgaaactctttgttccatccgatgaaactttgcttttaatagggttgcttattttccttcaaggtatttcttatacccttcataggtatctgttcccggtttgaaggtagcccaactgaaattcgtaatatgatcagtaaacattccggctactctcagctgttcctccagttcggtccagggtttggtccgcatggtaattctcgggcaccagcactctttgaacgactctatatctactccgaaaatcactccgttagcatcgcaggctttctttatttcggcaaaccagttgggcaggtccacatcaaaatctaccagacaacgtccgcctatatcctgaagataaagcacatctatatcgggagtctgggcaaagatcttaccaaaccattttccgcagaggtcagcgggcattcccctccacaaagcaggagctatgcagacttctttcggagacttcgacttcacataagccgccactgtctgcaaataattagccagcatagacaaagcaggttcctgctgccagcctaccggatacgaaccgtcatgaaattcttcggttatgtaccatcccgccagactgggatgattcccccaaagggcaaacagttcatcgaatacttgtttattacgctccaccagaaattcatattgttccggttttgtggtatcttccttactgtaatcaccgggatatagtccgacaatcagcttcatcccgttacgctcggcagcatcgaacattcggttcatgatatcatattgcttggtcacccacggcagatttgtcggcgaatagaaagaagatttttcattcgtgcggtcattgaaaccttcggcatactggataatccaagtgtcaatgcccacttcacggcttgctttgaattcttcatcccagttggtctctttatagacgccattcagctgaatgaaaacactggagaacttgggagttcccttgaattcaggagtataagaggtcagttgctccagattgtcgatgcaaaactcacctatacatgtgctgttatcatcgttcgtgatttcaagacgataaccttcaaggcggttcagaaccagtttgttttcgcccagatcacgccctttggcaaaagtaaaggcctcataaggcatcactacacgtgtccattcttccttggtcagtacatccttatccacatactcgaagaactgccagcgatctttctcatgaagcgcatcctgcgtaaactgatccacatcctgaataagcatgaaacggaatgtacctttattattcttattacctttcacccagatggaaagtcccaacggatggaaagacaaatcactgcgatagtctcccccactctgctggatatatacggattcggttccggacgcattgccggagaaagagtatttaagctcgaagcttcccgttccctccacacagtcatcgctgataaaacggtctatcgaggtttgcggtgactcgggaagtcctttcatttcgtacaccacacagctcatctcgtcgtaagcattcaaagtctttaccgcacgtgctttcgctactatctcctctgctgtgggggcctgcttactaccgcaagccgccaacacaagcagcagagaagaaatactgattagggatagtatatttttcatatttatttcgttgtatagattattacttcggttatccatattttcccgttcgatacgggatttttccatttaaaagttacagtgtgcttccctacgggacggtcatagcagaagaacaattcacacttccggtgattgatatattggggcaaggcggttgtttcatagaactgtccatcgatatatacatccatctccgccgtatagtccgccggaagcccgcctgccacatatccttttacgaccaatccggttccttcgaaagagaagggatttacatcatctatggatttctctattgtaagtttatcgctcactttcagattctcaaaagctacttccaaagcaacaggtctgatgttctcccgtctgattatgaagtctgttcctaccttcccgtttccatgcttctgcaacatctcgctggcatgtctgtacgtcatgtcataggctttattcagactgatatccgtattggagaaaggtatgtcttctacttcatacaaagcttctttccaggattcggggatgttgctgtatcctatcatggttcccagaatacctgcggctgaagccggattacaatcagagtcctgaccggcacgcgtggcgatatctatggtctttgtgaaatccccctgtccgtaaagcaagcccaggagtatataggcaccgtttatcttcgtaccgatattaaaggaattatgaatgccttcgggacagctgatttcttcgctccacttgttctgcaactcgaaccaggttcgtttccagtctttcggatatttcctgtgccagcgaattacgtccgacatacacttgtggaaatcgctttcttccggtatcaccttcagcgcttcttttacgatatattctatatcattgctgacataagccagagagtacatggctgccacataaactccgccataccatccttcaccataggacatgatatgccccaccctatcgcagatttcagcggcctgattaggcattcccggtgacataatcccggcaaaatccgcttcaatctggaagtcgatgcaatgtgcatgagggttattcttccagtaaccgctctggggtgctttcactccctgcaacagattgtagcgggctacctggttggcatgccacaacggatattctgtccgtccgaaagccgtcgcaaaagaatcaaccggagcatctagcccgcatctttcgaagacttccacaaaagtcagatccacataaacatcatcatacaaaccgggaaaggtatcataccaattcttgaccgtatgcttatcccagggaatgggaatataatcctgaatgatagttcccaggaatttaaactcagtaggtcctccgtaactgcatcccaaggtctgacccgcccaggcacctttcactttatcacgcaggctctgctcggacagaaccacttctttctttcctttatgaacggcggcagccagatcggctataaagaagaaagccatcaggagccatattatatttcttttcgacatactcatttcttgtttttatactggttgtaccacgcactgtattgttcatacagacgcagggaatccggatgtccggcaataatatcagtaccgggcttattcatgataccgatatactgataacagagaatcttatctacaaacggagagatattctccatctgcctgataatgcgtttgttgaagtcggcaggcaacagattgcctccgtccccatcttcaaaatagaacagttccatatcagcccatagtcttgctctggaagctttctcatgagccttgtacaagatttcatagaatctggcggaatcttccaatgcggtatggttcactcccactccatcctggtaagcaatgatatcgatattcattttctctaactggcggacaaaataatcatcgaaacgtgcttctttaatgaagtacggggctatcagattgacacagttcggagttaacctttgggcaaagtccgcacattcattgacgtacttcacgcactcatcaatgaaatagggttgcaactgggcttcattcgggaaataccacccgtagaaactttcgtggtgggaatatttttgagctacctcttccatagaacgaaaacgtaacttctgcacgcctttgtctatcatcatggtataagcatccaactctccccagaaatcattgctcacaaagaacttgatgccacattcatcggcggcagcaagtaccgcctccaaaggatcttcacatcccatcgggatttgaggagctatctgtgaaggatagaacggctttccatccagagctacacccatcataaccagatactccattccaatctcacgcatttcgaaaatcttccgccgccactggtcagcagtaaaatgcgtcaatgctttattccagtttcccccttccgaagccgaatgccggaactcaaaccaggaaccggaaataggtttcagctttttgcatgaagatggcactgcaacggcagaagagtttgcacgtatagattgaggcatggctagcatggcaacgccccctaatcccaggtattttataaagtcacgtcttcgcatctcttatttttttcaggtttactcaatcactctatccgtcagatcccagcccataatcgtagagatataaggaattatccacatcgccattttcttatgtcccgaatatccgggatgccatgcagcccccaggtcggtagtccggttatagagattcttatccagtttcagtagaaagactttcggatcattcacttcgtttattatcgcttcataataactgaatacaggggcctgcatagctacagggtaaatgcacaatatgggaatatctccataatgctcacgcagttgtgcaagaatctgtttgtacgctttggtgaattcgcttttgtaaggatgaggctccgttgagaaatcattggaacctaaattgataactaccagatccggacgatattccttaaaattccatttatgggtaaggtcttcgtcaaaggtattcagcatccggtctttcatcgtaaccttcgacacgcgtaccgaatcaccataattgcgagcggctcctctaccggaatgggcaatcagtgtatagtccgcatcataataacgggctaccatagaggcaaatgtgagattacaattttccgtctctaccaggaaaggttcatcgcgatgtttcccgtctgtgccatatccgcaggtgagtgagtttccgataaactcgatatgccgtgtgcgcactgccggctcttccgccaggcgtcccgaaccggacaagacaaactgatggacagttgtcttgccgaattcgccttcggaacgtttctgtatcttcaaactatgaatgcgcttgtctatgcccgataccagatgaatcaatgtatccgttccgcatactttcacgactttatgcagtttgccatcaacaaatacattataatagctcgttcctgtttcagaaactttcactgacagctttccaccagtaaagcgggtttccagataagtgcctacccagtcgaaagctaccgaaccatcgggggaaaccaacgttctgccggtatatcgcacggcaggatcattccctttgtaaacagttccatttttttgagctttcagttccgcagagcaacttatccctatcaggataaacagatatagacaataacgtttcatcattttctttatttacgtttcttatttttagctttcaattctttcaggtatttcatgtatccgttgaacaagtcgatagtacgtgcttcgcccacacggatagacatcttcggatcattgaatacacccgggaactgatagcaaagaatcttctcgaagttatcaaacagattcaagtcacggatgatttcttctaccggacggggatagagggagttatccggattgaacaggaatacttccaggtcgaaccataaatgagctttagcctcatcacaaactttctgcaacatattagccgcttccttaccggtcagatcaccgtccggcatacgggcaaatccgaatgggcacaagatatccagatgctccataagtgccggatatgtatccattccgttgggaacttcaaaactgttggtagccagcattatcggtttgtccggtgcaagtgcgttacagtaagccttaaactctttgaagaaattcacgatatcgtcttttctctttttacgcatctcggggcgttgttcccagttatccagaccgccgccactctcttcggatacatagaaggcataaaaggattcgtggtgaccatacatatcccacagttctttagctacccgtttgtgccattccaaagattcgggggtaaagtcgaaccaggcaaacatacccactcccatcagtacattcatgccctgtttatcggcttccgtcaggatggcttcaatcgggtctttggctgtaagttccatacggccgggatacagtttggaaggatagaaggctttacctacatagttatccacattggtagtatgtttgcctacatattcttcattgcggaaaacttcctgaatgaccaccatattcatttccagcttattcatggaacggatcaactctctccattgatcgtcggtcatcttcttgatatcctgattccaatgttttccttcgatttcgctccagtgatagatgcccgtccaggcaccggatatctgttggatagagcgaatatccgattcaatcacttctatatcttttgtcttccgataggccttgccttcattagccactttgaagatcactttattcttccccacccggtccttggtaggtataaccaccttaaccgtttcggcctttccggcagggattgtcacaaccgtttcgtataacagtgcatctttattctctttattccaatacaaagctacctgataagtctgttgtgaagcactttcgttcacaataccaccgcggatatccagatcgaccttattagtgatttttcccggaggtattaaagttaagctcactttattctctgcttgcaaacttaccagactgaacaaagaaaaaagaagtaaaaaagtacgtttcataatcatctttttaaattagaattagttaaaactacccggataagaaatccgtgattcaatctcgccaccggccagacgaatataggaatcgaacttacgctctccctcctgcaatatgattacacgggcaccgttagccaaattattgtacaccgtatttccaccagaataacgcccgtaggccaataacacctccttatacataactgcataatcattgttatgatcgtgaccgacaaatgtccccataacatctccacactccttgatagaagtaaacagacctgaattagtggtagggcaagcaactccttcacctctcactccaaacaatctgttcttatcttccatcacagcatctttgtattcgggtatgggaatgtggaagaaagccaatgcaggaagagggatatcattattctgcttcgtaaactccttgctttgatttctgtaccaggcaatctggtcaaacttaatccagtcatatccgggtactgactttatctgcgtgtatgcatgagaatcaatgcaatatagaagagccgcatttttattcttatcctttgacgacttcaccgtcaaaacataatcaggagcaacttcgccctcacgtgcaggcatcatactgcctttcttttgagagagataatcatacagttccgcccgggtgcgatcatactcatcatcatgattgccaaatatcactccaaacggaatattgcgtctgatgcaaggctccaaaacaatgtccagccccttaaaagcttcattagaaacaaccacatctcccgtaaacatgacgaaatcaggacgttcggcatccaatacttcgtttatacgatccagagatatttgtgaattcgcctgatcatcatatttataatgaacatccgtaaactgtacaatcttaaacttaccgtcacgattgaacttcaatacttctttctggcccaaaaccgtaagagcattgaataataccattaagcataaagcaattttcttacacatcatatcttttattttaaactgtctataatcttcaataataattcaggttcatctgtagtaatatagtctactcccaacaagtaatattgttgtagctcttccgcattattcaccgtccagacattggtaagcaaaccggcttccctggctttttgggtcagattcttatcctgcctgtatgcatagtaagaataatcaattcctgagatgcggtcgttcaccaagtctttcagttccttcttaccttcccataagtaaagagttctggctgtagggtccaattcgcggatacgtttcaagacttcataattgaaactgatatattccacatacccctgcattttcatgcgatgaacaatattcaccactgagtctgtcaactgcaacgtacgttccaagcctttttgggaatcttttatttcaataataggatgggtactattctgtgcccttgcagctatcaagagttcctgaagtgaaggtaccgggtctttctcattaatcgtttgttggaataactgcaatgaggtgatattttcaacttccaatccatatacatgcggatcatgagaaagaacaactctattgtcggcagttaaccaaacgtccaattcagacccctgacatcccaattctaccgcattctgaaaagaacgaacagaattttgcaacacccctttttgtctccaggcaccccgatgagccaccactctgttcttactgaagccgtctttcaataattcaaactcacactgctgcccatcaatcaaaagtgttatgccgtatctgtaactcgtctgccctgctgataatgccctattctttttcagacagattgatttctctttaagatcaatccggaaaagagaagaagtatcactcaacaaacgaacattggagggcgtgggatatatccggcccaccacactccccgactgtcccacgggaatcagataattatccagcacatacttcgaaatatctccggcccttatgacgaaggagctaagaagcattcctgctataaagattgcatttttcattctattttagtctacaataaatatatacataaataaaatccatattagatatccggataaagattgcgaacaacacccctgtccgtatatagttgtggcgatgatttaagcgggctacacccttttaatgaagaggctacacccttttgtccggatagctacaccctttcacccttatggtgtagcccttttctatttaccactacaccttcgggtattagagtctcctttatttacaaaagtccgttatcttccagatacttcttataacttgtgtaattgtttgtacccttcttaaaagtaacccaactgaaattcgtgatatattcggtaaacaaccctgctacgaatagttgctcctttagttcactccagttcttttcccgataagggacattcggacaccagcaactctggaatgattctatatcaacaccaaaatgtacgccgttggcatcacatgcttttttaatctcagcaaaccaattaggcaggtctacatccacgtccaccaggcaacgtccgccaaggtcctgaatgtataaataatcaatattgggcgtctgggcgaaaatccgtccgaaccattggccacaaagatcagctggcatacctcgccataaagccggagcaatagaaacgggcttatccgattttgtcttgatataagatgccactccttcaagatatttagccaacatggataaagagggttcttgctgccagcctacaggataagaaccgtcgtgaaattcttcggttatataccagccttcaaggcaagggtgattgccaaattgctcatacagctcatcgaacaccatcttatttctctctaaattgagattatatttctccggtgatgccgtattcgttttactgtaatcaccgggataaaggcctacaatcagttttatgccattgcgctcggcagcctcgaacatttggtcgacaaagtcatacttctcggtaatccaaggcatgttggtattcttatagaacgaaatgctggtgttttctccgtctgtaaactgctccgcgtactggataatccaggtgtcaatgccgatggcacggctatcctgaaactgtttatcccagtcttcgttgacataagcggtattcaattgtacaaaaatactggagaacttgggctttccgcttttcagttcataagaggtcaattgctccaacgcgtcgatacttacctcgccggtgcaaacttcatgtttcgtatttacgatttcaatcctgaatccttcaaaacggtttagcaataagccgtcagccgtagccccctgcccctttttatacaatttgaacgcactgtagggcataaccagacggttccaaccttctttggataatatttcttcgtcttcgaaagcataatattgccatctcttacgtgtactgtcatgcggtttgtcggcgctgaattgcttctcatcctccataatgatgaagcggaaaacacctttgttacctttttgacctttcacccaaatggaaagtcccaaaggatagaaagacaggtcggggcgataatctccccatgtttcttcgaaatagacatactcaggatttgaagtcataggcttaccggaaaaactgtatttcagcttaaaacttcccactccttctttatagtcatcacctaaatcatagtcaatagtggcattggtaggttcttcggcactggtaggaccagtacgataaatttcgcaccccaattcatcgaaagggttaatatttttagtagctttcgtgctattcaatattttgcgtatctcttcttgcaggttatagtcaccatcctgaccgtttcctcctccgttatgatcatcacttccacaggaagccaaaataaaacagaacagacttaccaatatagcagttgttttcataaggcattagttttaaaaaagagtgccgccggattagcggcactcccgatttgaattaatcaatgtgtattattgacggaaataactcatcttatacattcttacaatagactgtgataaatcaaagccaacaacagaggttgcaatgtacacatcatatccggttgaggttgcttctttgtagacagcaacgtctccccagctaaagtaattctgcccccatgcggacatatcactagtaaatacacagaagtcaccatatccgtcatcgtccggtcccagttccatcttagaggtattggttatgtcgaataccttgagggtggcaccaccaccggcccattggtcagcaccttggtcattgagtgccaaataggtatcattttccaccttaaatacattgaagccaagcaagcggtattcgtgagcagccgcattcaaagctgtaacttccatggatgtcgtaaagatattgaagcgactcttcaaagcctcatcactgtttccgtttacccacttcgtataactgatgtaatgatccgaatcgtcggccaatgaagcacgctgtatggcaggtgcggcagtccaagaacttccggccggtccgtaacgcaatttattaggctgattggcaggagttactaactgaccatcctgtaatttccaataataaatagtcatatcattaggacctgtaccataaatataagctgtaccgctggttacatcacctgccacgctcatgttatatcccaaatctcccggacaaccatcaccggcagtatagtcaagcagcaacttatgttcctgatctgcttcagaataatagaagaccatgaaacctgcaccgtaaatattttcacgggaagtaatcaagtggccggcatcatccgtacgagccttcatcataaacgatcttgctgcatctatagtcttaaccgctgctcccgtcttcatgtcatacaggtagataggaccattatattcctgaactgccagatattgaccgtatattgctaagcctgtattattgcggcttgccaatcccagatcggtacagttcttttcccacactttggagaacttggttttaggcggtgtcggcaccacacgaatcgtattgttatgacgatttcccaatgcatcgattactgttattttataaggctcagtgaaatccatttcacccccaactcccggaacaacataacaattatgctccacacttacggtgcaaatcagacggcttacatcgagcgggtcttcatccgtggtaggaactttcaccgtaatttcttctccctcttcataaggacctttcttggtagcataaaactccgtcggattatcaggtatctgaatggttacattaagtagaccattcacttggctttcatgtgctgtgctcaagtcaggagactcacaggaaaccaagagcactgccccaaacaaacacgctgttgctgcaattctattaagtattttcatagcttcatttttttaattatttccattcgtcaaactgttcacaagcagggttctgctgaatttctgcaataggaatagggaagcgattgtatttctccagataaacacgcgttttaccagcatcacaatccacaacattgtattcatatccatcacctacttttgtcggcttcactccttccatgtgggtaccattcaggactgtagttgccaatccccaacgacggagatcccaaaaacgatgtccttcaaaagctaactctaccattctttcgtggcggagaagtttcatgaattcagtttttgtactggctgatactgccggcaaatcaactctgtctcttacttcattcaatgcttccaatgcttcagtaagtttatcttgcattgccattgcttctgcatagatcaatagaacttcagcataacgcatataatagaaagtcaggtcagttctacgcatttggctcttactaatttccggatcaaacaacttacgcatatagtaacctgtgcaagtagtaccaccacctaaaccatagccatccacactaccttcgtatgtgtaaagtgtttctcctttccattgacaaccattataaaggatggaagcatagaaacgtggttcacggccttcatagggattggcagccatttcaggattgttccaatcaaactctttaccatcagccatctgataagccgataccaacgtctctgtcggactgatttcagcatagccaccatcactgggcggacaattgaaataatcaaaagaataatccaacgtctcgtaaacatagccaaactctatgacactttcattatttgcaaccggtttcgctcttctattcagaaacaacttcccataatcctcatacagttcatacccttgctttttcaattcggcagcagcatcggaagcatctttccaacgctcagcatagagcatagcacgagctttcattccataagctgcaccacttgtcaacttaccggcctctacagtacctctcagaggcaaatttttagctgcaaagtctaaatcctctgctatgaaatcccaacattcatccggtgtacaacgcgcatgctccttttgtccaagttcaggtaactgcttgtacaggataaaactagctccataccgcttcgccaaatcaaaattagccactgcacggaaaaaacggaattccgcctctgcacgtttggcaacctcttcagtaaagttttcacggtgtttttccaatccttccaaagcacggcaacaagtcaattgccaggaatgcctattattccagttgtcaaaaagattactggcagaagtaataggagtagaaccgaatacaaacaaattagtattggcagccggattattggctttcaaaagatcagcgcatgcatcatcagtgattgaataatatcctccgatcaaagaataaaagccattaatatacaattgcagattcgtttcattcgaccaagtgatatcgtcaggataactacttgtcagaacaggatcaatatcacaactactcagcgtgaagcaagcagaagcaaatactgttattatcttatttactgatttcattgtattagttttttagaaagttacatttaatccaaattcatacgtacgctgttgaggataatatccctgatttacacttggcatttcaggatccatatgctccagatgagataaagtaaacaggttaccaccggctacataagcacgaattctttcaaagccagcctttttactccatttctttggtatggtgtatcccaactgaatagatttcagacgtacataagaaccatcttctacccaccaggaagagaattttccaccatttgatcttgactcgattcctaaacgaggatatttagcatcagtatgatcgggacgccaagcaccttccaccaaataataaggagtatttccatcagcatagaaaggacgtgtatagaatgtatcatcacgaattccactactatacaatccgcataaatttacatcaaacagagctgcaccttgcaacaacatattgaaatcaaaacctttccattcagcacccaggttcaaaccaaacatcatttccggtgtattgctacgaccaattggaaccatatcctgatcccaggtaatcttaccatcaccattaatatctttcagtttgatatcaccgggtaatgtcggaccgaaaacagcactatgagctatttcttcttccgactggaataaaccatctgcaacaaatccccagtatcttcccatcgggccaccagtagcacgtttataatcaggcacattggcatcttccgtcattttcaacactttgttacgagcccaggaaagattacctcttacatgataagtaaaatctcttatatgattattatgagacaatacgagctcaaaaccacggttatcatgagaaccataattgatatacgttggatagtaagatcccagcgatggcgggaagtttgctgactgagactccaatgaacgggtggtcttcatatagaacacatccaattcaacacccaataaaccattccacatactagattcgataccaacattataagtatcagtcaactgccacttcaaaaaaggatttaccgggctgctcaatcccaaatatttctggggactggtaccgaataatactgtcgggtcagccgataaagtggctgtagagaaataagtcatcgtattactaatggcacgatcgctacctaaacgtcctacagatgcacggatcttcaggttttccataaaaggaacggcttccttaaagaaatcttcctgagaaagtctccatcctactgaaacacccgggaatacaccccatctgtactttttgggaagtgctgtagaagcatcaattctgctggtgaactctaataaatacttatcatcataagaatagttcagacgaattacatagccggcacgtttagcctgactgtgtccgccttttaccaaatctttattcacctcaagaccatagttcaaatccatgatatcagttataggaaaatccgttctaccggcagacatactggactcgtctgttctggaaaattcatataagaataatccggatatagcatgcttaccaaatttatttgagtactcaagagccggttgaatcgtataaccttcactttccgtgaaccactgattcaaagatactttattagcaattcggccagtctctacattaccttgacgggtagtctgattccaaccgtacacatcataagtcaagaagtacttcttctgcatagtataattcttcagataagaagcattcaacttaacagacagccctttcacaaaaggcagctgatacttcatagcaatattgccctggaaatatgtcttcttaacattattgttaccagacaaatctcttgccgcaataggattgttatttccattaccagccgtatttatactggctataggcattccatcagccgtataaggcttcaagtaaggatatgataacaatgcttgctggaaaatagaagcatacgaacctacacctgcagaagcacctggctcatcctgctcggaaacataaccggataaatcaagagacaaatcaaagttatcagtaatctttgcatccatattagagcggaaattatacttatcataagaagtacgtttaataataccctcctgattgtatgcaccgactgaagcaaagaacttaattttttccgtaccaccggaaactgaaacattatttgtataagtaggagctgtattacggaataacaaatcaaaccagtctgtatttccataaatgtgctcattctctcccggattagtaatacggtctatttcttcaggtgagaatctcaagttttcctctgcaactccatccaagagttgagccttattataccaataagcataatccggtccattcaggaacttcggaaaatcagtattctgactcaatgtgagtgatccgttatacgttacggtaggcttctgaacagcaccacgcttcgtcgtaatcaagattacaccagcagcagcgcgcacaccataaacagccgcagcagtcgcatctttcaaaatagtgatagattctacttcatcaggagaaaatgatggaaagtaatcggtaataacaccatcgattacaatcaacgggctaccatctccggcaccattaccacggatgtacaagttagcaccgtcggcacctggctgtccactgctctgtttggaaatcaaaccgggcaaacggccggccagcataccggaaaggcttccgctcggtgccatcttcagttccttgttatccacctgtgcaatagcaccagtcacatttattttcttctgtgtaccgtagcctactactacaacttcatccaacaaattagcatcttccctcagaatgatcttcagaagtttttttcctttcaactgcactttctgagtgatgtagcccacataagagaaagtcaaatgcgaattcgcattagataccataagtgaaaaatgaccatttaaatcagtaatagcaccatttgtccctccctcggcaacaactgatacaccaatcaacggagtgtcattctcatcaaacacattaccctctacctttatctgagcatgtgcactcatacttactagagagaataataaaaatagcaaacaaagatacttgtttttcatattaccaaaatttaaaattaggaattgttattctcgtttcatacgaccttagttatatcttctaaaatttgccagcactggtaaagtcctctgggaacatggaaacaacctttccactttccacctttcagaggcaataacacctcacctcttctattcagataaccataccattccggatattcattatctttgaaatggctccatgtatattcatgtaccttttcaaaccaatcaagacattgcttatctccggtcagttgataacctttgagcaatgaaatcagagtttcaatatgaacccaccacaatttctgatcccattccaattgttggggtggacatcctttacgatccatgaaatagtagataccgccaaattctttgtcccaaccataatcaagcatcgtcaaagtaatgttcttcgccttttcaatcaaatccggacggttcagacgtttcccaagatccataatgaaccacatggcctcaatatcatggcccggagtaacctgacgtccttcgaaagaatcggaaagttctccatttgccagaacattctctacaataatgcctccaagttccggacgataaaagacttccataacttcatggatacatacttccatcgtcttttccagacaacccttatccagcaaatgctctatttccatagccaaattacataggatcatcggtaaggcaaaattcttcaaatcacgtgtgcccggataaagcttattccattttcccttaggattgttggtcttcgataatacaatatcgaaagtcttcattgctatatccgcatactcctggtttcccgtagccaggctaagttgtccaaatgccattacagcaaaggtgtatgagaagatattataaggctccaccaagggacgtcctgtacgatcaagagaaaaataccagttataatttccatcatgaccatattttttcaggaactcacctccctgaatagcacagtccaaccactcctggcgtttctctaccttattataaagcattgaaaacaaccatacttcccggccctgtaaccaaataaatttgtctgtgtcaaaaacattccctttccggtccagacaggtaaaatacccaccatgctcgtgatcctgggagtgctctaaccagaaaggaagaacattatccaacagttcatccttatactgatccgctaatttcttcaaatccataattctattatttttttagatgagaaactggaaacgttttttatccggcatgcatataaaccagtttctcaatatattgatacctatttatctgttgtataagtaattacatctcttacccaaatatctgctcctttcactggattagtccatttacaagtcactttatattttccgtaaggctgttcgtaattaaaaaacagctcatgtttgcgatggttatacttcaacggtaacttgcagacttctaccaatttatcattgaaatatacttctaactctgcaacataatcttcaggaacattatcacccttgagttctcctttaataacagcccctataccgtcgaactccacagtcggaaagttagcaatccaattatccacagtcaccttcttatcaagtttcaaaccttcaaagctgatttccaatttagcaggaacaggcttctgaaagttaattttaacttcattctcacccacttttccaccttctctttctatcatctgcaaagcctgtccgtaactcaactcagaacctttattaaagctcactgtattattgaaaggcatatcttcaacaattgccatttcggccttatatttctccggaaggcgattatagccaagcatggttcctaaaatgcctccggaagaagccggattacagtcggaatcttgtcctgcacgtgtagaaatatcaattgttttttcaaagtcgccctgaccgtaaagcaatcccaaaatgatataggctccgtttacataggtttcaatattaaaaggtacttcaacaccatctgggcaggctatgtcattagttccccattttttctcaatctcttcccagcactttttccaatcatctggatattgtttgtaccagtttataacatcggtcatgcatgcataaaaacgactttgctgggggatcgctttcaaaccttccgtcacgatgtattcaatatcatcacttacataagctaaagaatacatggcagctacgtatactccgccataccatccatcaccgtaagccatgatatgtccgatacggtcacaaaaatccactgcactattcaccatacccggcgacataatacctgcaaagtcagcttcaatctgaaaatccaaacaattggcatgaggattgtttttccaatatccactggcatggggggacaaaccttgcaacaggttataacgagcctgctggtttgcatgacacaacggatattctttagctaagaatgctgccgcaaaagaatcgacaggagcatccaatccacacctttcaaaagtctctacaaatgtcagatctacgtaaacatcatcataaagaccacctccaccatcaaaccatttcttgatttccccatttccccatggtataaccacagaatcaggaatcatggttgacaaatactgaaactctgtcggaccgccataggtacatcccaagatttgtccggcccaagccccttttaccttatcgaataacgtgtctttcgatagggtgaggttcaggttctccttctgagaagtaccgcacgaacacaatgctgctataagacagccactcaataaataatttctaatcttcattatatataatattaaggtcaatttttatttttcatccaatagcgttcaatctcttccaaagactttcctgtggtctcgggaacaagtttccaaactatcagcatatagggtacacacatgattgcaaacagaatgaatgttccggcgggggtaagattctggagcatccagggggttaactgtccaatcaagtatgtacctatccataaagcaaagccggcaatggacatggcaagcccgcgtacccgggtcggatacatttcagaaagaagcacaaataccacagcacatatagacactgcacaacaaaatacatagaagaggaaaaagattaaaaggaaaatgctggagataccccaggactcaccataaataaagtaagttgcaatcagtactaaagaaatcaccatacctgatacgccataataaaccaactttttacgccccactttatcaataataacaagagccaatacagtagtcaatgtattcaccaatcccactaaaacctgatagaacaaagaatcacctccggataaacctgcattttcaaaaatagaaggtccataatataaaacggcattcacacccataaactgtcccaacacagcaatacatacaccgataataacagctttccttataccaggttgcaacaagagcttccattctgatttagactcggatgatagtacagacttagtctctgtcaattgaaataaagcttccttagaagaggtataaattctctcaagaatatttgtagctttttcttctttccctttcagtatcagccagcgaggactctcaggtatgaaaaagattataatgaaaaacatgattgcaggcaatgtttccatacctaacatacctctccacacctccgatacaaatactaggttccaccatcctgtactaacatccggattactcatagaatagcctaaaagctggtaattaacgagataagctcctaagaaaccaattgtaaccgccaattgatacagagaaaccaaacgtccgcgatattgcgctacagccacttctgaaatataaagtggagaaatgatagaaacaacccctatcccaacaccacctataatccgatagataaccagttgattaaagtctgtagatacagcacaaccaatagccgatgtagagaataaaatagctgaaaggatcatagtagattttcgcccaaacttatcactcaaaataccagcaaaaagcaccccaatgatagaaccgatcaatgcacatcctacataccatccttgttgcaaagcatccaacccgaactgttctgttacctgcgcaatggtaccggaaattacggcagtgtcatatccaaacagaaaaccgcccaaagccgctactaccgaaaggaaaactaaataacctaaattaattgtcgacttcatatttattttatattaaagtattctttatatctatcatacaagtgtcccgcctgtaagtaagctgattgtggactcataaagtgagaaaattcaaaagttatggctttatcatagtcggcccgttttgcagcttccaacttcatccggagtttatcaaactttatcggtaagaagttgattggcatatcacggtcaaatgtttctgcattcgtccaacatttcataccatatttatccgccagctttttattcactgtaaaaaaagcatccaattcatcatagtcaatgtgcccatcctgaaaagcacaagcatcaactacttcgtgaatcccatcaaaaatctcattccactctctttcatgttcctgaactgaaactgcatcttctttagttaacttgtcagtccccatcacagccttttttccgtcaatccaaggagaaataaaagtaggaagacctccagagacatccttgcattgttttcccattgccctgaaagtatcaatagcccctttagtcttacggctgatctcgccactgatataccatccgccaaaactcctgtatttttcaccgtattgtttccagacttcatcaataacgtatttattatcttcaatctcccaagataaatcacccgtatcccaatacttcccggaatcatacaaaccgaaataaaatttcatctgatatttttccgccaaacggagatacatatcgaccaagtcgaaagatggcatatagcatcctttaccaagcaaatatttagaaggataagtaataaacttgcgataaccggaacgaatcataataacagtatcaatcccaatacttttcatgtggcgaaaatcctgctcccactctctttcactccaattctgatgaggaatatcatgagaaatttcatctaagaaggttcctgttattttcaatccattattcttaggaataataaatttatcagtttcaccaccgggcgatgaagagaaagatatcacttctttctcttcagttgccagcaatccaggagctactaaggcggaagctcctgccagtgcggcctttttcaaaaaatctctgcgattgcttgttt

SEQ ID NO: 6366 - DNA, 114420 bp, Unknown
  gut microbiota DNA sequence
agactttgcaggtttcgtacattggtatgcagacacaagaagtggctattaaacctactatgaaggtcacaatgaagtctgatgctgagatgcttgatgaagtaatggtggttgcctatggtacggcaaagaagtcccagtttacgggttctgcttctactattaaagctgataaaattgcagagcgccaggtttctaatatatcgaatgccctttcaggacaggtagccggtgtacaaactacaagtggtaatggacaaccgggtacaggttctactgtacgtattcgcggtgttggttctttgtctgcaagtaacaatccattgtatgtagtagatggtgttccttatgatggtgatatttcagctatcaactcacaggatattgagagtttgacggtattgaaggatgctgcttctaatgcattatatggtgcacgtggtgccaatggtgtaattttggtgactaccaaaaaaggagctacgggaaaagcaactgtaaatctggacgctaagtggggtactaaccgtcgcggtgtgtctaactatgatgttatgacttctcctcaggaatatgtggagaactactacacagcaatgttgaatggttatgctggtggagatcccaatagagtattgtctaatggaatgactggtaatcagtatattaactcattgctgttttctaaagacggtttgggatatcctgtttacacagtgcctaatggtgagggatatataggtgtagacggtaaacttaatccgaatgctaaacttggccgagtgtatggagattactatattactcctgatgactgggagaaagagttgcttgacaatggtaacttacgccaggaatataacgtaaacattagcggttctactgaaaaaatgaactattatatgtcagccggttatctggatgatagcggtcttatcccaggttcatcattttcacgcctttcattccgcctgaaagctgattatcaggtgaaggaatggttgaaagtaggtgcgaatgttgcctattctaatatcgtaagccgttatcctgatgaacaaactacttcaggaagttctactaacttattttatataactaataacattgcgcctatctatcccttgtatatccgcaatgcagacggaagcattaagaaagacgctcgtggtttcactatgtatgactatggcaatggtatgtatacagatggtactacagctctgaaccgcccgttcctttctcaatctaacccggcatctgctctgcagttggataagaatgagtacaatatggacatcttgagtggacgtgctttcgtagaagtatctattatcgaaggattgaaagcgactgctaactggggtatggacctggataatacacgttatacagaattgatcaacccttactatggacagtatgcaggtaataccggtggtgtggtaggtgtttctcacagtcgtgtattcagtatcaatcaacagtatttattgacttataagaagaacttcggtgatcataacattgatttactggcaggttttgaatcttatgattataaaaatcaggctttgtccggtagcaagcagaaagtctacaatcctaatattgtagaattgaataatgcgattaatactccgagtgcaaactccagcacagctaattatgctacagcaggtttcttgttccgtgctcagtatgattatctggaaaaatactttgccagtgcttccttccgtcgtgacgcttcttcacgttttcatccggacaaccgttggggtaatttctggtctgttggtctcggttggttgatgaacaaagagtcattcttgcagaatacatcttggattgatatgttgaagttcaaaatcagttatggtgcacagggtaatgataatatcggtaattactatgcgtacttggatcaatatactgtttctaacagtaataatgattttgcattggctctttcttataaaggtaataaagatatcacttgggaaacttctcatagtttcaacacaggttttgattttgaattctttaaaggccgattgagcggtactgttgaatactttagccgtaagactacagatatgctttataacaaaccgatgaatgcttctgccggttatgccagtattccgatgaatgttggttctatgactaataaaggtgttgaattggatttgaacggacttttgattgaaacgaatgatttgacctggcgcatgaattttaacttgactcatttcaagaatacgatcaatgaactggatccttcattgaatggtgagatgattagtggtagctacatttatcgtgaaggcgaatccagatatcaattctatctgcgtaaatatgccggtgtagatgagaacggagtagcacaatactataaggatattacagatgcggaaggcaatgtgaccggacaagaaaaaactacggatgctccgaatgctacccgttatgcaaccggtgatattctgccgaaggtatatggtggtttcggtacgagcttgaatgcgtatggatttgatttctctatctcttttgcttaccagttgggtggacgtatgtacgacaatggttatgcatctttgatgaattcaggtaccgatcctggtcagaactggcataaggacattctgaaagcttggactgctgataataaaggctctaatatacctcgtctgagtgcaacagaccagtatgctaactatttgtctgatcgttttctgactaagtctgactatttgagcatcaacagtataacactgggatatacattgccaaagagctgggtacgttcattgaatattagttcactacgtgtttatatgtcagctgacaatgtagctttgttcagcaagcgcaaaggtttcgaccctcgtcagagctatacaactgccagtgcagacgtatattctcctattcgtgctatttcgggaggtttatcactttcattttaatctaaaacaaatatagaattatgaagattaacaaatatatattactgctttctgcaaccatggtggtggtttcttgtgatctcgataagtttcctgaaggaagcaccgtgacacaagaccagaaaaatgaggtggttgagttgttgccagaccgtatttcttctgaattgaatggtttgaaaacaggtctttattctcatacaaacctgttgactgattataataaccacatggactatggctttccggcagcttgtatgatttatgaaacagccggacaggatttgctgactttgaatgaccagaccggttataataagtttatcagttctcaacgcttattagacagaaacattacgtctacatttaatgcttttctgtggaagctatattataaacacatgaaaaccgctaatgatattcttaaagctattccggcagatgcggcagacgcttctttaaagaaatatcgtggtcaggcattggcttcacgtgcttttgattatttgcaacttattcagacttatcagttgacttacataggtcacgaaacagctaatggtgtacctctggtactggaaacaacttctgatactgagttgatgaataatccgcgtgcaagtgtacaacaagtatatggccgtattatggaagatttggatgaagctattactttgttgacaggtgcttctgcacgtgccgataaagctgaaatatcagtagaagtggcctatggtctgcgtgctcgtgctaacttgctgatgggtaagtgggctgcagcggcttctgatgctgctaaagcttatggaacttctgctccttattctgttgcagatgtaagccaaccgactttctataatgctacagataatgcatggatatggggtatcgtagtgactacggaagattatctggcaaaaaccggtatcgtaaactggccttctaatctttgttcactgacgggtatgggatatacgacggcagctagcgctactgacgtagcttaccgtctcatcaacaagaatttatgggctaagataccagaaacagatgtacgtaaaggttggtgggtagatgaagatttgcactcgcctgttctggataacggacttggtgaagactatgcttactattgggcaaacggtatgtttaatggtggaacattccctagcaaattttctccttatacaaatgtgaagtttggtcctgacaatggaactttcgcagatacagacaatgcacaagactggccgttgatgcgtgttgaagagatgaaactgattgaagcagaagctcttggacgggataacctggctacaggtaagcagaaattggaagagttcgtaagacaatatcgtgatccgtcttatacctgtactaccggttctttggacgcatttatcgatgaagtttggttccagcgccgtgttgagctttggggtgaaggttttgcattattcgacatcttgcgtttaaagaaacctattatccgccagggagctaactatcccatcaacagtacatttgctgaaattgctgctgaggctcctatcatgatttaccgtattcctgaggctgaaacatctgtgaacagtgctattacagaggcggacaataatccggctgcaatggctccgactccggtgaactaataagcacattatcaaataggaaaagagaatggggtgtattcggatttacggatacacccctgttttttatcaatttgcaaaatagtagcgggaaatatttgtgaagtgtaggatttctgtaactttgcggtttcgttacttaataattatttaattattctaataaatgatgcctatgaagaaattactactcctgtctttggttcttttgtgtagcttatcggcatggacggctcaacgctctccggaagaagctctttctattgcacgaactttctttatgcagtcatccggggctgtaacccgtaatatcggtgaagttcaattggtggcagtctctaatgatttgctaaaatctgcatctacccgtagtgtggaaggaacagccttttatatctataactatgcgcagtctgcttatgttatagtatccggtgatgaccgtatgaagccggtactgggctattcggacaatggaagtttcataactgaaagcttgccgataaatatacttgggtggttggaactgtataatgccgcttatgctcaactgggtaacgccgaaaaagcggttactgaacctaaactgcttactaaaacaagttttccggcatctgtatctcctttgctggggagtatatgctgggatcaggatgcaccgtacaataatgcctgtcctctttatcaacaagagcgttgtgtgacgggatgtgtggctacggcaatggctatgattttgaaatatcatgaatatccagtaaaaggaaaggggactcattcttatacagcctctaatggaattaagtgttcttttgattatgggaacgctaccttcgactgggataatatgctgccgcaatattctggagattgtactgccgaacaggctgacgctgttgcccaattaatgttggcctgcggtgtggcagttgatatggagtattcaccatctgcttcgggagcctattcgtatcaggtaggtcaggccttaattgactactttggatatgatggtaatttgggcttggtatatcgccaatattttacttcttccgaatggatgaacctgattaaatcagaaattaacgagaagcgtcctgtttactatttcggatcttcggatgatggaggtcatgcgtttgtttttgatgggtataatgaagaggatatggttcatgtcaattggggatggagtggaatgaataatggttactttgaagttgcttccttaaatccggattctcccggtattggtggtggaagcaatcttggaggtggctttacgagaggtcagggaatgtatttagggatacaaccgcctactactacttcaaactttacttctcatttttttatgacggagttagcagcaaataaagaggaagtcactaagggagacgtgtttaaactgacgattactgagatatttaatatgagtgtggcatgcaagaatagtaagttggcagtaatagcagaaaaagatggtcaacagttaatattagggcagacggctttggctacgctgataaatacgtatgaaggatataatactttttctttttctaatctgaaaatacctaatgattttgctgatggaacttattccgtatatgtagctaccaaagatgagcgcgaagcaacatggagtcgtgtgcgtagttacgtgggttctgaagcacaactcattcttgttgtaagcggtaataaatgtactttgactccgttcagtggtaatctaagtcttgaagaagacatggagattagtgtgaaattagcccatagcttatatagtggtcttaaaggggatttcaaaatattggtttctaataaaagtacatcggatgagtattatggttcagtgggggttgctctttttactgcagataaaaccccgagctttgttgcaatagtcggagatgcacaggtcgaaataaaaccaggcacagttaatagagaactggctgtatccggagacttggctattactaagaaccttgtgactactaatattcctgttggagattattatatttgcccctgcatagattggggaggaggtacgtatgctgtcggtgagtttactccggtcaccataaaggaggtgcgtggaaccgcagatttgaaagtgagccaatcacgtttggagaaggaacaacttcaagtaggtgagcccctgaaatttctggctgatctgtcattgtctggcgatggaaacgtatatactggaacattggtagcggcagtttatgaaaattccatgggttacccatacagtgtacattatcagaatgtatttgtggaggcagacctgacggaaaatcttgtgatggaaattcctctgagtctaggtgaaggaaggcatgctgttcgtttgtataaatcgggtaccaatggagaccttgtgacaattagcactctctttttttctgtaggaccggctaccggtattgaggatgaggtagccgataaggatggattagttatctatcagcagccagtagaagatattcttaatatccgtacttctcatgccgtccgagtgatttctgtctataacctgtccggacagcaaatgatacagcaaaaagagtccggggataagaaagagtattctattccggtaggagggttggatgcaggctattatattgtagtattgcaatcaactgatggtaagatatatcggagcaaatttatgaaacgttagactatatatatttatagtactggaacgaggctattctattaacttaggatggccttgttttttctattctaatgaacgattttcgctttaaaacgttcatttgcgataggatcatcaaaaaaaagtattcaaaatcatctgacgaaccatatatttcagtaattttgtctttctaatgaacaacaagatagtgatttgtatcattcgttgaggtgctactaaaaacaactaacccctgactatatgaggtgtacactactctttctatttattcttcttgcaaatcggcttcttgctgataatgtaacagcagagcaagctcatgctttagctaccgatttctttaaaacgaatgttcaaacccgtagtactgctgcatcaccacagttacaattagtttgggatggggaagatgcgaatacccgtagtgcagggaatcttccggctttctatgtttttaatagtaccgaccagaaaggttttgttattattgccggagatgatgtggttatgcctgtactaggttattctttcacaaacagctttgtggtagatgggatgccttctaatctgaaaagttggatgaatgggctgaaagaacagatcaacgaggcaagagagacgggactgaatacttctgatgttgtatatgaagcgtggagcggggtgtcggatatgacaaccggagatgtggtaaagcagtatcaaacggcggagtgggatcaagagagtccttataatacgctttgtcctaaaatagaaggtacccagactgttacagggtgtgtggcaacggctatatccatattgatgcgatatcatcaatggccgaatgcaggaacgggtactcttccagcttatagttatgaggcgctagttagtggagctaaaattcaccaaaatgtatcggggataactttgggacatacttatgcttggaacgatatgccacttcaatatgatcggaattcatccgagatttctaaaaatgaagttgcaactttgatgtacgactgtggtgttatggctcaatcacagtttaatatcgcttctgccggtggaaccggtgcctctacattgacagctgttcatggattggcagagtatatgaattacaataaaagcatgttgtgtcttcgtcgtgaatggtattcggatgcagagtggatacaaatgctggaaaatgaaataatgacagtaggccctgtgctttacggtggagctactcttagtaatgaaggacatcaattcatattggatggatatacaacggaggattattttagagtaaattgggggtggagtggctatagcaatggttatttcctgatttcagctttgaatccgaataatcagggagcaggtggtagtactggcggtggctttgtcgcgaatcaagacgctttgttcgggctaaagccggcggagggaaattcaagctatcaaacattattggccatgcttgctgggaaatctcaagatgggacttattattccggcttggaaacctccgaaactcaatttaatgtaaattcttcctttattgtgaagtgcggcttcctctggaatttgggattagactcgttctcgggaaaagtagctttggctatggttgataagaatctgaatataagagaatttatatcaagaatttcggatattccaagtatgcagacatattatacagtgtcctttgctccttcctgtagaatctcattgactccacaacccggtgatcgtattgttgcagtctacaaaggaacaaatgatgccgaatggaaagtggttcgtggtggtcctgataccacgaatgagattattgttaaggctgatcctacttcaattatagagacgaagcaagaaatacaatttactgctttctgtgataagcaacaggaaaccgtggttgttcatttgccggagaattcccacaggttgaatctatatgatgtaaacgggcgtctgttgaaacaaatattgtctgaaggaaaagaaactataactttctcttgccgggaatatcctacgggagtgtatcttttgcaggctgtaacggacaagggaatccatcaatgtaagtttttaaaatgaaaaagagaattaatattgtaatagcaaccttacttatactattggcgggttgccgttctgcgaaaaaggaaacaatggtcacctctgatatgcaaaagatagaaatgaattctggagtaattactccacagttgacaggtggtaatccggcctctacctctccggtggtttatatttataaaaccaaggctgattattcacaccaggtaccggtgatgatggatgaggctcgtacccgcattttgtcctatcctgcgcctggggatttgaaaatgggggatgggttacgtctgcctactcttttgaataagggatacttgctggataataagggaataggtcctaatgtggcttttcttacctatacgtatgaagagtatagcctgttgcccacagcaccttccatgaccgatttgatgtcgcatattcttgataagtatcctttactggaaattcgtgcatgcggtcgccgtgctgattataaagatattgttatagaattaaatgagaaaatagcagaaggatttctgcaaaaataattatatttgtcgcccaatatataataaataggtatagtaaatgaaagaatttgtaatctccgaagtacaggcagaaacggcggtattggttggtctcatcacaaaaacacaggatgagcgtaagacaaacgaatatctcgatgaactggaattcttggctgagacagccggggcggaagtagtgaaacgatttacccagaagctggaccaggcacattctgtgacctacgtcggcaaaggtaaactggaagaaattaaagaatatattcggaacgaagaggaagccgaacgggaaatcggtatggtgattttcgacgatgaactctccgcgaaacagatacgtaacattgaagctgagttgaagatcaagatattggatcgcacctcgctaattctcgatatttttgccatgcgtgcacagacagccaatgcaaagacgcaggtggaactggcacagtataaatacatgcttccccgtctgcaacgtttgtggacccacttggaacgccagggtggtggttccggtgccggtggcggtaaaggttcggtgggacttcgcggtccgggtgaaacgcagttagaaatggaccgtcgtattatcctgaaccgtatgtcattactgaaagaacgtctggcagagattgataagcagaagtcaactcagcgaaagaaccgtggacgtatgatacgtgcggcattagtgggatataccaatgtgggcaaatccacattgatgaacctgcttgccaagagcgaagtatttgcagaaaataaactgtttgcaacattggatactacagtgcgcaaggtgattattgataatctaccgttcctgctttcagatacggttggtttcatccgtaagttgcctactgacttggtggactctttcaagtcgacactggacgaagtgcgcgaggcagatctgctgttgcacattgtggatatttcacatccggattttgaagaacagatagaagtagtcaataaaacattggcggatatcggtgcatccggtaagccaatcatacttgtattcaataaaatagacgcttacacttatgtggagaaagcggctgacgaccttacccccagaacaaaggaaaacttgacactcgaggaactgatgaagacttggatggcaaagatggaggataattgcctctttatctctgcccgtgagaagatcaatttggaggaactgaagagtgtggtttatgcacgcgtgaaagaactgcatgtacagaaatacccttataacgattttctttatcagacctacgaagaagaggaagaataaactaaaatttgttggtcatgaattacagacatttaaccgaagacgaagtactccggttgaaaagccagtcgtgtctggcggatgattgggggaaagtagtggtagcagaagactttgttaccgagtttgtacatcacacccgtttctcgggagatgtacgtttaggcgtatttcaatcagagttcacattgccgggtggaattaaaaaacattccggtttgcgtcatgtaacactccacaatgtcacggtgggggataactgttgcattgagaacatccagaactacattgctaattatgagatcgggcatgacacattcattgagaatgtagacatcatcctggtggatggattgagtaaattcggtaatggggtagaagtatccgtactgaatgaaaccggtgggcgtgaagtacttatcaatgataaactttctgcgcatcaggcttatatcctggcgctttaccgccaccgcccggaattgatttgccggatgaagtctataacagacttctactccaataagcatgcctcttcggtaggtactatcggcaatcatgtgatgatactcaatacaggttctatcaagaatgtacgtatcggagactattgtcatatctgcggaacttgtcgtctttataatggtagcattaatagtaatgcggaagcaccggtacaccttggtcatggagttatttgtgatgattttatcatctcttccggttcacatatagacgatggagctatgctgagccgttgctttataggccaggcctgtcgtttgggacataattattctgcgtccgaatcgcttttcttcagcaattgtcagggagagaatggcgaggcatgcgctatctttgccggaccgttcacggtgacgcatcataagtccactttactgattgccggtatgttttcattcatgaatgccggttcgggttccaaccagagtaatcacatgtataagttaggccctatccatcagggaacattggaacgtggtgctaaaactacttccgattcctatattctttggcccgcccgtgtaggcgctttttcattggtaatgggccgccatgtgaatcattccgatacttctaacttgcctttctcctatctgatagagcagaacaatactacttatcttgtaccgggtgtcaacctgcgaagtgtaggaaccatccgtgatgcacagaagtggccgaagcgtgatggacgtacggattccaacaaactggatttcatcaattacaacttactcagtccctataccgtgcagaagatgttcaagggacgggaaactttgcagaacctgcgccatgcttcgggcgaactttccgatatctattctttccatagtgcgaagatccgtaactcggcattggtgaagggtatcaaattctatgagatcgccatccataaattccttggaaactctgtcatcaaacgtctggaaggtattgaattcaaaagtaatgaagaaatacgtgcccgcctgaagcccgacaccacagtgggtagcggtgagtgggtggacatttccggcctgatagctccgaagagcgagatagatgccctgatcaatgatatcgagtgtggaaaagtagaccgtctgaagtacatcaatgctgaatttgagaagatgcatcagaactactacacttatgagtggacctgggcttatgaaaagttggaggaatactacggaatcaaaccggacaatattacggctacagacatcatccgcattgtagagaagtggaaggaagcggtagtcgggttggaccgtatggtgtatgatgatgccaagaaagaattctcgctggcttctatgacgggcttcggtgccgacggctcgcgcgcagagaaagaaatggactttgagcaggtacgcggtgactttgaaagtaatccgtttgtcactgccgtgctgaaacatattgaagataagacagcgttgggtgacgaattgataggtcgtatgcagagggtgtcatcattttcactctaattaaagaaatatttcaataatagttcttacctttgtgctacgattcattaatttaatttacgagtaattatggcaacaacacctccgttcaagtatcaacctatgtttgagcatggggaagataagactgagtattatctgcttacaaaagactatgtatccgtaagcgagtttgaaggaaagcccattctgaagattgaaaaagaaggtcttacagcaatggctaacacggctttccgcgatgtgtcatttatgttgcgccgttcgcacaatgagcaagttgctaagattttgcgcgaccccgaagcaagtgataatgataaatatgtagcactgaccttcctgcgcaatgcagaagtagcttcaaaaggcgtgcttcctttctgccaggataccggtacggctatcgttcatggtgaaaagggacagcaggtatggactggctattgtgatgaagaagctctttcgttgggtgtctacaaaacatatactgaagaaaacctgcgttactctcagaatgctccgttgaatatgtacgacgaggtgaacacgaagtgtaacctgcctgcgcaaatagatatcgaagctaccgaaggtatggaatataagttcctttgcgtgaccaaaggtggcggttcggccaataagacttacctgtatcaggaaacaaaagcaatcctgaatcccggcactctggttcctttcctcgttgagaaaatgaagacgctgggtacagctgcttgtcctccttaccacatcgctttcgtcattggcggtacttctgctgagaagaacctgctgacggtaaagctggcttctactcattattatgatgagttgcccactacgggtaacgaatacggacgtgccttccgtgatgtagaacttgagagagaagtgttggaagaagcccataggattggcctcggtgcacagttcggcggtaaatatctggctcatgatatccgtatcattcgtctgcctcgtcacggtgcatcttgtccggtaggtctgggcgtttcttgctctgccgaccgtaacatcaagtgtaagatcaacaaagaaggtatctggattgaaaaactggacagtaatccgggcgaactcatcccggaagaaatgcgtcatgcaggcgaaggtgccgtggttaagataaacctgaaccagccgatggcagatatcttgaaggaactgactaaatatccggtggctacacgtctgtcattgaatggtacgattatcgtaggccgtgacattgcacatgctaagctgaaagaacgtctggaccgtggtgaagatttgccacagtatatcaaggatcatccgatttactatgccggtcctgccaagactccggctggtatggcttgtggctctatgggccccactactgcgggacgtatggactcgtatgtagagttgttccaaagtcatggtggcagcatggttatgcttgcaaagggtaaccgtagtcagcaggtgacggatgcttgcaagaagtacggtggtttctatctcggttctatcggtggtcctgccgctatcctggcacagaacaacatcaagagtatcgaatgtgtagaatatcccgaactcggtatggaagctatctggaagattgaagtggaagacttccctgcattcatcctggtagatgacaaaggcaacgatttctttaaacaattgaaaccttggaattgtagtaaataagaggaatctttctatagattaagtgaaagctgtcccgaggaagttgattaactccttggggcagctttcttggtttaatagatgtagaacttaatatgctccttcctttttcccctaaagctttcatgtttatgtcattatgctataagcaaaaccttgttttccatatgggggctgtgcagcccacaattgcgggacgaacagcccccatatggaaaacgtagagcccgcaactgtgggatgaagttttgctacaggcaaaagaacaaaaacaataaagcaaagcttggttttcatacgaccttcttcccgtttttcttattgttcctaagtattccattgtggagtctataagttctgcaacaggtttgcctacaccatcctacatcatcctacaccattttatgctatttatttgcttgataatcaagagataacggttgccggtgtaggatgtaggaaataaagaagtattttttttgtgtcactgacctcaggtggatatcagaaaaataataagatattcttgtatgccgatactaatttctatctttacaccttcaaaatcagattaatcttattgacagttatggaaactactccccacatttctccgaaggcggactcccgtgttgtttggctggatgtcgtgcgactgatagctatgtttaccgtggtttgttgtcattgcacagaccctttcaacttttatccgggaacggctccgaatattgaagatatcaagttttggggggctgtctatggggcggtgctgcgtccgtgcgtacctctttttgtgatgataacgggagctttgttgcttcctgtgcgtggggatgcatccgtattctataagaaacgtattccacgtgtgttttttccgtttcttatctggtcggtgatttataatcttttcccttggattacaggattgctgggagtggaaccgcgggtgattcttgacttcttcccgtactcgggcgaagaagtgatgcgccagtctttagctgtcagcatgggatatattgccgaacttccttttaatttttctatcctcgatgtacacatgtggtacatttatttgctgataggactctacctgtatttgccgatattctccgcctgggtggagaaagcttcggagaaagccaaactctggttcttggcagtatggggagtgacattgcttataccttattataatgagtttgtagcgcaatacttgtggggaacttgttcgtggaactcattcggcatgctttattattttgccggctttaatggatacctgcttctggggcattatctgcgcaaccatgactggactggacggcaagctgcactgataggcgttcctatgtttgtggtgggctatgcggttactttcttcggtttccgccacatgacggcattgccggactttacggatgaaatgctggaattgttctttacctattgctcactgaatgtggtgatgatgaccattcctgtatttatgtgggcaaagagagtgaacattcgttcggagcggatgataaaggcattatccaatctgacactttgcggtttcggagtttatatgatacactactttttcaccggtccgtcagtggtactgatgcgggcggcaggtgttccgttgtgtttgcagatacctgtcgccgcagtggttgcatttggcgtttcctggttcctggtggcaatggcataccgttgttttggaaagaaaacgaaatgggtgatgggatagtctctgtaggattatcctaattcaatatacttcttcatggtcagacggttttcaccgtccaggcgttggtatgaaacttcattcataatgcttcgtatcaggaatatacccagtccaccaatggcacgttcttcaatgggaatggtgatatcggcatccggggcattggtcgggtcgaaggaaagtcccttgtcggtcagtaagaagattaattgattgtctgtcaggctggcttttagtcggatttcatgatgctcttccagcgggtaggcatacatgataacattgctgacagcttcttccagtgccagattgatatgcatggttgtttctgccggcagggacaagtcagaacagaattcttctacaaagattgccaaggctgtgatctcatccagctcgttggttattcggatctctttttccatgatgttatggttttattgttttaggttcataatgaattagcagaatggtcatgtcgtcactggcctctgcttgttgtacatgggaggctacggaacgaaccactgtatctactattatgcgtacgtcgaaagtgcccaacggagccagagttgataataggcgatcttcaccatacagctctttggaggcgttttcagcctcggttattccgtcggtataaaggaaaagacgggtattcttttcaagagtgatttcttcatcggtgtattccatatcttccagtactcctacgaataactgtatttttgccttcagtagcgttgtatttccgtctgcacctattataataggtggattgtgtccggcattacagaaacgcaggcttccggttttcaggtcgagtatgccgatgatgagggtaacgaacatattggcctcgttgttttcggagatagaacggttcatcttgctcataatctcggcaggcgaggtggcctgttgggcgagggtgcggaacaggctgcgtgcaatggccatgaagagtgaggccggaacacctttgcccgatacgtcaccgatgacgaagtaaagccggtcattgtcgataaagaaatcgtagaggtcgccgcctacttctttggcaggatgcaatatggcatgcaggtccacgtcttcccgttcggggtagggtgggaagattttgggaatcatccccatctgtatctcgcgggcaatggacaattcgctttcaatgcgctctttggaggcggtcgttgtgcgcagttccgaaacgtagcccgacaatgactgctgcatatagaccagtgagtcgtgcaaatcttttatttcatctttggagtgtacttcgggtaatgccacatcaaaacgtcccgtggcaatggaacgggcggattcggaaaattttctgagcggacgtaccagtctgtgaatgatttgatagatcaacggaagcagtaccagcatacctgccaggaaaatatagatgatgcggtgggaggtggcatccagattgtggagtatcacctggctggggcagatggtgcatacagaccatccacagttagggatggcggtatatagagcgtatgagtcctgttccgcattgttgaattgtgctgtgccggtcacaccgttaagtatattgcggcctatttcctcttcctgaacatcattcttgcccagggcaacggagaaaatggtttcgttcattatcttttcccggtcggggtgggtgaggaaactaccgttccggctgagcaggaaggtatagctggattggtaaggtttcaacttatttaccatatcggtgaaacgggacagggaaatgttggccgtaaatatggcatatacctctccttgtgggttgcgaagaggtagcgcgtatgtactcataattgtatttccgcctcccgtgtcgtagtagggttcgctccaataactctttttcagaagtttaggtatcagataccagtccatgcagggataatcgtagtctgctccacccagtttcagatagttcacgatctcttctgccccctcgttgatgctgaaggcgtatggcatgaagtatttccctttctccttataatatccgggaatgaaagcgataccgcttcctacaatcaggctattgtttttcacgatggcggtgaggacatcttttagagaatcgggggtgcttaggtttttctccacaatccagacggactgttcgagggtagattctacaatctgcaactctccgctgatttgtgtagctgtgttgcgcagcagtccgtgtgcatggtctatggcatcttccgttatctgcttccggctgtaattatagaacagcatcatgatgcagacaaaaactatcagcgtgaaagacagcacataaatgcttagtttggtggcaaacgatggggaaaaaaatgctttcatggaggaatgattatataattagggagatatggtgatgtgcagtgttgtttattttacaaaatcctcgtaacggatactggcacttccggcaggcgtcaatatcattgcagcgcgtgcaaatccttcccggctgaggcggtaggtacgttgtccgctttgctggtccacttgcaggcggagaacttcctccagcattttgcgttggtggtagcggttggtgcctatattgccctttttcacttcttccataaccatatcgagggcttcttcacggtgctcgttggcccatgcccaaccacgcatactggcttttaccagtttgcgcacaacttccggatattggttatagaactcttccgtgacgtacaacccatcttcaggcaggttgtagccatagtcggcaagacgtatggagtatatcgaatcaacgttcatcccgtattccgataattggagatactcattataacttcctaccaggcaaggatcggcagccccggaaagaaacacattgactccgctgttgaaccgtatccattctacctgtttcagggcgtaatgctctgcaagccggtcaagtagtttttggctcagatgattccatacggctatcttctggtttcgaagagattcctcgcctttaagaggagagtggctgataagcatcagactgttttcctgtgaggtctgcatgacgtttactacacgtgcgcctgcaagccgctccatgaatgcgtatgaaaggttcatgattactaccggggcacgacctttctccataaacgaaaaagagctttctgagatggcaggatgttgtacgcatacgtcaattccctcctccttatagaatcccagcttatccgccacgtaataaccggtaaattgggcttgggcggtccacttcggggtgagcatgatgccttgtgctttagtctggggtgaagcaagtagtaaaggcaataggaagatgctgaaaataaatcttttcatcataatatttaccggatattaaagagagaagtgcagcctgtcatttcaaagatgttttttatttccggcctcatagcctcgataatcaaacttccctgatttttctgtacgctcttttgcaggataagaaagcatcgcaggccggaactgctgatgtaggacatttgttcgcaattgacgatgatattgggcttgtcttcttgaagcaaaggctgtatggctatgctgaagtcgcgggcgttggctgtatccaaccggccttttatatccagtacaatgatgccgtctactctgcaaatgtttgtgtccagcagagcgtccggtttaaagtctatatccaaccgtttcactagagtcagcagattttgggtgtccgtagttcggtagtttacttcgtccattgtgcggtgaataaggaaatgccctaatcctttggtgagctgctcttcgagggatggcttttcatccggactttttttctggaacggatcaactgcgattccttcgtccgtgatctggaaagtcagccttccgggagtgatatgtgcctgaagctgaatttcgcttgattctcctttcggataggcgtattgaatgatgttggctattatctcttctatcgcgagattcatgctcatcgctatttccgaggggatgttgagtgatactcccaattcttccataaattgggaaatacgcccggtctcattcaacttgttgttgataataatttctttttccatgttctttcgttaatgctttatagtaacgtgtatagtagctggcttaatatgtgcaaatatccctatttccctttatatcgaacggtcttcctcgcttaaaagcgtcccactttgggtggaatggctgaaatggtacttaatactacttgaaaatggtactaaaaagattgtatatattgccccatagttgataagttttataactttgcgccagaaaaatatatcggataaacgaacacctgtaaaataaaaagcgaaaggaaaaatgaccagtgtaatcatgttgtttatagagctgctgctcgatatcgtcggtcttgttacaggagggattatctgggcacattcttctgaaagcaaaattcgtaaggcttggggaatgttggctaccactctgtcgctacttctgctgtgcgataatgtagagtggatgtggctttttagccgtggagtggaggagataccccgcttcgttgaggtgcctatggatcatttgtctatttggcatattgtacgcgtgattttctttttccagctcttttcgctatttcccattgcttcactgaagcctggatggatgacgctgacaaggatcaccaattattgcattcctatactgctgattgtttgcattgcttgctgttatcagttctttaacgggcattatacgatgctgaagtccttcgctgctattggagagaatctgggaaagcaggatgtagtggtcagactgatgttgtttgtcatcagtgtattgatgccttccttgaactttcttcttccttatctgaagcgttggatacctatccgacgggtacagagtagggggatgtatatttatatgggatgttttggattgattatgtcggggtatatctggctgatgttaggaaccagtggtttatgttttaaccttttcgggtattttgtggttgtgcctactatcttgctgaatatactctatctgcgcaatgataacccgctctctttaccgccattgccggtaattgatttaagtcggcaggaaatagaggcaatcaaggaaattgaagtgtctcccgtagtgcttgaacttagtgagcaactgatggcctttatgaaagggcatacaccttttaccaatccccaatattcattgcagaatgtgttgacggatataggaaccaatgagcaccggtttaataaggtgttgcgttacaatggtttctcggggttccgggattatattaatttcaatcgcctgcaatactttaaggagcaggcggctttacggaaagaactgacagtgaaagaacttatgtttatgagtggatttacttcgcgttccagcttctatcgctatttcgccagtattgagaaaatgtctccgagcgagtatatggaaagacttcagcaggaaggttaggggatttcaccacagagtaacactgagtttcacagagttcaatattcaatatatgcaattaaagaaataagattctgtgaaactcagtgttactctgtggtgaatcattgtatcttattctttttcttccactgttcgtacttcttcagcactttcagtccgtcgctattataccaactatatccgttacggcgttcgtgtcctatttctgagatatcgaacttcttcactccatcgcggtcactgaagaaaggacggttatcttccagtgtatagaagcgtgcccacaaaggaggacaatctgtacatggtaccatgcggtagtctttctttccttcgtcattggtgaagaactctttctttatgccttcaatcttggatgacttgaaccattcaactgcattttctatacagttgataacctcttgtgagggattgggcagagacattaatagaatgactatttcgtcagactcttgtccgctcagtgagggtaactcataggcgcgtgctttagcgggagcaagggtgtgttcgtcatgttgtgcacaccagacggttggtttaccatttaggacaacttgcgttttgaggatgcactccacacctttgttgaatgcggcgcgagcacggttgcagatgctgtcggggacatattcataaggggctttcttttcgtatacctcgcgcagaagttccattacatttaccatcgcattgtcattgtaggtgatatgtgtgtagtaacctttgggacggggccagaactgaggccagcctccattgggatattgtgctttgaggatataacggataccgtccagcgcactgtctctgtatttcttaatatgagtagccagatacaagcgggagaggtattggatttccgtactggtggcgtcgttgtctatggtgctttcgttcacttcatctttggaagcaagtacatcttccagctcttgttctgtcagttcggcaggcatatagatatttttaggccagccgccggtagtttgttgatagagcaggacattgtcgccaatgcggatggcttcaggagttttaaagaattcgtcgtttaacttgggtgccatctttacccaagttttatacggctttttttctttgtagtttacggtttcttgtgcgaataagtttgtcaggcacaacaaggccagacaacacaggcaaatctttttcatggtcgttgttttttatagttctactgatggcaaaagtagaggaaaaaaattcgcctgatggggaatatttgttttattccaggtattttgttacttttccactgatttgcaacaaagaaatctcgcataatttagtgttatactccgctgaaagaattctttcttctgcatctaaaaggcttttctgtgcttcacgcatttcgatacctgaaaggtttcccagcatataacgctccatggcaatctcatggttttctttagcggctacaaggttctggcgttccaggttcagcatttgcaggttgttctggtaagcttgccataagttgctcaggtctgcacgtaaggcttgttccagttgttcgcgttccaggcgggcattctgaatggcaatacgtgcattgttgcgttctcggcgacggtttccgtcgaacaggttgaaaccgatagtcaggccgaagttggcaccaagattaccgcgttggatgttagtggcgatatcgtatttgttgaaggtatagccataaccgccgttcatcttcagataaggatagtcgcgggaacaaacctttttgtaatccaactgggcaagcgtgttgttttgataggctttcaacagagaagcgttggtttgcagagtcatgttccaaagctcttcaaagtttagtccaccgtctacgttgatcagactgtcttgaataatgatgggctggtctacatcttcgttcgccatcagttcgttcagttggatacgggaggtatgcagcaactcttgctgtttcatatactgggcactgtctgcattgaagtctacctttgcctgttggtaatccagacgggagaagttaccgatgtgataacgctcttccacgatacgcaaacgctctttggacaaagatacggcatagcggaaattattcagacggatcttatgttgcagatagttgtaatattcggcagcgatgttggctatcaggtcttctacggcgatacgggtattggtttcaccttgtctttccaactctttcagacgttggtagttggcggtgatgttgaagccgtcgaagatagtccagttcagattaagccccacgttcatggtctgatcgaatacaccattctctttgacatgttctccggtagcccgcactttgctgtctgtattgtctacggttcctttataacttgcagagagatcaagtgtcggcagataaccggcgtttcccagcgtggcgttgtttttgctgacttgttcctcgttgcgggtaatgcgcagcgagtagttattttgaagcccgtattccaggcaggactttaatgtataagattgcggcatctgcgcttgtaacgcaagcgaggtgctacaaatggctatgagggataaaatcgtacgtttcatgatttctttaacttacttctgttagtagatacataactatatatggcaggtacgatgtacatagtgaggaatgtggataccaacataccgcccactacggctgtacccatggcaatgcgctggttacaaccttcacccgaagcgaatgccaacggtatcaatccgagaatggtagaagcactggtcattaggatggggcgcaaacgttgcaaggatgcatccttgatagcttccattttatcttctccggcttcttgtttcaggttggcaaactctacaataaggataccattctttgccaccagaccaatcaacatgatgataccgatctgactgaagatattcattgtaatatcgttgaagtacatgaatattaaggctccggcaatagccaaaggcacggtaagcatgataatcaacgggtctttgaaactctcgaactgtgctgccagaatcaggtagatcagcaggattgccaatacaaaggcaaacatcagactggaggaactttctctatattctttggagtctcccgtcagtgcggtacggaatgtatcgtccaatgtctctttggcaatcttgtccatctcgtccaacccttgtccgatggttttcccatcagcaagtccggcagaaatagtggcggaaacgaaacggttgtaacggtataattgcggaggagcgataccgccggtcagttcaatcagattgtccaactgcaccatttcacctttatcactacgaatatagatgcctttcaggtcggaaggtttattgcgttgctggcggttgatctcacccaatatctcgtattgctttccattcatatagaaataacccatacgctggccgctcaatccgtattggagtgtttgcgcaatattgcgtgtgcttactcccatgatacttgccttgtcacgattgatgttgatgcgggcttccggcttactgaacttcaggtttacgtcagccatttggaaaacaggattttcataaactttcgccataaataccggtaatacttcttgcagcttttcgatgttggtagcttgtaatacgtattgcaccggcataccaccacgtcgtccaccgaaagaggatgattgttgtacaaacgaacgtgccttggtctttttctgcacagccttcgaaatttgttcggctacttccatctgtgtatagtcacgatctttcatgtccttcaacgtgatacgtacattaccgctaccacttgatacacgtgccgttaccgattctgcatccggcagaatggaatctaccaactgattgatgtcttccgtataatctcgtatgtattcataggttacaccctctgctccacgtgtattgatactgatttgtgaacggtcttccaatggtgccatctcggcagggatggcattccacagaaatacgataattatcaatgttgctaagataagtggcatagccagccagcgcttgtgcaggaatatttccaatgactggctgtagatgcggttcattccttcgaaaaatggctcggttttcatatagaaccagttcttcttttcttgttttaccagcagtttggtggcaagcatcggagtgaaagtcaatgcggcaaaagaggaaatgataacagaaccggataccacgatactgaattcacggaaaagtcgtccagtcataccgtccataaatacgatggggaagaatacggctaccagtgtgatggtggtagagattacggcaaagaaaatttccttggcaccctcgataccggcctctttgggtggcatcccacgttcaatacggacataaatgttttctgtcattacaatggcatcatccaccaccagacctactgccagcactaccgccagcatggaaagtacattgatggagaatcctgccagatacattacgaagaatgctccgataagtgaaacgggaatcacgatacagggtaccagtgttacacgccagtcgcgcaggaagaggaagataatgataataacgagaatgaatgctacatataccgtttcctttacctcactgatagaagcacggataaacttggtattgtcgaaaccataagagtattgcacgtcatccggaaggtctttttgcatctgttccatacgttcataaacggcatcggcaatcttgatgtgattggcacctggttgaggtactacaacaatacctaccatcggtacaccattcattttcatgtaactcttgatgtccgccggtcctaattctgcccgtccgatatcgctgaaacggatgatacggttattatcttcccgcagaatcagattattaaattcttctgccgtatgcatcaatcccaatgtacggatggtgagttccaccgtattaccttcgatactaccggatggaagttccacattttctttatctaccgcattcttaacatcgatgggtgtaataccgtaacctgacatcttgataggatcgagccaaagacgcatggaataacgtttttcaccccagatactaacactgctgacgtctgaaatagtctgcaactgttctttgacagtgaggtctgctatttcgctcagttccagtaaagaacgtttgtcactttgcaatgctaccatcaggatcggtgtagcatccgcatctgcttttgatacggtaggagggtcacagtcgcgaggcagataacgctgggcgcgtgaaactttatcacgtacgtcgtttgcggccgtttccaggtctacggagagttcaaattctaccgtaatacgggatgaaccttgttggctgacactggacaaggaacggattcccgggataccattgatgttttgctccaatggctcggtaatctggttttcgataacatcggcatttgcacccgggtaggagcaggataccgaaatgatgggattatccactgacggatattcgcggacgccgagatagctgtacccgataagtccaaaaagcaggatgataagggtaagcactgtggagagcaccgggcgccgtatgctgagttcggatatgttcataaggcgtctggtttaatagatattatccaatgttacgggtaatcctgtgcggagctgcaatgttccggaaattataattgtatctccggtctgcaaaccctgcaatacttgggtttcagcttctgtacgtatgccagtttgtatttctacaggttgggcttttcccgatttataaaggaaaatcttgtccttacccatttccggaacgatagcttcggatggaacggcaagggcatcatggatttcatttttacttaagcgaatatccgcatagcgtcccggcattacattaccgttggcattggggtagagggcacgcaatgtcaatgtatgggtgttttgatccattctcgactcgcgtgcgtacactttggcatggaacgtttcaagcttaccctcaagtccgaagtttactcctgcaccgatttttacgtcattggcataacgttcgggaacggaaaattctactttcagcggagatacttttgtaagtttggcaacgatggtagtgggggaagcataggttccgacactgacttgacgcagaccgattacaccgtcgaacggagcacggagctcggtttgtgcaatgttagcttctatcaggtctatgtctgcatttagggttgccaattcagtttttacctgctcgtaggcttccttactgactgcatcccgctccaacaatgcattctggcggaatacgcggtcttctgccaatttcagttgggcaacaagacgttgcaactgtgcctgtaaaggccggtcgttcactttagccagcagttgtccttttttaacctggctgccttcctcaaaattgatttctatgattttacctgaggtttcgaaagaaagatccacttcctcatcaggcaacaggctaccgctgattttgatttcatctttgagcagctgtggctttatgatctttgcgtttacatttaatgcttttttgccattgcggttactgctcataactttgtcggcagctgccaattctttattctctttaggaagctgggaataaataccccaacctatcagtccggcaccaatgaaaatgataatgccccatttaacttttttattcatgtatcagtattatatcagatattaagttagattatgtagcactaatttggacatattaggaacagaaaggtttaatgcgaaaagcgttaaaaaaggtaataaagtgataatgtaatagcacaatagcgtgttattatgataggatgataaagtaatagactgataaaacgttatcacattgttgctttatcaatctatcgttccttttaatatgcagcccggtatttaccttcctctttgtcttccaacatgttaaggtatgaggcataacgcgattcgctgatgtagtgttcctctacagcttttcgtacggcacatcccggttcgtggcgatgcgtacagttaccgtaacggcaatcggcagaaaacttaaatatctccgggaaatagtgtcctatttcctcctcttccatatcgaatgttccgaaacctttgatgcccggtgtgtcaatgatatatccgtctcccggaacgggaaacatctcagagaacgtagtggtgtgcattcctttgttgtggtaggcggaaatctcccccgtttttacgtcctgttcaggcaatattgcgttgatgagcgttgattttcctacaccggagtgaccggagaaaagtgttacccgccctttaagttcttcctgaatgagttcaatgccttcaccggttttggcggagactttaaagcagggataaccgatagtggtatagagattgatgaggctgttcatataatgaagttcctcttcattgtatacgtctattttattgaagatgatctttaccggaacacggtatgcttcggcagaagccagaaaacggtcgataaaggtggtggatgtttccggatagttgaccgttacgataagcatgctttggtcaaggtttgcagcgagaatatgcgattgcttggagagattggaagcacgacggataatgtaatttttccggtcttctatttcactgatgagagcagttccttccggattcagaatgatttgtacatagtctcccacagctaccgggttggtactgcgaatgccttttaaccggaagttacccttgattttgcactctacacatttaccttcgtcggtttttaccaaataccaactacctgtattttttattaccagtcccctcactactaattagatgagtaatgaagaatggagatattctccattcttcattaaattattatacggtcatgatttctttgtcctttgcagccagcatatcatcaatttgcttgatgtatttatcgtgaatcttctgcaatttctcctcacctcctttttgtgcatcttctgccaggccgtctttaacagacttctttaggccatcgattgcatcacggcgggcattgcgtacgctcactttggcagtttcgccttcacctttacactgtttggcaagttgtttacggcgttcctcagtcagcggtgggataccgatacggatgatttcaccgttattttccggcatgatgccaaggctggagtcaatgatagctttctcaatcaccttgaacatacttttgtcccaaggcttgatgacaatactacgggcatccggagtatttacggcagctacgttattgatgggaaccatgcttccgtaagagtccacacggataccgtccagcaaacgaacgtctgcttttccggcgcggatgtgagccaatgcttcttccagatacatgacggccatatccattttttcttgcgcttcatctaagatctcttttacttctctcatatttcttagttttgaattgtgcttttagaatttttgattgaacaaaagtagtataattttgtctatttgcaaaatattagctaacaggaataaagcaaattgcttatatttgataatacgaatatctctgcatatactggtgagggagagaatgactgtctgcgatgattttacttagcagttgcgagaaagaaggatagaaatggcggtgtggctatttaatctgataaatatggaattgaaaacagggcagagattttaaaacaaaaaactccggtaaacatctgcctaccggagtctcttactatttgattgttttttatcagttatgtaccaatgtacctatttcttctcctaacattacctttttcaagtttcctattgtatccatgtcaaagacaacaatggggagattattttccttacacatgcatgttgcagtaagatccattactttcagtccacgtttcagaacttcgtcataagtgatatcgtcgaattttgtggcagtcggatctttttccgggtctgcggtatagataccatccacacgtgtaccttttagcatgacatcggcttcaatctcgataccgcgtagagaagagcccgtgtctgtagtgaagaacggatttcccgttccggcagacattataacgacttcgcctgcttccatgctttcgatggctttccatttattataaaattctccgataggttccatgcgtacggctgtaagtacacgtgcctttacgccggtggctactagggcagagcttagtgccagactgttgattacagttgcaagcatacccatttggtcgccttttacgcggtcgaaacctttgtttgcaccactcaatccacggaaaatatttccaccgccgatgacgatacctatctgaacgcccagttcatggatttccttgatctgtgctgcatattcggcaaggcgcttctcgtcaatgccatattgtttttcgcccatcaggctttcgccgctgagctttaacaggattcttttatactttgccatatgatattacatttagtttctgcaaatatacgctttctgtctgtaaagattaactttggtacagaatttttctacttaaagttgcctgcatgatgccacggagagataaatagacgatgaaggcgagccagagggcatgatttcccatccattcgtgtaaagagtaataaacaaggaagaaactgctggaagctaccagcatggagtaaaacatttgtcgggtggcagtggctcctataaaaatgccatcccacaggaaagcggcaaaacctgtaagtgggattgccaatacccaataaaagtaatttccggcttcccggatgacggaggtttcattagtcagcagtcctaggaatgacttgcctccaaagaaataaagcaaggtgaagcctgtggaaagaccgacaccccaaatgaagagctggcgaactgtgcgatataatgccagtcgattattggcaccaacatatttacccaccaacgcttctcctgaataagcaaaaccatccatgatataagaaaatagagtgaataattgcattagcaaagtattgacggccaatactatttctccttgtgccgctccggcagaagtgaaaaatagagtgacaatgaccagacagagggttcgtagaaagatatcccggtttacctggaaaaaacgcagcatggcttcctttttcagtacttcatgccaagcaacgtgctttttaagtcctccataatatcgcctccataataataatgccatcaggaaaccggcatattgagctgtaagtgttccccaagctgccccggcaactttcatgtggaacaggtaaacgaaacaaaggcttgcagcaatattcacaatattttgtgtgatggcgatgtacatcgggaaacgtgaattctgcataccgatgaaccaacctgcgaatccatagagtccgagcatagcaggagctccccatatacagatccggaaatagagtgtagccaatcgctctacttcctctgtagtttgtataaaagtgaatgccagcttccggatgggatattgcaatgtcactaagataatggcgataagcaatcctactccgacagaccgtaataaaagtcgtgcgacttcatccagatcatgtttgccgtatgcctgtgaggtcattccactggtccccattctcaaaaatccgaagatccagtagataatgttgaataacattccgcccacggcaatggctccgatatatgcagcggctcccagatgccctacgattgttacatcaatcagtcccagcaggggaactgttatgtttgatataatcgagggtacagctatctgaagtattcttttattgataatattcggagtttgagcaatcattttaaaactctggtttgttctatttaccgacaaaggtactctttttgtcgcaaacggtaaaaaagtacctgataataacaatttttataatacataatgttttaaaaatgagtatatttgcggtaacaaaaactgggtaatatttaataagagatgagaaccttaactttgctattttcattaatagttactttcccctttgtgctctctgcgcaaacggcgggagaactcctacagaaggtgtctgctgccttgtctgaggggcaggatgattatgttgtgagtctgtttcgtcaggcgatagctgccggagccgatcagactgaaatgtattactggactcaaatagaaaaaaacagtgccgtggctccccgtctggtcaatgagttggcaacctattacaagcgtaagcggaattatgacaaagcttatcttttttacagagaattcttgcagtatcattccgaagatgttcctgcacttgtgtcgtgtgccgaaatggagatgatgagaggcaaggaaaaagatgccgtcaaaacttatgaaaaggttttgatgctggatgccaataatctgcaagccaatattttcctggggagttattattacctgcaagcagaacgcgaaaagaagaagctggaggatgattataagaaaataacttctcctacacggatgcaatacgcccgctatcgtaacggactctctgatgtctactccaatgtttactccaaagcaaaggactatttgcagcgtgtgttgcaactgtttccttccacagaggcgggaaataccttggaaaaaataaggaaactggaagcggaaattaagtaagctgtaataggctttctgcgttttctactgctcttttgcaataataacccgaggcaatctttttattgatctcctttatatttctgaccatttcgttataggattctgcggaaatggatgataatatggagtctaactcttccagtgaatcaatacacacgcctattttgttctctgcaacaaatgaggccaatgctgcttctttccatataattatgggaagattgcagcgtatgtataaggataccttgtgtgggttgtttaccctcaggtatatcccgaaatctcccgagcaagtatggatagagtctccttcccatattaagccaaagtgggcgctgacttgttctattaactgatcagaaggcacaaaacctttaaatttgaacaacgtcttgtcttctattttggcttcctcgaaccctccgccgtaaagttcaaattgccattttgacatcacatcattcaaagagtacaggtatctgtttttcttgtaagtcagtgctcctgcatagatcaccttaattggtttctgattaggttcctgtgtattgttgtttacggaaggagatagataatcgaaaatctccaggcataccataggtttggtgtatccttgttctttcagccatatctccatcttatcgttgtgtacgatcagtacatccgaatggttgaggcgtttgatttcctgctctgctgtcaacttctttcttctgaaagttcccaagtcatggataatcgtgataacctttccccgtttcaagtgtatgatattacatacgaaagagtaatacttcttgaaaggatactggacgactaccacgtcattggcagaaactgtaaacaaaacttttaatactccggcaagggttattaaaaagcctgctatcttgttggaataagtggtttgcggtagtccggcatttttatatcccagtttagagagagtctcttctatatctgtttttgccttattacctgcattgttcaggccattatagtttttggatagataatatcgggtcattattttgttcttttagattgataactcctttttagtgagcaatatggcggatgcaatagtatcatccatatcgaaatatgcatattgtcccaaacgtcctccgaaaatgacacgggaatctttttcagccaataacttatacttattgaagcattttaaattcttttcatcattgatgggatagtaaggttcgtcggaaggtgtgtattcctgaggatactctttggttatgatggttgaaggctgttttccgaattcaaaatgtttatgttcgatgattcgtgtaaatgggtatttagcttcattgtagttgattacggcattaccttgataattgtcaatatccagatggatatgttcaaacttcaggctcctgtaatccagtctgccaaacttatattcaaaatactcgtcgatgcaacctgtgaaaagtatcttttctgctatactctgaaaataaggtatattgttaaaatagttcgtatcgatttgaacatcgatatcctttaacagattgttggtgagtgcagtgtatccatctttagggataccttgatagggatcgttgaagtagttattgttatatgtaaggcggaaaggtattcttttgatgatggaagccggcagttggttggcggggcgtccccattgcttttccgtatattccttaataaaagtgtaatatatgtcgtctccgcaaagtttcagtgcttgttcttctagattagcaggctgggatatgtctttatatttagagcattgttcctgaattttatgttttgcttcttctggagtatttacgttccataacttattgaatgtattcatattaaaaggaagattgtaaagccttccttcgctgtatgccaaaggggagttaacgtaattattgaattttgcgaatctgtttatgtaatgccagacttcttcattgtccgtatggaatatatgtgctccataccaatgtatttttatatcactttcttctttggtgtaaatatttcctccagtgtggttgcgcttgtcaatgaccaagcatttctttccgttttcattcataatctgagcaaaaacagaaccgaataaaccggaacccacaatgagatagtcatatatatactttttcatttatttaatgcttctggtttgcaaagtaacagaaaaataaaatcttatcaaagcatttgaatatgtaaaagtatgtggtgcaatgcaattatagcgttatccgtctggcaaacgagttggctacgtattataaatgtaagcggaattatgataaagcttatttctgctctcatggtgtatgccgaaatggagatgatgcggaggaaggaaaaggatgcatatcaatgcaatgagtgaagcacaaaaatggagggtagaaatagtcttgattattagtgctttacaaggagttaacttcctgtcgacaagaagttaactccttgttgacaaactcctaacttcttgtcgacaaggtcttgatatgagtgaaatatgacttgagttcaagttctaaatgcgacacctgttttttgagtttgtcaaagaatgtattgtacttccttaaacagatatccacgtacctttcctgcctgatcttcaagaataaatcgcccgtccggttctacgcataacaggcgtgcaaggaattcaccgtctgcgtcggcatagcggtggaaaccttcccgacggaaaagagagcgggcatatcgttcggcaatacagttggcggcattgcccgaagagtctgtttgcagaaggatatagtattctttgagtcgcctcatgatattggcgagtatcagatagcgttcatgttcttgtcctgtgatctgctttagagataccgggttgggagcgtcgctccgaaaggtttcctggtttatgttgacaccaataccggaaatgctgcgtccaatgtgatgtccggagaggtcgttttctatcagtatgccgcaaatcttcttttcgttccagtagatgtcattcggccatttgatggaaatgccttttgtccattcgtccaactcctctttgatggaaagggagacgatttgagaaaggatgaactggcgacgggcttcaataaaagtaggatagagcacgaaactgaatgtgatgttccggcaatcttctgactcccaactgttgccacgctgccctttaccggcagtctggcgctcggctatgaccgtcgtgaactctcggacagcggattgctgttcgttgcaaagttgagttaaatagttattcgtagagtctgtttccggcaatatgatcagtgggacaggaaactctgcgggagtaatcatcaaattcagttctttcttcatatcagggcatcatattcggtacgcattttcttggtgaatttctttagtacttcctcataagcatggtcgatgaggctctttatcagtttatcgtccacatctccgtcaaggaagatttggttccagtatttcttgttaaagtggtaggcgccctcaatagctgagtaatgctcacgcaattctattgcatactccggatcacacttcatacagattttgttagagccttccaagtcaatcagtacaaacatcttatccatcactttcatcacaagtgaatactcgtcgaacggaagacattccgttacggcttttttggcgagacagtattcgcgggcggtttctatatccatactttctgtttttaatttctattaatttgcgggtgtccggttacgaaatttgcttgaatttcaccaaatcccatccgcggaacactagggcgattgcgataatttccgtagtacctttcttttcctgtactttcggacaggctacatattgcgccaactgtattcctgcatcttccagcaacttctccacttctgcatctttggcgtcgcgggggcaatacttcacttcaatggcatagctgtacggcatatcgggcagttgcggaaggttgggtatcaggtagaagtcggagaagcctttgttcatttcgtattcgggcattgttatgtagtaactgttcatgcccatatagctgaggagaaagcccttgacgtgcgcttcaccttccatgaattcgcggatggagctttgttcctttagccgggtggcgatatattggaagtagctttcccattcacgggaataagccatgccgtacatcagttgattcagttcgtcaacatccaggttcatgtgtccggcggtgcggtatgcgtctgccagatagccgtatagttgttcacgcaccacttggttggggattgtcagttgcagcatcggtccgcgtgtacccgctattgtcagcattccgtaatagaagagcagactcttgaaattatccgtttgcgctatctccacggcggggaaggactcttttatcctgccaaccgtttcaccctgtgtgatgatttcttgaatgatactggcatttttgccgaagtttttgtctataaggatgaggtggcgcagtttgttatagtcagtgcggcagttggtgtcgagcatgttttcgggtggcagttgcgtgcttaaataactgttcacgaagtagagaaccatatctgaattatacattggcagttcctttagtgaacgacctgagaaacagtaattatcataccacggtttcatcatgctgatcaactcatcgacgggatgaatgatttttccttgctgccggtagtattccagcaattcccgtacttcggcttcggtgaatccgatcatgttgttgaataccgggttggtgctttgattgctggcgatattgaagccacttgtgagatcgtccatcgttacagggctgacaccggtgatgtacatacgttccacaaccctgtcagtatagtctttgacggttttgagaaagttccgcagaaaaccgtcgccatgggtgagggagcgataacgggtattgccgtagttgaccagtacgttgttggcaaagttatcgtattcgtcgaggatgaggtacatcttcaggccttgtctccgcaatgacaggcataccgcggtcagcttctcggaagccacttctttttgttgtaccatttcaagggtgtctggtggcagtaaatctgcatatttcagacaaaagtccgtaaatatcatgtcgcagttactgttgaatgaggcttccattttttccgggtcggagacgatactggagaagctcatcttcagcacaagatacttgttgcggtctggggtaggatgttttcccacgtataagttaccaaacagttcatcaaattgtttttctgtcttacaatcataatagcattccagcatattgaggaaaagactcttcccgaaacgacgggggcggacgaaaaagaagaaacgggcagtctgttctatctgtctgatatattccgtcttatcgacataataatagttattacggataattgcaggaaagtctgtcatcccgtaagggattagcttagtggaatttgcctgattcataaatagagtttttttagaatatttccgaacgaagatagagagttttcccgaaacgggcaagaagaattacgaaaatgctgtgtaaaagcacttttcatgtttgattcagaacattggcggataaaatgcatctttgatatgctttatttcaaatgcatcagcttcaccgacaacggtaatgatatcaaagcggacaggggcatcaatactgaaatgtttgatgtaagcatcagcggctactacaatatggcgtactttctgccagttaacagcatcttgcggttcgatgtactctgtattactacgggttttcacctccaccacaattaatagtccgtccttgactgccacaatgtccagttcgagacggttttttcgccaattacggtggttgatggtgtatccgttacgttccagatacgccactgcggcgtcttctcccgtctttccgagggtattgtgtgctgccatacctatattcgtccttatttttagctgtttctatgcaaaaatacgttttttctgctttgtatttacagaagtaaaactaattttgcaggaaatatgagaaagagagataaaacgtgtgcgaaagcaacacccgaagaacccaaacgcgaacagcgtattgtttgcctgatgagcgaggaagagctgcggattgtagaccgttatctggagaaatacaagataacgaataaatcgcggtggctgcgggagactattctcatgtttatccataagaatatggaagaagattatccgacccttttcggtgagcatgatatgagacgataaagagaattctttaatcctaattaaattgaagcggatggacgataactattatatgaaacaggcgttgattgaagcacgtaaggcttccgaaagaggagaagtacccgttggcgcagtcgttgtatgcaaagaccgtattatagctcgcgcccataacttaacagaaactttgactgatgtgactgctcacgctgaaatgcaggctattactgccgcagcctctactcttggcggaaaatatctgaatgaatgtactctctatgttacagtagagccttgtgttatgtgtgcgggggcgattgcttgggcccagatgggaagacttgtgtttggtgccggagatgagaaacgtggatatcagcgttatgcatctcaggccttgcacccgaaaacggcagtttcacagggcgttcttggtgaagagtgtgcagtgcttatgaaggatttttttgcggcaaaacgtcgctgaattctaatatagttcctttttttgatctgtatttcgtattttatccgtatatttgactacttaacagattcttaaaatacattatgtaatggaatatcatcgtatatcttttattcacaacgatacagagtattcatttatcaaagctatgaatgacaggttagtgggatatgccttaatgtctgcttgccgactggaagttcaaatttatatgaaggagaataatctgagaggtaaatacattcttaccggtatggcaaaaatctgattactctttaatttcttcaaaatccacgtattctccttcatctttagagaaaagtttcttgtgttttctatggatatcatttccaggggaagttgtttctccgttggattgcgaagaagcatcttgttgttgatcacccgagaaagaataacctctaccggattgataacttcctccgccattctggtaagtacctgaagaactatgacgtttccccagtccgaaaactgttcggagaacggtgccgatgatgctgagtccgatgaccagaataacgactataatgacaaataaaaatcctaagatgtgaaacatgggctaatcgtttttatatattgttcgtcttacgaacgatagtacaacaaccgtgccaaaagatttgtttagagcttctttctcacaaaccagcacagaatgatgtaccagccaatgacagctgcaagtcctacaaaaataagcaaaggaatgctgactatcaaaaacaaataacggattttattttcttcccaagagaaattcttcagtttgaaggcgaacattgggaattcagataccagtaacagagagaataacacgatgcaaatcaataaaccatacaggactactccaccttgtatcagccaatcatggtattgtgccgctgctgctgcccaaaataaggtattggcaggagtatttaggccgatgaatgagctggtctggcgttcgtcaatattaaatttagccaaacgcaatgctgaaaatacagcaatgaggaaagcaaaatagggaacatattcttgaaaactgctcatccagtcgggataagtagtttcgcgtaatagagagaatacaattactgagggtactactccgaagctgacgtcatctgccaaagagtccaattcttttccaataggagaaggagcattcagcaaccgcgctgacattccgtcgaggaagtcaaatacagcgctgataataatgaaggtaagagcccattcatacttgaactcgaaagccataacacatgcaatacagcctgagaacagattcaggcatgtcaatgtattggggatatggcgggtaatacagttaggcattgtttagttattttagtttggctatcacagtctggtttcctgtagtggtttgtcccatctttacgagcacttctgtacctaacgggagatatacatctacacgggaaccgaatttgataaagcccatgtgttcatcgatataacagtcttcaccgggttcggcataggtgacgatgcgtcgtgccatcgctccggcaatctgacgtgccattacttctacaccttcgggagtttcaattaccactgtagaacgttcgttgtccgtactggctttcggtaaccaggctttcatgaactttccgttatgatgggctaccttcttcacggttccgtctaccggataccaattagcgtgtacattgataacactcataaagatggaaatcatgagccgacgatcgtggaagtattcattctcatccacttcttctataactactattctaccatcggcaggtgccaccactattttctcggtgtcttcctggccaaacaggcggatagggcatcggaaaaaattcaccagcattccatacaggacaatacttaccacagctacgatatagaatggcaatttgcattctaatccaaagtagagagcggaattaacaaccagtagcaacaataaactgccggccagtgtatgtgtcccctcacggtgaattcgtatcttttttagtttttttagtcgactcatgtaagttgttttattcttcgaatagaaattatcggcaaaaataggcttattttgaaaatctaacaagcatttggggcgagaaatgcagatgttgataacttttagggaaatatttttgttaggtcttatatacgttgtacttttatgctctcaattgaaaggagatatttatgcaggattttgttcatttgcacgttcatacccagtactccctcctcgatggtcaggccagcgtaagcgcgttggtggacaaggctatgaaggatggaatgaaagggatagccgtgactgaccacggtaatatgttcggcattaaagagttcacaaattacgttaacaagaagaatggtgggccgaagggagagattaaagatctcaaaaagcggatagccggtattgaaagtggtgagatagcttgcgaagacaaagatgcggaacttgctgattgtcgtacgaagcttgcggaagcggaaaataagttgttcaagccgataatcggttgtgagatgtatgtagcacgccgcaccatggataagaaagaaggtaaacccgaccagagcggttggcacttgattgtgttggctaagaatgagaaaggatatcataatctgataaaactggtatccagagcctggacagaaggatattatatgcgtccgcgtacagaccgtaacgaactggaaaagtatcatgaaggattgatcgtctgttcagcttgtattggtggtgaggtgcctaaaaagatacttaacgaccaattggaagatgcagaagaagccgtgcgttggtacaaaaatctttttggtgaagattattatctggagttgcaacgccataaggcaaccgtgccccgtgccaatcacgaagcttatccgctacagcagagggcgaatgccaagctgatagagtttgccaagaaatacaatatcaaacttatttgctccaacgacgttcactttgtaaacgaggaacatgctgaggcacacgatcgtttgatttgtctgagtacgggtaaagatctggatgaccctaaacgcatgctttataccaaacaagagtggatgaagacaaaagctgaaatgaatgaattatttgcagacattcccgaggctttgtccaatacgctggaaatcctaaataaagtagaatattattcaatcgatcatgcgcctatcatgccgacttttgctattcctgaagatttcggaacagaagaagggtatcggcaaaaatatactgagaaggatttgtttgatgagttcactcaggacgaaaatggtaatgtagtattaagtgaagaggctgccaaggctaaaatcaaacgcttgggcggatatgaaaagttatatcgtataaaattagaagcggactaccttgccaaacttacttttgatggtgctaaaatattctatggtgatcctctgtccgaagaagtaatggaacgattgaagtttgaactttacattatgaagacgatgggtttcccagggtacttccttattgtacaggacttcattgctgccggacgtaatatgggtgtctcggtaggtccgggacgtgggtcggcagccggttcggcagtagcgtattgcttgcagattacaaaaatcgaccccattaaatatgacttgctgtttgagcgtttcttgaatcccgaccgtatctccttgcctgatatcgatatcgactttgatgatgacggacgtggtgaagtgcttcgctgggtgacacaaaagtacggtcaggaaaaagtggcgcatattatcacatatggtacgatggctaccaaacttgctatcaaggacgtggcccgtgtgcagaaacttcctctgtcggaatctgaccgtttggccaaattggttcccgataagatacctgataaaaagctgaacctgcggaatgctattgattatgttcctgaattgcaggcggctgaggcttctcccgatcctttggtgcgtgatacgctgaaatatgccaaaatgttggaaggtaacgtacgcggtacgggtgtgcatgcctgtggtacgattatttgtcgtgacgacattaccgactgggtgcctgttagtacggctgatgataaagaaacgggtgaaaagatgctcgttactcaatatgaaggttcggtaattgaagatacaggcttgattaagatggactttctgggattgaaaacattgtcaatcatcaaggaagctgtagagaatattcgcctgcaccgcaagctggagttgaatatagataaagtgcctattgacgatcctgctacttataaactatatagtgatgggcgtacgattggtacattccagtttgagtctgccggtatgcagaaatatctgcgtgagttgcaaccttctacttttgaagacttgattgcaatgaatgctctctatcgtccgggacctatggattacatcccggattttatcgaccgtaagcatgggcggaaaccgattgagtacgatattcctgtcatggagaaatacctgaaggatacgtatggtattacggtatatcaggaacaggtgatgcttttgtcccgtctgttggctgacttcactcgtggtgagtccgatgccttgcgtaaagcgatgggtaaaaagctacgtgacaaactggatcacatgaaacctaagttcgttgaaggcggacgtaagaatggacatgatccgaaagtacttgaaaagatttggggagactgggaaaagtttgcatcctatgcttttaacaagtctcatgctacttgctattcatgggtagcttatcagacggcctatctgaaagctaattaccctgccgagtatatggcagccgtaatgagtcgaagtttgtcgaacattaccgatatcactaagctgatggacgaatgtaaggctatgggtatcaaagttcttggtccggatgtgaatgagagtaatctgaagttcactgttaacccggaaggaaatattcgttttggtcttggtgcagtgaaaggtgtgggcgaaggtgccgtgctgaatatcatggaagaacgtgagaagaatggtcctttcaaaggtatattcgactttgtgcaacgcgtcaatctgacagcttgtaataagaagaatctggaatgtctggctttggcaggaggtttcgatgagttcccggaattgaaacgcgagcaatattttgccgtgaactctaagaatgaagttttcatggaaactttggtacgatatggtaaccgttatcaggcagatcaggcagctgccgccaattccttgttcggtggtgagaatgtagttgacatagctactcccgaaattcctgaagctgaacgttggagtgatctggatcgtctgaacagggaacgtgatctagtgggtatctatctttccgctcatccgctggatgaatattcggttgtgttgcaacatgtttgcaatacgcgtatggctgaactggaagacaaagcggcacttgccggacgtgaaataacgatgggaggaattgtaacttctgtacgcaggggcatcagtaagaatggtaatccttacggcatagccaagattgaagactattccggttcggcggaacttcctttctttggtaatgattgggtgacctaccaggggtatctgggtgaacgtactttcctctttataaaagcgcgttgccagccaaaacagtggcggcaggatgaattggaagtaaaaattacctctatggaattgttgccggatgtaaaggagaagttgatttccaaaatcaccattctgataccgctttccgtgctgaaccaggctttggttacagagcttgcggcgctaatgaaagggaatcccggaacgacggaactttatttcaaagtgagtgatcctgatagtaagacagtggtagatatgatttcccgtccggtgaaactttccgtaggacgtgagttaatctcttatttaaatgatcgtccggaactggaattccggataaattagtatctttgcttccataaagattttgacagtaatcattaaacattaaataattaatcaataacgcaatggctttagaaattacagacagcaactataaggagatccttgcagagggtaaacctgtagtaattgacttttgggccccgtggtgtggtccttgtaaaatggtaggtcctatcattgaagaattggcagaaatgtacgaaggacaggttcttatcggtaagtgcgatgtagacgaaaatggcgatgtagctgctgaatacggtattcgtaacatccctactgtactattcttcaaaaacggtgagttggttgacaaacaggtaggttctgcttccaaatcagcttttgatgataagataaaaaaaatgctcctctaaagagcataatataaataaggtattaacccttaaaaaaactaactattatgggactggaagacgatttcttaaaggatgatctcgatgacgaaaaaaccatcgaatacatcaagaattatttgccgcaggagttaaaagagaagttctctgacgacgaattctattatttcctcgatttgattgacgagtattattctgaaagcggcattctggatgtagagccggatgaagaaggatgtgtcgaagtggatctggggcaaatcgtggattacatcatcaaggaagcccacaaagacgagatgggtgactatgatccggaagaaatcctgttcgtggttcaaggtgaactggaatatacggagtcattggatgatgatgaagaatagaaaggttcagttaagtaaaaaaggagtccggacagtttgttcggactttttttgtggaattattccacacttgtagagcagattctacactcttcattattcttgttaagccatttaatgcgttggctatgaataataaaggtgcaaccatcgaactttggcacgccagttgtgttttttatttatagggtttttaacattaacataaacagagagcttatgaaatcgtttttaaagaagagagaaatcagaataacgagaaggcaggcagtgattgccgcaatagctgtagtggtgttggtagcaatttattggtttgttacccaccgaccggcacctgcaccggatcttccggtggtagctgtggaaccggtgatacaggatgacgtggaaatctatggtgaatatgtaggacgtgtccgtgcccagcaatttgtagaagtccgtgcccgtgtagaagggtatctggaaaatatgctttttgaagagggtacttatgtgacgaagaatcaggtattgtttgttatcaaccgcgaccagtatgccgcgaaggcagacaaggcgcgtgcgcaactaaaaaaggatgaggcacaggtacgcaaggcacagaacgacctggagcgtatccgtcctttatatgaacagaatgctgccagtaggttggatttggataatgcggtggctgcctatgaaacggctgaagcaagtgttgctatgagtcaggctgacctggatcaggcagagttggaattaggatataccattgttcgctcaccgcttgcagggcatatcagtgaacgatatgtagaccttggtacgctggtggggacgggtggtaagtctttgcttgctaccattgtgaagagtgatacagtactggtagactttagcatgacagcattggattacctgaaaaccaaagaacgtaatgtgaatctgggacaaaaggattctacccgttcctggcagcccaatatttctataacactggcagataacactgtttatcccttcaaaggtttggttgactttgctgaaccgcaggttgacccacgtactggtacattctctgttcgtgctgaaatgcccaatccaaaacatgtattacttccgggacagttcactaaagtgaagctcttgctggatgtacgggagaatgcaacagtagttcccctgaaatccgttatcatcgagaaaggtggtgcttacgtgtttgtaatgcgccgtgattccactgtagaacgtcgttttatagagttaggccctgaattccagaaccaggtagtagtggaaagaggtctggtgccgggtgagacaatagtggtggaaggataccacaaactaagcccgggtgtaaaagttaaggttaataatgccctgttgaagaaagaagaaggggaagaagttgacgagagaagaaggaaacaaggtgacaaggagccttcggtataatagttaaatcaggattgcgtaaatatagcgtagcccttgtccccttgtcaactaacctccttgtcaactaaattatcataaaaaaacagacgcatatgaaagtaagtttctttatagacagaccggtattctcggctgtcatctccatactgattgtcattgtgggtatcatcggattgacgatgctccccattgaccaatatccacagattacgccaccagtggtgaagattagtgcttcgtatcccggtgccagtgcactgacagtatcacaggcggtagctacacctatcgaacaagaattgaatggaacaccgggaatgctctacatggagtccaacagttccaattccggtggcttttccgctacagtgacatttgatatttccgctgaccccgatttggcggcagtagaaatacagaaccgtttgaaactggcggagtcccgtcttccggcagaagtggtacagaacggtatatccgtagaaaaacaggcagccagccagttaatgactatctgtctgatgtcttctgacccgaagtttgatgaaatctatttgagtaacttcgctacactgaacgtactcgatttgcttcgtcgtattccgggtgtagggcgtgtctccaatattggtagccgctactatgctatgcagatttgggtgcaaccggacaaattggcaaacttcggactgaccgtagccgatttgcagaatgctctgaaagatcagaatcgtgagtccgcagccggtgtgctggggcaacaacctgtacaaggattggatattaccattcctattacgactcagggacgtctttctactgtagggcagtttgaagaaatcgtagttcgtgcaaatgcggatggttccattgttcgtttgcgcgatgtggcacgcatctcgctggaggcatcttcatacaatacggagagtagtatcaacggtgaaaatgcagcggtgttaggcatttatatgcttccgggtgccaatgctatggaagtggcagagaatgtgaagaaggcaatgaatgaaatcagtaataattttcccgacggattgagttacgagattccatttgatatgacgacatatatttcagagtctattcacgaagtatataagactttgtttgaagcattgatattggtaattatcgtggtgttcctgtcactgcaaagctggcgtgctacacttattccgattgtggcagtacctatttccctgattggtacgttcggcttcatgcttatattcggtttttcgctcaatatacttacattgcttggattggtacttgccatcggtattgtggtggacgacgctattgtggtagtggaaaacgtagaacgcattatgcacgaagagaaactgccaccttacgaggctacgaaaaaagcgatggaaggattgacgggagcgattatcgctacgtctctggtattggcggctgtgtttgtaccggttagtttccttggtggtatcacagggcagctttatcgtcaattcacggtgacaattgtggtttccgtattactttctacggtggttgcattgactttgagtccggtaatgtgttcgttgatattgaaaccggaatcgcataagcgaaagaatatcgtattccgttatattaactatgcactgaatatgggcaaccgtaaatatgttcgccagatttcacgtgtgataggaaatcctcgcagagtactggctgcatttggtgtggtactgatagctatcttactgataaatcgtttgataccgaccagtttcttacctgtggaagatcagggttacttcaaagtggaactggaactgcccgaaggcgctacactggagcgtacacgtactgtgtcggagcgtgcagtagagtacctgatgttgaatccggctgtagagtatgtgcagagcgtggtgggtagcagccctcgtgtaggtagcagccaggcacgtagtgaactgacggttattatgaagccgtggggggcacgtgacggacaaaccattgatgaggtgatggcacaagtgaaaaaggatttgcaggaatatcctgaatgtaaagtatatctttccacgccaccggtcatcccgggattgggaagctcgggtggttttgaaatgcagcttgaggcacgtggagatgccacattcgataatctggtgcaagctacggatacattgatgtattatgcatcacagcgtaaggagttatccggactgtcatcatctttacaggcggatattccgcaactctatttcgacgtggatcgtgataaggtaaaactggcgggagtgccgttggcagatgtcttttcaaccatgaaggcttatacaggttcggtatatgtgaacgacttcaatatgttcaatcgtatttatcgtgtatatattcaggctgaagcaccttatcgggaacacaaagaaaatatcaacctgttttttgtacgtggggcggacaatgtaatgataccgttgacttctctcggaacaacttcctatacaactggaccgggtagcatcaagcgcttcaatatgttcaacagtgccgtaattcgtggtggagcggcggatggttacagttccggtcaggccatggaaatcattgagcagatagctcgcgaacacttgccggaaaatataggtgtagaatggagtggactttcttatcaggagaaacaggccggaggacagacagcaatggtattggcattggtattcctattcgtattcctcttcctggcagcactttacgaaagttggacagtgcccattgcggtgttactttcattgcccatcgctgcgctgggagcctacctcggagtgtggctgtgtggattggagaacgacgtctatttccagatcggattggtaatgctggtcggtctggcggcaaagaatgcaattttgattgtagaatttgctaaagaacaagtagatcgtggagcgaatgtggttaaggcggctttacatgcatcgcagctgcgcttccgtcctatcctgatgacgtcattggcatttattctcggtatgttgccgatggttattgccagcggaccgggctcggcaagccgtcaggctattggtaccggtgtattctttggaatgattttagctgtgacgataggtattcttttggtaccgttcttctttgtactgatttataaggcgaaggcaaaagcgaagagtacgaatattaagaaagttacgaagcgatttaaacgataagttatgaaaagaaaatatacaatatattacatgatggcgttggtgttattgttcagttcctgccagttgggtaaacattatgtacgtccggaactgaacctgccgcaacagcttgactcaacggaacaggacacgctctctcttgctgaccggcaatggtgggaactctacaccgatactacgctgcaagcgctcatagagcggacgctcgaatataataaggatatgaagatagctgccgcacgggtgaaggaactggcagcaatgaagcgcattgattttgctaatcttttcccacaagtcagtggaaagctgtatgcggacaaggaagcggaaaactatggcggagacaattatgattcagaccggagctatgaagctaaggcaatcgtttcatgggaagtggatctttggggaaacttacgttgggcgaaagataagagtatggcggatttcttaggttcgatagaggcgcagcgggcactgaaaatgagcttggtggcagaagtggcccaggcatactttgaactggtagctttggataatgaactggccattgtccgtcagacactgaatgcccgtaaagaaggtgtacggttggcaaagcttcgttttgaaggcggactcacttccgaaacctcttatcagcaggcgcaggtggaatttgcacgtactgcaacattggtaccggatctggagcgaaagatttccattaaagaaaatgacattgctttcctggcaggtgaatatccacgaaagatagaacgctcggtgttacccgaagaggttaaattgccggaaaatcttcctgtaggacttccttccacattgctggaacgccgtccggatgtacgtcaggcggaacagaaattgattgcggcaaatgcgacagtaggccttgcgtataccaatatgtttccccgtttggctctgacagcacattatggtttggagagtgctgaattctcggatttcctgaaatcaccttatcatttcctgagtggttccctgttgacgccgttatttgcgatgggtaagaaccgggcgatgctgaaggccaagaaagcagcgtacgaacaggaggtttactcttacgagaaatcagtgctgacggctttcaaggatgcgcggaatgcgattgtagatttcaataagataaaagatatctatgagtcacgcctgcaactggaacaagctgcacaaacaaatgtggagttggctcagttacagtatattaatggcgtaatcggatatctggacgtgctggatgcacaacgtggatatttcgatgcacagatcggattgagcaatgcgatacgggataagcagataacactggtgcggttatataaggcactcggtgggggatggcagtaggagggttaaacctccggtgtattcaggaagaagaatacagacatcccgataagaatgattcccagtacgccatagaataaccgggcacgttttcttcctacactctttacggcgaactgtgtgttgcgggcagtgaaaaaccactcccagtcaaacacagccgccagtaatgagatgatgccggccactacgaatataccttgtacgatgtattggctcataagatattaatccagattttccattgtcaacttgcgcgaaccgtcttccagttcctcaatagtcactttaattgtgttgccaggcaacagttcttccactagttccggccattcaatgaaacagagtgcaccactgtagaagtaatcttcgtatcccatatcatatacttcttccagcttcttgatccgatagaagtcgaaatggtagatcaattctcctgctatgtccgaacgatattcattgataacggcaaaggtgggtgatgtaacgacgtcttcaacgcccaactcctggcaaagtgccttgatgaaagtcgttttaccggctcccatttttccatagagagcgaaaacagtattgtcccccatagcagcgataaactcgcgggcggcttcatggatgtgctccagagattgaattttaatttccatactatatttaattatgattttactttcagtttcgtccacttagtgtgataagtgggataatcatctcttccatcgaaatgcctccatgttggaaggtatcggtgtagtagctgacgtaatggttgtaattattgggataggcaaagaaatcccgacctgtggcgaagatatagcgtgtactcacgttgggtgaggggaggtgtatctcagaagggcgggtgatttcaaacacctgtttgggattgtatgccatgttgcgtgacagtttatagcgcaggttggcattaatttctttactgttgctttgcacctttaccgggttatctacgcgaatgctgccgtgatcggtggtgatgataacccgatactgacggctggcaagtgctttcagcaagtcgctcagcggtgaatggcgaaaccaggaaagggtgatactacggtaggctgcctcggtagaggcgagttcacgtatcattttgctttccgttcggctgtgactcaacatgtcgatgaaattgaatacggcaacattgaggtcattctgcgctaaggcgggtagttgtgccagcagacgttctgcactggaagcatcgtttattttatggtaagagaaagtatcattgcggcgatagcgttctataatggtacgtatcagtggagcttcattcaaatttttgttttcctcttcgtcctcatctatccataattcgggaaaaagcttagctatctggtcaggcatcagcccggaaaagatggcattgcgggcgtattgtgtggcagtgggcagaatgctgaaatagagttgctcttcaatgttgaataaaccggataattcattggcaagaacgcgccattggtcgtaccggaaattatcaagtacaataaagaaaatcttttcacctttgtccagcagagggaaaaggatacgtttgaaaaggtccgggctcatcagagggcggtcggtgttttccgaagagggtttgcgtgtgttagttgcccctttttcgtccgatacccagttggcatagttcttctttatgaatttggcaaaggcagaattagcttctgctttctgcatggcaagcatctcgctcatagggctgtctgtagcttccaattccagttcccagtataccaggcggcgatataattccatccagtcggttgccgtcagtgagtcattgatttgcatgcctatcttaccgaaattttgttgataagcggtttgtgcagcttcgctgactatatcccgacgatgcagattcttttttagcgacaacaatatttggttaggattgacgggtttgatcaggtaatccgcaatcttttgtccgatagccatgtccatgatattctcttcttcactcttggtgatcatgataacagggacggtggggcagatttcttttattaatgccagagtttgcagaccactcagtccgggcatgttttcgtccagaaagattaggtcgtaggttgtagcgcggcagcggtcgagtgcatcctgtccgttggttacggtatctacttcgtagcctttgccttccagaaacaggatgtgcggtcgcaacaaactgatttcatcgtccacccaaagtaatctatctctcttcatatctgttagctatttcagtccccaaagataacaccattttccgggtcgtcctcttccgtaggcagattttcttctctctgtcgttcttcttcctctgtcggcaggttcagcagaggttcatccagtgtatagccttttagttccggttccggtatggaagagaagtgtgtacggtagaaggcatcataatcatcgaaactatattgtttgattaattgcgcatagttggcctccgagatgagtatggcacgcataccactgagccgtgccgccatttcgggatttgcataaagtcgacggaaatactgctgtgtttcatcgtaattgttgaacggacgaatttgcaacataccgataccccgttcgtgagcaaatgcaaggtcgaagttcttaaccaggaaagtggagaaattatagcgtgccacttcaaacagaagcatattctcgtttacttttccttcttcataagcaaggataaagaggaacggtacgttgcgctctgtgctgaaagcactgtccggtgggagaatagcggtactgctcgaactgtcgcccaacaagttgcctgcctcggccagttcggcactccgtcgttgccagatagaaccgaatgtatggctgtcacgggccagcagacgtccttcctgtacgcctttcagtatatgggcggccagatcggtgatttcgttctgcggatattgctgtacaagttctttcagagtggcgaggaacctctctgtttctcctccctgcagtcgggtgacggcttcgaggaacataaacttcgggcggtgttgccctaatggatatatttcggaggaaagatgttcggcagcccgcacggtggctgtgtctcccatctggaaatgctcataagcacggacatagagtgaatcttcacgttgtttaccatgtacggcattctctgcgaaatccgggtcagccagtgtcttggcataacgactttcggggaatcgggcgataagttcggctttatatttttcagcggaactgccttttttctcataatattctatagccaattccgtcaggaataactgataataggcttcatcagcttgcgcgaagtccgggaactgccgtatgagcctttcgaacatggcttctgcccgttggaaatcgtgcatacgatccttgaaaaccattccggcaccgtataaagcttccgatagcaatgcgttggatgcctgcatggcctcttctgtcaatgggatctgtgccagatagtattctggacgatgcgtatcattggcgatgctgtcggtagttccctttttaggatctttttctggggaggcagagctttctgttgcttcattttcctgactgttcgggatactgtctttgggggcaatatcttccgattcactgtaatctatttcttcaaaatcgtccaatgcaaccacagtcttatttttccttcgccagttgtcttccagttttctacgtccccacaaacgttggaactctgcttttccctgctccactaattgcggattatagaaataccaatcctgctttccacctattgccggctgggtagtttgtggagtagtggtattcctttgcccaggtttgctgataatcgaagttgcaggtaactgactttccgcttcttcccgcatctgcaggcggtttgtttcccgctctgcttcttcggccgccttgcgttctgcttcctcccgggcgatgacctgtgcaatgatgttttctatgacggccattcgttccgcctccggcatcccggcaaggtgctgcaaactatcctgcaactgtatggtattggtatgaggtaccagttcgtccaatatttccgaacgggtggtaatgtcggcatattcccggtgtgtcttatctatcaatcctattgcctctgcatatgctttctgcgcttcagcatagcgtgcctgctgccagtacaagtttcctaatgtcagttgaagaattcctttctccacaccattacgggtgctcttttctattcctttgtgatatgcggaaagagcctgcgccgtgtctttcccggccaggtaaacattacccaatgcatagtaaatctgatccagatactcttcgtttttctcgtctttgctcagccgcagtagcttccctgttatcttacggctattggcggtgggcatcacttccgtctggcggatacgggcactcaatgccagttcgtacggagggttgagacgaattactttgctgtatgattgataagcttgttccggttgttgcaatagctggtaagtctgtcccaggagataatagcatcgcgctttttgctgtttgttcttctcgtttttggctgtcttttcaagatgagggatggcttctttgtatcgctgactgcccaacaggtagtttcctgttgccgaagcataagggactgccagtgatagtggcagactatcgttatttacccggttcagagcatcttcagcatcgtattgccaacccagtgctgagtagcagcgggatagccagatcagagcttcggaagtgatattcgtctgtccgtcatagaggcgcacgatataagaaaaggttgaggcagcttccgggaaatctcctttctgatattgtgcttttcccaatagcagccatgcacggtgtatgaaaggattgaactcccgacgtgccagccattttttgtattcgtccgtgtatgcccgtcctggtttacgtatggggcgtcgcttgatagaatgttgacgaatagctttttgcgctttttcaatggctcgctcatagtcggaagtaccgattcctgtggtttctttattgccgatgggatagagggggagcatttccatgtagttatccttattcccttgttgctgtgcctgcaatccggctttataagcttcgtttccgttgaagtagacgttgtaacgggtggttagggcatgatagaagcgtgtgccggctgtattctttcgggtagaacatccggcaacgagcatcaaagtgactaagatgccagtgaggaggattgctttgcgtttcaactatgccagtaagttttacgggttctgcgttttctgccgtaaagataaataaaaactctttcccagcttacatactacgtatataatgatggaaaagaagatgatagctgcgccggaaggaacgttgagatagtaggatatcattaatccgcccaggcaactgagataaccgatgccgatggatagccagataatgcggtggaaacgatgcgtaaacaaattcgcagtcatttgtgggatggtgagcagggaaataaccagcacaatgcctaccatgcgcagacatgccacaatggtcagtgcaatgaacatcatcagtacatattcgaatatttgtacgggaataccttgtgaacgtgcaaattcccggtcgaaagcaacgtaaataatcggacgcaggtataggataaagaaaatagccagtatcactgcaagtcctgccagcaaggcgatgtctccgaatgtaatcgtcagtatattaccgaacagataagcggacaaatcaggtgcgaacccgggtgaaaggaaagtgaacatgatacccaatgccatccccagcgtccagaataccgcgatagctgagtcctcacgcatatcattgcgtttgctaagccattccacgccaaaagccgacagtaccgcaaacactccggctgccagaataggagagactcctgtatataatcccagaccaattcctccgaaagaagcatgtgtcagtccgccactaatgaacaccagtcgcctcgttacgatatacgtaccgataagtccgcaaacaatgcttgccagcaaactgccgatgagggcatgttgaaagaaggtgtattgtagtagatccactttaaaatctcctctctcctataatcaggaatatttcatctttgatattgtttggcagagctattccacgcagttgcaaactgcgtacccatccggcaacgtcgatgtcctgcatcgtatagaatacgtccctgaattcatcttcctgttcaggagtgtaatcttcgggggcaatgccgatgtacttgtccagttcttcatcatcgtagtactctatctttttgctgacagcagctaacagactgtcccgttcgcatatttcgtgctgtccgcagcattctgcgtcggcctctttcacttcaggcatggcatccagttctccgcgctctattttcttttgcaagcgttggttacggatgtatcctgccaaaagggcgatacagacaagtgcaataagacttataattaatatccacatagcttattcctctatttcaatcccaaatcctacttgtttcaaatcttcccagtatcccggataagacttggacaccacttgcggatcggcaatccgtatggatggcgtccgaaggatggcgggtgcaaatgccattgccatccggtgatcttcataagtcgcaataacgggatgggaggccggttcgtagcgttcaccgttccagattaatatactgtcctgttccgattttaccacatatcccagtttattcaattctgtgataagtgcctgaatgcggtcggtttcctttatcttcaagctctgcaatccggtaaatcggaaaggtatgttcattaaacaacaagtcacaacgaaagtttgtgccaagtcgggtatatccactaaatcttcctttaaacaggtaacgggagttcccatcttagtcagtatcactccttggtcggtatatgtggtgtgtacaccgagtttggcaaatatttcagctccccgactatcgccctgatagctgcgtgggagaagtccgggtaattttatttccgtttttgtagattcctttttttcattatcctgaattaaggcaaccatctgataccagtaagaagcaccgctccagtcactttctactgtgaaaggtatgtctctgtactttcccggacggacggtgatactactttcagaactccaggcagcgtctgcaccgaattctttcattagttgcagtgttagattaatgtaagggcgggaaatgatttctcctgtaagattcaacctcaatccgtttttcaggatggggccgatcatcagtaaagcagatatatattgtgaactgacatttccggcaaggctgatttcttcgcctgttaattctgtacctgtgatgcgtaaaggtggaaagccttcttttccggcatactctatctgtgcacccagttcacgtaaggcatccaccagaatacgtatggggcgttgttgcatccgttcggtaccggtaatgatgcgtgtacccggtgttacactgaggtaagccgtgagaaaacgcatggcggttccggcggcaagaatgtcgatatgtccgggattcccgtccagtgcttttatcatgacacgggtgtcatcgcaatcgctcaaattgcttggcgcgatatgcccttgggctaaagcgtgtaatatcaaagcccggttgctgatacttttggaagccgggagctggatagtggtatgcaaagtggctggtgccgaaagtttatagcgcatagttgtattccttcttaaacgtaatagcgggtttacaggctacaaaagtacgataaatatctgaataaagaaacttgagttacatgacttctatccgaactgtgcacagatttgtttcgtatctgctctgtgtctgctccgtacttactccgtatataatagaggtatcactgaccgaataggctacggagtagttacggagatgacacggagatagtatggagatgacacggagagtatacgaagatggcatggagccgttctgaaatgaattccatcaacgggttatttaagaggtgcgtagaacgcaagtaatatatgtatacgaatatcttttttgcgtaaggaagcttactctcagattatcaaaagcttacaaaatattaattcccagtcgacaagaagttaagagtttgtcaacaaactcccaacttcttgttgacaaactcttaacttcctgtaaatggaaaaatagtatttttttcggtttccttacagtctcaggattacaaatccgattgaacggcggttataacacaaattcctgatagttctctttgtttattactttgaaagacgcttccggataagctgttgcgaaactggtagggacattcggttttttgtctccccacttgaattcaaaagcggataaaccttcgggtgattcttctattagatcaatttcttgattgtcgtatgttcgccagaaatagaattctttggctcggttacgattataagattgcttcattcgttcgctgattaaatagttttcccatagtgcgcccacatcttggcgtacagatagaggggtgaaatttccgatgattgcattgcgaataccgttatcgtaaaagtaccattttccggctttcactacctctttacggagattgcgtgaataggctcccaaacgatacaccacgaatactttggataataagtcaagatatttttcaacagtatttttgctcattcccaattgcttacctaattcgtcataagatacttcactgcccatttggaatgcaattagacgcagtagttccttcatcttactggaatttttcaaaccgtcgattgctaaaatgtctttcaatagataagctcctacaatatctcgtagataatcagttttccgctcgaagctttctagcatcactacttcaggataagaaccatagataagtctagattctaagtgctgtcttgtttccaaagcattttctatttgtgaaatctctttttgtgagaatggagtcagatggaattgggtagatctgcctaccaaaggctcaccggctttgttgagtaggtcgaaagaggaagaaccgcttgcaatgactttgatgtcttccacttcgtccactattaatttaagtttggaaccgatttccgggatgttttgtgcttcatcaatagctagcaaatctatcccttctaataaatgcctgtagttggaaatactccgttcatttaatagggcaatcgtatcgtaatcctctccgttaagtaacatggactgacctttaaactcttttatcaactcacgtatgagaaccgtctttccaacgcgtcgtgcaccaaaaagcagaaccgctttattgggttctattcgttctgatattttatcctgaaggatacgtttaataatattcatcacactttgttttgtgacaaatatagtaaaaaaggtctttcaattgacgatttttatgcaaaaatcgtcaattgaaagaccttttttatggttgattcatctttcttcaacgaacactatatcttttctgaaatcaaccggtgatacaccggccttccgtttgaagaactttccgaatgaagactggtcggagaagttgagggtggtggcaatctcctgtatggagagtttggaatgtgtcagtaagttacgggcttcgctgaatagcacttcgaagatgaagtcgctcacgctttgtcctgtcacgagcttcacaatctgtgtcagatgatgggcagataagttcaggtgggcagcatagaaatctaccttatgttcttcacgataatgcgttgccagtagttcgatgaatgatttgataatactttcgtatcgagtcaggcagccgtccgtatgggggaggttggttcgttcaaggatgtcacttaaatcgagataaaaggcgaacaaacggttcagaatgacttctttgtgatagaaatgctctgtacggtcaatattcttattgatgctggctaatcgttcggctaataaaacggcgtaaggatgcgctaaaggaactaccggttggttatatagccgcacaccgtatttggtccgtcggtagatcatgtccgtggagtccatttcatccgtaaaagccttgctgacaaagagacattgacattgaaagtcatcactacattcataaaaatgaaacagatgagcagaagatagaagtaaaagcgtatccgcttgaatatcatacgccttgtaattgattacggtatgtccttttccggataaaaccaataagatgataaaagcgtccagatggatatctgacgaaaactgttcttctgcttcccgatacccgatagtaatgcaactgattttctttcgtgtatcattcctgctgccactaatgatggggagttcactgatgtttttgatgcgtatggaaggggccattaggtgtgattttatgttgtacaaagataatgtaaacctttgaaatctccaaattaaaccaattttgcccaatttgggatttctttccggcaaagaatttatccgacctttgcagccgttttgaggtaaatgataatttagcggcgagaattgttacgcggaagtatcttaaattctcctcctcttgggaattgctctcccccgataacgggggagtcggagggggtggagcacccgtagggggaggtggtaggtaaaacaataaaatacctattaataataagataaaggaatttctctctcacctaccaccccgcccgttgggcacccctcctccaactggaggaggggaattgagatagtcagaatatcaatagcttcgccgataaattatcatgttgatgcccctttattaatttaataggtattatgagaaaattgaaagtattatttgtctttatcggtgcattgagcatttcgttggcacctgcacaaacctttcagaagatgacaattgaagaaatgttcgagttggcagatgctaatagtcgcagtattcgtatgttccgtctggcggaagaggaagccggacaggcagtaaaggtggccaggaatgctcaacttcctttgattgacgtatccgtttcggcaagttatttgggggatgcctggctggcagaccgtgattttacaaatggagagaatgctgctatgccgcacttcggcaataactttgcaatagaagcatcgcaggttatttatgcaggtggggctatcaccagccggattgccattgccaaattacaacagcaactggcagagttggataaagaaaagaacaggcaggatatccgctttttgttagtaggcaattacttggagatgtataaattgcagaatcaggctgaagtgtaccggaagaatatagagcaaacccggaaattggtagaagatatcaatgccaaacaatcgcaaggactggctttaaagaatgacatcactcgttatgagttgcaactgaaatctttggaactggcattgacacagattgaaaatggtatccttatcctgaacaatcaattggttacggtattgggtttgccccaggaaacagtgataaatgtggatactaccttgttgggacgacttcccaagccctcggaagaagctatttggcaggaaacggcggtattgagttctcccatgctgcaacagatgaaactgaatatcaagcagtcggagtataatgaacggattgcaaaggctgaacgtttgccgtccatagctctttttgcaggtgataaactagatggtcctattacgattgaagtgcctcccattaacaaaaatctgaactattggtatatcggtgtaggagtgaaattcgatattgcttctactttcaagtcgggtaagaaaattcgtctggcacgactgtccacccagcgtgcgcaagaaaacgacttattgttgcaggagaatgtgcggacggaagtaaaagcggcatatatccgttttcgtgaggcttttaccatttgcgatacacaagagaaaagcctggaattggcagcgcaaaactacagtgtggtgaataaccgctatttgaatgatctggcgctgattactgatatgctggatgccagcaattctaaactgaatgcggagttgcagttggtgaatgcacagatcaatatacttttcaatctctataagttgaagaagacggcggggtgcttataaattgtcgtcaagtaatttttcatccgcagatgacacggattatgcggattttatttttctgaaaggcatagctcagccgtaggaactgtgtaatctgcgttatctgcggatgaaaaatggtttttgatatatgaatgtaaactaatgaattaaataagacatggaacgtaaaaagaaaaaactgatttataacgtagtggttagcctcttacttatcaccggactggtgtgggtatgttcccatttcgttcatctcggcaatgtagcctatacagacaacgcacaggtgaaacaactgattgtccccgtcaacagccgtgtacagggttttatcaagaaaatctatttcgatgaataccgggaagtacataaaggcgatactctggtcttgattgaagattccgagtttcgtttccgcctggcacaggctgaggctgattttcagaacgccatttcgggaaaaaatgcggtggccaccacagtacatactactcagaataatatagctgtatccgatgccggtttgcaggaggcaaaagtccggttggataatgccgaacgtgaataccaccggtataaaaatcttttggcacaggatgccgtcaccaaacagcagtacgatgccgtgcagacaaattacgaggcatccaaagcacgctatgaacttctgcttcgtcaacgtcaatctacaactttggtaaagcaggaacagacccatcgtctggaacagacggatgcaggtatcaaactggcgcaagctgccctggagctggcgcgtctgaacctttcttataccgttatcctcgctccttgtgacggaactaccggtcggaaagaaattcaggaaggacaactgatacagcccgggcagactttggttgacattgtcgatgaaaatgagagatggatagtagctaattataaagagactcagactacccatatccgagaaggccagccggtagaaatagaagtggatgctgtgcccggaataacgtttaaaggtgctgtgaaatctatttcccgcgctacgggtgccagcttctctcttctgccgcaggataactctgccggaaacttcgtgaaagtagaacaacgtattcctgtccgtatagaattctctaccggcaatcgtccggaagatatggaacgcttgcgtgccggtatgaatgtggagtgcgtagtaaattattgatattatgcacgaaacaggacctttttccattccggccatccgtgattttgttcctcctaagttgcgtccctggattatcattgcctttgtcatcgttttccagttttccggtggtctctatttggcggcagtcagtgagatggtcggttctacggcattgatgcaggaagatatcatgatggcaggctacgcttctatgataggcatggggctgacattcgccatcatgtttcgactgaagttccgctttgcttcgaaaacttcattgatgacgtgtagcattgctctgattgtttctaatctgatatgtatgcagacgcatagcattcctgtgctggtgatcacctgtttttttgcaggaatcttccgcatgtgggctacattcgaatgtaattccaccattcagctatggcttacccctaaacgggatttgtcggtatttttctgttttatctatctgttggtgcagagttgtattcagctgtcgggactgataacagtctatacagcattttgggcaaagtgggagtatatgcattggctgattattggtttattgttattggtgatgctggctacattgtgcctgttccgtagttatcgctctttgccgaagttgccgttgttcggtatcgattggttgggggctttgatgtggggacttgtgttgttgtgcatcctctttgtctgtgtgtatggggaacattacgattggtatcagtctttccagatccgggcggcaaccgtcatcggtatacttattcttgcattgaatttatggcgtgcatctttcattcgtcacccgttcattgctttgaagacctggacgtatcgtgccgtatggtttccctttatactatatatagtaatagatattctgctggcgccttcgcatctctttgagcatatctatatggagagtatattagagtatgatgccctgaatgtaatttcgctcaattgggcggtattgctgggaattatagtgggagcaggctttacctttttcactttttcccgtcgtaagtggcgatataagacaatgactgtgattgcattctcttccattacgggttatctgatgtatttttatttcggtattgactatgctttgcccaaggagacattgtttgtgccgctgttcctgcgcagtttcgggtatgtgataatagctatttgttttcttacagtgctatctcgtgtcccttttcagcatttctttcaggcggtgtccgtacagtcgtttgtcagtgccggatttggtggggctttgggaacggctatactggggcatgctcttaatggggcaatgaaaaagaactcgatgttactgggttcggtagtggatcatgtaaatcctttcatcagccggatacccgttggagaagtgtacggtgctgtgcagcagcaggctctgatggtttctatgaaagaactgtacggctggctcactctgatggctttgttctgtctgttggccttcctggtttacgagagtgatattcgtccatataaagtactgcatcctacctatcgttccattcgtcgttttgtgaagcatgagttgcgtatagacaaaaaactggaagctacagcataagttgagatttttttgttcttgtattggatagctttggctaaaattggtagggggaataaggtgaattattattatttttgcagcccgaaagtggacgtatattccacgaaatgtataagttaagtttatatggtaaaagataattcaaagctgtttattctggtcttattgggtatgctgacggccttcgggccttttgtcacggacatgtacctaccgagtcttccgtctatgggagaatatttcagtacaagctcttcaatggttcagttaggactgactaccagtatgatcggactggccgtcggacagatattcttcggccctttgagtgaccgttatggtagacgcataccgttgcaggttgctatgtggttgtttattgtgtcaacgattttctgtttgtttgcgcagaatattcagcaattcgtcgctttccggttgatacaaggtattgccggggcaggggggattgttatagcccgttccattgctacggataaattttcgggcaaagatctggtaaagatgctggcgatcattggagccattaatggcattgctcccgtggtagcgcctattattggcggagtgtttacggaagccatcggttggcagggaattttcataattttacttgtattgggtgtgctccttttgataggatgtatgcgtttccgggaatcactcccggcggaaaatcgcctggctacgaaatgggcggatacttttaatagcttcaaggtggtgcttcgcaataaacagtatgtctgctatgtgctacaactcgcttttgcacaaggagtactgtttgcttatattgcttcctcacctttcataatacagcaacattatggttattcgccctttgctttcagcatttgtttcagtgttaacgccattgccatcggtggtgcggcggcattttccgtgaagtttcgccggcctgcgaacggaacgctggtcggttgtatgggtatgcttattttttctttactcgaatgttccgctttggctttgggttgcagcttctggatttatgaactgctgctgatagcggttctttttatgatgggaatgacgtttaccacctctaccgcattagccatggagtgtgagcgcacgaatgccggaacagcttcggcactgttgggtgctgtttgcttttcgttcggcggcattgtctctcccctggtaggtattggaaatatcctggtttctacagggggtatatttgttatctgctctttctgttccctttcctgtattttgttggctttaggtagaaggcgtacgaagctttacttcgcattcagtacatcccagaagcgttgaggcaggtgaatgttaggcacatccgcagcctctttaaataaaggagcaatctctttcggggcgaatccggcaataccgcatcctatctctgtaacgaggaaagtatattgtgaatgctctttggcaaagcggataaactcatctacataaggtctgatggcttccggcccgccatgcatggtcggaatgccataggtctgtccctgtaatccggttccttgtccccagatggctccccattttttccatgccagataagcggctccgccaccatgcgcgccttccaggttgctgccaaaaacgaatatctcgtccggatgtagttctgtgatacgattagaggtaattcttgttttcatacttttgtgattaggtcataattagttttttcttcttttcttcatttttaaactcttgcttttcagcaaaagtaacctttaggtaactatcttaccgatttgtaacttcttgtttataagtaaaatagtatatagctttgcatcatcggaaagtcactgactgcatttgcgaagttagtgaaaaaactgatgaatgcaactattttataaacaaattaaaagcaaaaaaacaatgaaagaacttgcagtaaagaattacaagaccgcagaaggtcagaaaatcagtcagggtggtaatgaatttacagtgaaaccgattgttgagcagacggatgtggaccaatgtcgtgtgaactttgtagaagtggaaccgggtaattttgcctatggatatcattatcacgaaacggacgaagaggtgttctatatcatcagtggtacaggaattgttcgcacagcaaatggggatgtgacggtaaaggccggtgatgcaataactttccctacgggtcctgaaggtgcacatgtcattcgtaacggttcggatacggaaaagttggtttatattgacttcgatacgaataaccttccggagattgtacatcttcccgatacaaatcaggtaatggcttacgggaagttctctaatggggtttatgataagaagtaaggttttcctgccttcacctccggaagctaaagaaacttgtatactatgggactcttctgatttttattgtaactttgcataatgcataactctaatgttggggtatatgaaaattagagaaatgcccttggatgatatcgaccttcttgttaaactcagatttgattttatcagaatttaggtttcatacctattaaagatatcactaagtaagtgaacataattagttcatattatgataaatgataattttaggcgcggattacgcggattacacggatttttttatggattgatgtaatagcgcagcctttaatccgcgtaatccgtgtaatccgcgcctaatctttataacaggtttacaaattatcatttatagaacaagctaattttgcatgagcacttatgcaattaaggttataatattaaagatataggaaatatggaaatagatttaacgactccggctctattgttttcggcaatttcattgattatgttggcttataccaaccgttttatgtcgtatgcccagttggtacgtactttgaaagaacaataccgtgaaaatcattcgtcggtaactgcggcacagattgccaatcttcgtaaacgtctgtatctgacgcgtgctatgcaggtgacagggacaggcagcttattgttgtgtgtcgtaagtatgttctttatttatatacaactttatcttgtatccatctatatctttggactggcaatggtgttgctgattatctctctggctatctctgtgtacgagatttatatttcggtgaaggctttagagatacatctggatgatatggatgaataatcggatagaatgagtaatcttgtccccatattaggagtgaacaggcaccgtctgttgattgacggtgagggggtgaccacattggtggcttttcatggttgtcctttgcattgcaagtattgtctgaaccctcagtctctatctgatgattttgatttcccgctttattcctgcgaacaactgtatgagagggtgaaagtggatgaactttactttcttgcaactcgtggtggtattacctttggtggtggtgagccttgtctgcgaagtgaatttatcagccgtttccgggaactttgtgggaaggagtggaggattacagtagaaacgtctttaaatgtaccccggaagcatctggagattctattgcctgtggtagatgactatatcgtagatatcaaggatacgaatgatgagatctatcaaaactacacaggcagaagcaatcatcaggtgctcggaaacctgcgttggcttatagagcacggaaaagccgaacagatcacagtccgtatcccccttattccgcagtataatatggaggaggatactacgcatagcatagatttactaaaatctatgggactgagtcattttgatgtatttacgtaccgaacttaaaaattacttcttatcaggctccgtccaacggtcataatgtacattctccggtttccatttatctttcggaagtggggtctctgccggataaccgatagggattacattcagaggaacaatctgttcgggtaattggagtattttctgtacttcttttacccgttcgtctataggataaacacctgtccagacagctcctaatcctaaagcttgtgcaaccagcaacaaattctcactggcggcggaggcgtcctgtacccagtactctatacccgcaccactgatagctttagttaaatctccgcatacggcaatagccaacggagcgtctttgaccatcttggcgtaaggaagagtagaacccagttcgttcatcgtttctttgtctctgatgacaatgaaagcccaaggttgcctgttggttgctgtaggagctgccatggcagcccttaacaattgctctattttttcatcttctatttctttcggctgataagagcgaatactggttcttgcatgtatgttgtcaagaaccgaaagtttattatcctgtttcatgctaggttcctccatcttattaagttgattgggtttcggttggatagataatgcagttactactataaccaaagctagattgaaagtgttcagcgcatagtgcattgtttgctctttgggccttttagaaagatatgagatgattagggtacataatgcgatgcctgccagtaatcctaggaagagtatccagtcgaaactgaaagcacttgtcggtttgtctgccgaatgctcctttgcatactccatggccttatgtacagactggataatggctacggaagattctgtggctccggatattccatccacttctttatggattgcttcctctggtgaaagattgttccattgttgtaacagaccgctgtttcgtactttggcaaagtagctgggtgtttcggagttttccagagctactacttttagaatacgattatcttttatatagatttccagaggaacatttccgccgtacccgttaatatcttttgttagttgccgggtagatattatctgtactccgtcatctgtatgtcgtagtatcccggaagttcctgtttggctttctgttgtattttcgctttcagaaagaatgttcccaaacttgtttcccttgcagatggtgactgccagaaccaggaagaaacaggttatcaggctaatgatgacttgggcttttaatgttttcatatttagctgctatttatagtgtatgcaaatttaggggatttttgctgaaaatagcaagtacttattaaaacatagttgcaataatctgaataaacagtatgaggaataccattgcaatgggataaaccgtagcgtaagccacactcggaatgttgctgtcagtcatagaatcagctgctgcaagtcctggagtactggtcataccaccggtgatggttcccagcaagtcgagtatgttgattttgaatacaaacagtccgacgaacaccgctactaacataggtaccagcgtaattgcagcacccactccaaatagcaaccagccgctttcctggaaagtcgctacaagattggtgcctgccgaggtgccgacttcggctaggaatagcaataagcccaactggcgtaataactgattagcaggtccggacatagaccatagaataggacctgtcttaccaattgcacttaaaaacaaagccacaatcagaataccgcccgtcaatcccggggagaaagataaaccaccggggaaagttatattcagtttaccgaacaatacccctaaaacaatacccattgcgatagggaagaagtctgtgtctgataactttttagcattgtttcccagcaagcgagccagtcctttgagtccttctttttcacctaccaccattagtttatcaccgaattttaaagtcagatccggcgatggagacaggtcgataccgcttcggcgaacacgtgtgacagtacatccgaagttcttcatcaggttcagatctcccaattgtttattgatcatatcctttttggtcagcaataaggattcgatctcttgtgtgtctaccagaggcaattcgccctcttcgcgttttcctactaaaactgaaagctggctcagagcttcttcactacccactgcctgtatataatcattttcatgtagcatcgtttgtgctgtgggaatggaaattctttcatcatgtttatggcgtgaaataacagcacctgtcatggcccgtgcgttgatttgcatcaagctacggttgaatacggcgggattggtaacacgatagatacaggtagtcagttcgggaaactggccgcgacgttctttttccagtcgacgggcctccttgtccaggtcaatacgcatgatacgggggagcagttttacaaacaagataacacctataaccccaaacggataagcgataccataggaaatggatgccaacggagaatttgtactgtcgatggctacggcaagtcccggtgtactggtcagcgcaccggctatcaaacctaccacactgggcgtatcgatgtcgaataggtatttgagcccgacagctgtaagagaagccgagcagataatcagcatggtaattatgatcagggtctttcctttgcttcggaacgagtcgaagaaaccggggccggcctgaataccgatagtaaagataaaaagtaccaatccgaagtttcctaattctttaggaatgactacaccgaagtgtccaaagagaagggcaatgaaaatcactgcggaaacatccagtgataaacctttaattttgatttttcccagcatgaaacccaatgcgacaatgaggaagagggcgaaataggaggaattaagtaggtcagcaaacatgaatttagattatttgttagttttcaataattcttctaccgctattttcagctgtgtatcttcgccttttacaattgtttcgggtgagttggctactttaatatccggttccaactgagtattctccagataactgccatcaggtaggcggtaaccaatcacaggaataccgaataccaaggtaggatcttgcaggcgttcccatgatacactggtcatggtgcccgggacaggcatgcctaccagcttgcccagtttctgatgactgtatacccacggtgtgccgtgtgcattggaatagttggcttcgcacgtcagcatgatggatggtttgttccagcggcggctgggcatatcgcaggcttcacggccacgaaccacctgtgtgaagtatttcttaccactgaacagtatctctatatcttcgtgcaggcgaccgcctccgttgaaacgtgtgtcgatgacaatcccttcacaattattgtattttcccaagatatctgagtagatggaacggaaactgtcatcacccatagacttgatgtgcacgtagcccagtttgccgttcgaccatttttcaacatctgccgcacgttgttttacccagcgttcgtagagcaatgcgctgagttcactgtccttgatggggattactacttcttcccaacgctctttcgttttaggattatagagtgaaacaagagttttcttttttaccttgtcattgagaagcacgtaataatcagtttcaggagtaatctctttgccgtcaatctttttaataataatgccggctttcacctttgtggtagccttgtcgaacggacctttttctatcacttcggcaatgagcattcctttatcctggtagttccagtcgaaaagtagccccagactggctgtaggctcactttgtccatccggatagaaacggcctccggtatgagagacattcaattcgcccagccattcacttaaaagttcggagaaatcgtaattattattgatgtgtggcagaaacttacgataggctgccgtcatggcgtcccagttgactccgtgcatattggtattgtagaaacgcttttgctgttgcttgtatacatgatcgaacatatactcgcgttcggctgccagatccagttttacctgagcaagatatttaataggtttcaagtcatcggaagccatgttcatcttctgcatattcttaccgttcagaatgaagagagtttttccttctttatccatttccagagaagtccatccggcatctactttgtggagtagcttggtttccttcttgcgcagatccatcttccataagttacgtccgccttcggcgcttgccaggtaatagagggttttgccatctttggagataagggtacttcccatattcgatgagtttggtgtcagacgtacgatgcggtcttctatgtttttcaactctaccacgacatcttttaccttactgctgtctttatcagctatcttcttccggtcggagtttgcttctttatacagttcgtaatcctctttgctcagactgaatttatcgtatgcatcctgattcaggaataccagcatggcatcgtccagagaaccccatgaagcgtgtgcacgcataccgtagcgttcggtaatgaaaagaatggcattgccgtcgagcacgaagctgggtgaaccgcttgtgtatccgctattagtcagattgacaatctcgccattgccttgtgcactgaccagacctatatccgagtatggatcgtgcttgtttccgataaattccaatgtaaaccatttgccgtccggagaccatgcatagtcaaatcctccgcctgtgctgtaccaggtagagccatcggtgatccggcgtactttcttggtctccaggttgagcaccatcaggcggttacggtcttcaatgaaagctaactccttaccgtcgggtgagaattgcggatgtgaacgttctacggtggtagagggtaatagcacctcttcctttattaaagttgcgttcgggaaattcggatcttcttcccgaactatcttagccagataaatctgccagttgccattgcgttcactggcgtaggccagcgtccggttgtccggagcaaacgagagaccatcttcttctgctgccgtatgtgtgatctgtttggtcgtggcatagtccgcagatgtgacgaatacttcaccacgtacagtgaaagcaatctgcttgccgtccggtgaaactgtagcggaagttgctttatccggatatttcagataggctatttgcggctggtcgtcacgaatgatttccacatttatcttccgtggattcgagccttcttgttgggtataaatctcaccatcgtatccatagcacaaggtgccgtcgttactcattgaaaggaaacgcacgggatgggttttaaagctggttattgtttttatcgattgaggttgcgaaatcgggaaagaatatacgttgaatgagccaccattacgttcgctcaggaagtagacggtttgtccatccggtgatactatcgggttgcgatcttcgcctgcatgctgggtaaggttggtgtgtgaacctgttttggtatcgtacatccacacatcgcgggtgatggaagaagtatggtgctttctccattcattttcacctcccttgcggtcctgatagaaaaagcggttgccggacttatcaaaacataccgcttcggcaggggtgcccagtacttgttcggtgcgtccgccgactgaaggaactttgtagagttcagtcatggcggctgaaggaaagagagcgctgcctgccggatcctgaatagatgctgagaataaaatatatttgccgtccggagtaaaagtagcagggacttcattggttgaatgagtagtcagtcgccgggctgttccgccatttgccggcattacaaaaatgtcgaaatttccattcctgtcactggcaaaggctatctgtttgccatccggtgaccataccggggtacattcgtaagtgtcttgtgtagtgagctgtgtagctgctccgccctcggttggtactttatagatgtcccctttatagcaaaatacaatttctgttccgtcgggtgagatttgtacatcacgcatccagagtggagtcgtcgcatagctggttattgccgtgaaactaaaggcaatgtaagcaagaattttcttcataagtatatttaatgtgtttttatgcaaatataggtaattagtccgtaaatatgaaaaaaagtcattactttcccttactctgttcaatcatttggtatctactgatacgatttttgctgcttctacaaatgctgaaatcaactttttacaatataggtggtcttaaagtatatgaaaataggattgtcacctactgttattcaggtttttggctaagcaattgaattgattcagtaaactcaactataatctcagataattcaggattgtcattacgaagaattattgttgcaaagttcacaacaccttccgcatcgacaattgaggatgaaatcattgtaaaaagtgcttttcgattataagtggaaaaccaatattcaaacaagcggctacgcatacgttgtttattatcaccggtctcacaaatatatagtaatgtagaattattacatctaaagaattcatcaacaatagaaactatagtatcgcggactttacgatcacggggagatttgtgattgttgatattggcaatgattaattggtatgaatttttggataacaagacatcatcttccataaaaccgacagaataatgcacaccaccatctgtaaagaattgatagaatccgttctgttcggtcggttctacttgatagggagtttccccactattaatacgttccaatgaaagatgaagtatcatagagcaaagaatttttcagcctctttacccgttcgttctttatatgtctctttcattgatttttccaattgagcaagacattttcgttttttctctctcgcagcttgaaacttgtcaagagcttctttttttgtaatctttgtttttgccatatactctatttctcctttctacttgcaaagataacacttttcgttgataatcatttgtttcataattaaaagtagggtttgcgtaaataggggtagcggtttacactatggtttacaccaatgggtaattttcgcgtcaaccacagcgtcaaccacaccattaggtggaaactcgtaaaaaagcaaaaagcatcgataaccttgcgattatcaatgctttatcggtagtcgggatgacaagattcgaacttgcgaccacacgccccccagacgcgtactctaccgggctgagctacatcccgaattgcggatgcaaaagtagtgctttatttttaaatagcaaatatttctgttgatttttgttttgctattatcttgttagataacacatctctcttattcttaatttgttatgatggaaagtttattctatttaagtttcgcatgtagcctttcagcctacatgcgaaactccagttttattattttagaaagtatctgtcgattcttctttcaccctcttcagcaagttttctacattttgagagtggtaatataagataccttccagttgtttcagaaaacctacattgcttgccagttgcgtaatgaattgcagatgcagaccgatttcccggttggcttgcagcaacgtcttgtgcgggagtgtactttgcagcatatagaatccgctggcatcttgtatttctgcaatgccgtttccccattcgtgtgtacctaacaattgtagaacatggatgaattgtcttaatttgcgtttcagacattgcaggcttatatattccgaagattctttgacatacgcgatgttcatgatgtcaatcagttgtaaatagtacgctttcatggcttcttctgaagggaagcccgtgcgtgggtgcattgctacgttggataattcctgagcggttaccggctgagtgttgttttccataaatcgttaagttttaaaaggtgaataattcgattcatgggagaggagaagaattcaaaaaagcaatccctgcctgtcccattgtcgaacacctaccgcgcagctgttggaagtgcattaacactcccgatgggggtgcagggaccgccatataggagtggcgtgaacgggcataaaaatgcccgccacgattacttggcaggtttccctgctgcacgataaaaaatggttcgacatcacaaaggtacaataaaaaataaagtagcaatgtaaatcggggaggaaaatacatctgttctccgattaactttattaatgatgcgaatcagaagttgaaattcacatgaacaataccgaaataaaggatcgatgaataaaactgatcttcggaaaggtatgactgcgaaaaaaacgctgctctgttctgaaactttagagaatcaatgtattatagtctctctgaaaatctttatctttgcggacagtttgaaaacagaagtgaataataattgatacaataacttaaaacaaccagaatcaaatgaagcaggatatgattgttatccttgacttgggtagtcatgagaatacggtattggctcgcgccatccgtgcgttaggtgtatatagtgagatctatcctcatgatataaccgttgaagaactgaaaaagttgtccaatgtaaagggcattattatcaatggtggaccgtgtaacatagtagatggcgttgccatcgatgtgaatccttctatctacgaggcgggaatcccagtgatggctgccggtcatgacaaagcgacttgtgcggtgaaactgccacagtttactgatgatattgaagctatcaaagcagctgttaagcctttcgttttcgaaacttgcaaggccgaagctaattggaacatgaccaacttcgtgaatgaccagattgaattggtacgtcgccaggtgggtgacagaaaagtattgctggccctttccggtggtgttgacagttccgtagtggcagctctgttgctgaaagcaattggcaacaatctggtatgcgtgcatgtaaatcacggtctgatgcgtaaaggcgaatccgaagatgtagtagaaatgttcggtaatcagctgaaggcgaatttgatctatgtagatgttaccgaccgcttccttactaaactggaaggtgtggaagatcccgaacagaaacgcaagattatcggcggagagtttatccgcgtattcgaagaagaagcgcgtaaactggacggtatcgacttcttaggccagggaactatctaccctgatattgtggaaagcggaacgaaaacggccaagatggtgaagtctcaccacaacgtaggcggtctgccggaagatcttcagttcgaacttgtggaaccgttgcgtcagcttttcaaagacgaagtacgtgcatgtggtcttgaactgggcttgccttatgaaatggtttatcgtcaacccttccccggtcccggtctgggcgtgcgttgtctgggtgctatcacacgcgatcgtttggaagctgtgcgcgagtccgatgctatcctgcgtgaagaatttcaacttgccggactggataagaaagtgtggcaatatttcaccgtggtacccgacttcaagtcagtgggtgtgcgcgacaatgcccgttctttcgaatggccggttatcatccgtgctgtcaatacgattgacgcgatgaccgctaccatcgaacaggtagaatggcctgtcctgatgaaaattacggatcgtatcctgaaagaagtaaaacatgtgaatcgtgtttgctacgatatgtctccgaagcctaacgctactatcgaatgggaataaaagactttttgctaaatagctagcgcattaagtcctttcggatacttcatttaaagatactttccgtatctttgctgtctctcttacaaaaggtggcatcttttgctgtaaaagatgccatcttttgtgttataagatgccaccttttgctacaaaagatgccatcttttgcatggaaggaataaaggagagatgtcaaaggtagtaattaaaaacacgtaaagactatgggaatgatttacttggtaagaaagaagctcttccagactaaggaaggtgcaaaacaactgtattatgccgtgcaacgtacactgcaacccagaggtggggtgaccgaagacatactggcaaaacgaatcgctcaccggacgggcaggagcgaaggtgatgtaaaaggaatattggccgacctgcctcacttcatagaagaggccttgaagaatggagagtcggtatccatcaaaggactgggctctttccatattgcgataaccagcgagggctttgaacaccccgaagacgtgatgccgggaaccgtgcgcatttcgcgcgtttacttcaccgctgaccgcggcttgaccaaggaattaagcagggaaatgagatttttccgctatccgttgagcaaatacttcccggcaagtatgttgagcaagaaagttgtggaagcggaaaagaaggcggaactgcaaggagaatttccggaagaagagataactgagaacccctaaagaataccccttccacactctattccctatgaataaagggttgcagaagtgtggaaggggaaatagtacaggtacacagtgaggttatacccccatacattcccgataaaaatcgaacatttcgtaaatggtatctttgtcggcagtctggttgaggcagatgtctccgacttctttcaatagagtgaagttgatggcgccggcagtgttcttcttgtcatgcttcatcaactcataaagttggtcgtactgtttgcaattgaaggcaaagccaccgtagttctctttgatgaactgaatggtctggcgcattttctctttcggaaaacctacctttatataagaaaggtatagctcgcaaacaattccccaagcaacagcataaccatgtaatacggggcgaccttcggcaagagccagactttcgaaggcatgacctacggtatgtcccaggttcagtgccttgcggatgccgtgttccagcggatcttgttccacgatatcctcttttacttgtacggaacggcccaccattgatttcagtgcaacgtaatctatcttgtccgtatcgaaagccaataactcggcaaggtgctccggggtactgataagaccgtgcttcaacatctcggcgtacccggagaagaagttgtgggcatcgaggctgcgcaggaactccgtttcaagaagtacactggcggcgggtgcgaaaacaccgatttcgttcttcaacccgttgaagttgatacccgttttgcctcctacggaagcatccaccatggccagcagggtggtggggatattgatataggcaatgccccgcttgaaggtagaagcggcgaaaccacccaggtcggtcaccatgccgccacccaggttaatcagtaatgaatggcgtgtagctccctgttcgctcagagcttgccaaacggaagccagggtttccagattcttgtgtacatcttcggcaccgataacgatttcggtagcctctttcagtgccggaatgtcattgagttgcggcagacagaggcggtgggtatgctcgtcggtcaatatgaagagcttgtcatggggacaattcccgatggcgcttgccaggctgctttccagtttctcgcaaaggattacttcttgtttactcatctgattaattacaaattataaattactgattgtggattctaaattatgaaagagatggataccttctttgttaattgtggtacaaagatagctcttttggcaataaaacgttatctttgcccatcgatttttgatgggctggcatgatgcttctgccatctgccccccacaatctataatttaataattagtaattcataattttgaaatgagagcattactaccggtttattgtcgtctattaggatattttgtgatagctttggcactgtttcttccgttcctgatgctgatgctagggaaaatgacggattccaacctcttgttttataaagaatgctctaagctgctgatgatgcttggcgcattgatgattctgtttgcctataccaagaacgagaataaggaaactgagcaggtccgtaatacggctacacgtaatgctatgttcctgaccgtattattcatctttggcggtatgctctatcgcttggcgaagggagacatcatgagcgtggatacttcctcttttttgatctttctgatactgaatgttctttgcctggaatttggtataaagaaagcggcagttgataggttgtttaagcgagatcgtcgataattagaacattttatttaaacctcattaaacttttccattgaaagcttgtcaaatgaaacagtataaaaacagacattttgtttcataaaaaacaggcgcatgaaaaaagtaatcatcggaacagtgttattgctgacaaccacactttccgctttctcacagactaagaacattaccgtagcggggcgtgtcatcgaggatgacacgaaagagcccgcagtacaagccacagtacagttactttcgttaccggacagtgcatttgcggcgggtatagccactacagcgcagggatatttcaccctgcccaaagtgcaggccgggaaatatgtattgaaagtttcctatatcggcttccaacctacagtgcttcctttgcaactgtcggctcaaaatcccaataagaatgtaggtacgctggctctgaagacggatgccgtgatgctggcagaagcggtgattaccgcagaagctccgcaggtacaggtagtggaagatacgttaatgtacaattccagtgcttaccgcacaccggaaggggccatgctggaagagctggtgaagaaactccccggtgccgaaattgatgatgacggtaacgtgaaaatcaatggtaaggagttgaaaaagatcatggtagatggaaaggaattctttggtggagacgtgaaaacgggcttgaagaacttaccggtggagatgatcgataagctgaagacatatgacaagcagtcggacctggcacgtatcacgggtattgatgacggtgaggaagaaaccgtacttgacttgacggtgaagaaaggtatgaaccgtggatggtttggtaatgcggatgcagccgtgggtactgaagaccgctacgcagcccgtttaaatgtaaatcattttgtggataagacacaggtaaccgttattggttctaccaataacgtgaacaaccagggcttttcaggtggtggaggtggaccccgctggcgtcgtaacaatggtttgaacgcgcctaaagaattgggtatcagttttgccacagagaataagaagatagaactgggaggaagtgcccaatataattataatgacgctgatatctctaatatcaactcgtccgagcgcttcttgcagaatggtaattcatattccaattccaactcagtcaaccggaacaagaattctacattcagagccgatttccgtatggagtggaagccggattcaatgacgaatatcattttccgcccgaacttctcttatggtaagacggataatgcttcgagctcattgtcgggaacctttgatgcagacccattcagtctggttgccaatccgaacgattatcttgattttgataaaataattgccggggacccgttgaaggatatccgtgtaaatgctacgaacagcgggacactttccgacagcaagagcatttcgacagatgcgactttacaaattaaccgtaagctgaatgataaaggacgtaacattacattccgcggacgcttcggttacggtgataatgacaataatcagtatacggaatctacgacacgttattatcagattcctacgaacccggactctactttggttcgtaatcagtatatcactactccgaccaataactataattatagtgcacaaattacgtatagcgaaccgattgcgcgggccactttcctgcaattcagctatcagttccagtataaatatagtgagagtgacaagacgacttatgatttgtatcagattaatccggagtggggaattggcgaaccgttgcctaccggttacgagaaccatgcagtggatagcttaggtaaatatgccgaatatagatactataatcatgatgcatccgtatcgttgcgtttcattcgtgaaaagtatcagttgagtgcaggtatgtctttccaaccacagagttccaagctttcttataagaaaggaaattatatgatcgatacgacgcgttccgtgttcaattttgctccgaatgtcgatttccgttatcgcttctccaaggtaagccagttgcgctttaactatcgcggacgtaccggtcagccgagtatggaaaacctgttgccgattgtggataactccaatccgttgaatatccgtgtcggtaacccgggcttgaagccttctttcacgcactctatgcgtttgttctacaatacgtataatgcggaacttcaacggggtatcatgacgcatgccagcttctcggctacgcagaacagcatcagtaacagtaccgaatacaatgaacagaccggtggacgaaccacgacgccgaaaaatattaatggtaattggagtgctttcggtatgtttggattcaatacggcactgaagaataagaagtataccatcaattcattctctaatattaattatcagaataatgtggcgtatctgtacaatcaggaaactaaagttgatgataagaatacgacaacgggcttgacgctgagtgaacgtttgaacggtgcctaccgcaatgattggttcgaattcgggttgaatggctctatctcttacactgccgagcgtaacaaactgcgtccggacaataaccaggaaccttatactttctcttatggtgccaatacccagttgatggctccctggaacatgactttcactaccaatatcgccaatcagagccgtcgtggttatacggattcaagtatgaaccgtaatgagctgatctggaatgcacaactctcgcagactttcctgaaaggtgcggcaacgataagttttgaaatgtacgatatcctgaaacaacaaagtaacattagccgttcattgacggcagatggtcgttcggtttcggagtacaatggtgttaacagctactgtatggtgcactttatctatcgcctgaatatctttggtaacaaggctgcccgtgagaagatgggtagaggtggatttggtggccctggtggtcctggcggtcatggcggacctggtggacgtcccggtggatttggcggacgccgtttttaaagtaaactgaccagttattattataagtttccccttccatttgctttcgctgaaagagatggaaggggattctgttatttagcgtttccctgcgttgaagcaaaagcctacatgaaattctattcctatgttgtggggggaaacaagtgtctggtcttcttggaaggaatatttgaagagatctttgggaaactccttatcaatgggaagaaggctgtactcggcaccgataccggcaaaaagacatttgtacttgaagtctactccaagacttaaaccgatgtcaaggcatttcaaaccttcgtttttatcgaatgtcttatgcgttgcttcaccatttaccaatgtagcgccattaccttcactgggcgtgataaagtcatcatcatcatatctttcattagtggcaagcacccagttcaatttactttttccaccaattcccaaagcgatatacggaccaccactgaattgcaacccacagttattattcaaaggcagatatgcggctactttgatgggaacttgtaaatagattccattgatttttgaatcgattcctaatcccatatagatttgcttgcctgtttccgtaatacccaaagcggttactgcttcatcaatagagtagcttctgtttagtagctgtagtccggtctgcatggaccaagttttgtcaatagggaattctacgccgactccgaaacggtacccaaagttagcattgtaattttcattttgggtaatgccggtcaatccggttccaccttgtacactgatttttacttgcgaatgacagatagtagttgacaagcccagcacgagggcgattaaaagatgttttttcatatttcatagtattagtgtgtaattacgcaaatatatgtaaatactttaaagacaatctcttttttcttataaaaaaacaggaattcttttattttctctatatttgcttttgtgattgactggaactatatactaaaccaagtagctaccgtcgcctttgatattatttactttggcgctatcatcggaacaattgttgtcatcattctcgacaatcgtaatccggtgaagacattggcatggatattggtattgatgtttctgcctgttgtgggactggtcttttacttctttttcgggcgtagccggaggcgcgagcgaataatagagcagaagatttataaccgtctgttgaataaaccgatggtggaatacctggcgcaggatgccactaccttgcctatagcttatagccggctcatttctttatttcgcaatacaacccaggcgtttccttttgacggcaaccgtgtagagacttataccagcggtgcttccatgttgcaatccctgttgcgggaactggctaaagcccggcaacatatccatattgaattttatattttcgaggatgatgccatcgggcgaatggtgcgggatgtactgatagagaaagtacgggcgggcgttgaagtacgtgtcatctatgatgatgtaggatgctggcatgtgcccaaccgtttctatgatgaaatgcgttcggcaggtatcgaggtacgcagctttctgaaagtacgtttccccctgttcaccagcaaagtgaactatcgcaaccaccgtaagattgttgtgattgacggacgaatcggttttgtgggtgggatgaatctggcagaacgctatatgcgtgggttctcatgggggatttggcgcgatacgcatcttttattggaaggcaaagccgtgcatggcttgcagaccgctttcttgctcgactggtattttgtagaccgtactttgatcagtgcctcccgttattttccgaagatggaggcgtcgggtaattcgttagtacagattgtgacgagtgatcctattggtccctggaaagaaattatgcaaggattgagtatggcaatttccggtgcgaagaaatatttctatatacagaccccttacttcttgcctacagaacagatactggctgctatgcaaacggccgcattggcaggagttgatgttcgactgatgctgcccttgcgtgcggataatcgccttacgaatttaggttcttgttcctatctggcggatgtattgcaggctggtgtgaaagtttatttttataagataggttttctgcactccaaactgatggtgtcggatgatgaacttactactgttggctctaccaatgtggacttccgcagcttcgagcataattttgaggtgaacgcttttatttatgatactgaaactgcactgcaaatgcgtgaaatctttcttcaggatcaacgcgagtgtgtgcaggtctttcttaaaaactgggtgaagcgtccctggtggcggaaagctgccgagagtgtggtgcgactgatggcaccgctcttataaactctcaactttcaacttctcaaagaaggagaagttcacactgccatatacccgtctctctacaaagttcggatgatcttcgaagttatctttctttccatgttccaatacaagcaagccttcctctttcaagagattgttttcgaagataagactaggaatggtttccaatccctgcaattcgtacggaggatcggcaaagatgaaatcgaactgttcacgtcctcctttaatgaatttgaatacatcgccacggatagggatacatttgtcagtctttacctcttgcattatcttgcagatgaaagcatggtggtcccggtctttttcaacgctgattacgcggtcgcaaccccgtgataccagttcgatgctgatgctgccggttcctgcaaagagatcgagtgcggatactccgtcctcaaaatccagataattggcaagtacattgaacagattctctttggcaaaatccgttgtgggacgtgccttgaaagtacggggcacgtcaaatctttttcttttatatattccgctgattactcgcatgtggttattgcttgtaggtcgaggttagtggcagggttcatgatgaatacctgccggataaattttcgtagttcgctgagcaaagcttctttgtcggacaattcaccggtgaggtgcatttcgtcacgttcctgttcaaagccgagttgcttccatatatataataggtaatagatgcggtccgctgtctgtttacattcaaaggagttggcaagcaacaggtgattgcggtcgtagcaatacaggtcggcggcatctttccgcagatgcacgtacattttccgactgttgcccaggcggcttttgctggagaaatgttcgatgaacgagcttgcctgcgaataaaatcttacatcgggatattgttcgcacaggaaagaacgggcactcttgtccatactgaacaatactacggcattattctttcgcagaatgttgtattgcacaatttcgttttcccgcttcgggtggttatgataaaaaagtgtttccgtctgttcgtcttcaaagaactccagtggcacgagggtaaagcgtttgtccgccatgagtatatttacccggcgataagggtgtttaagccattctatttcacggaaagtctgtttaagattggctgtgagggagagtgattcttctactttccggtcaaagaaagagagctcgccttcacccagagggttgaatacagaaaaagaaaatccatccgcactgaggcggatggataacgtatattgttccgatttactaaagtcaatcgtttctatcatacagtgttgcggatagggaattattcccagttacctgcattattgttagcagtttccaagctaccgatcatcagaccgcagtatttacccaacttagtctgtacgtctttcatgttagcaatttcttgcttgtccagaccacccaggtaagtttcatacggagtcttaacttcgagcagacagaaaggagcaccggatttagctgtatcgttcttgatagccatttcgaattgtgcgccgccaccgtaaggaacatatctcatagaatcgggattgaaaccttttgggaaaatagtatccagtactgcaacccacattgtgtcacgcttgaagttttccaagcctgctttctttacctcgtcgtatttacctgttttcttagctttgttgatgatagcaatagctttcttttctgtcataccgtcttccaactgcttgtcattcaattcaccttctttgtagatgaaaggcaacttctggtttttaacaaagtagatcaaagtgtcgaaacttgccgtgtactgttggtggttcaagttacgatactcctgctgtgctttacggatgtccattaagcgggcaataactgccttctctctgtgctttctagccttttcgaaattaataggacccataatgctagcatagcagatgtagatcagtaccactgcacacaagcctaaaacgatattaaatactgttttcatgataaatatgttttttagttgttatattcgtaccgcaaaaataaaataaataattctaatggcgatagttcctgtaacttttttctattacaaaaatgataaataactatttagaaacgcaaattaaggaaaattttccttatgaaccaacttttgagcaagaaatagtactaaaatcattagctgccttcttgttatctccccgtaatgatgcggtttttgtgctgcgcggatatgctggtacaggaaaaacttcgctggtcggagcgctggtacggacattggataagttgcaacagaagtcaattctgttggctcctacggggcgggcggcgaaagtcttttcggcttatgcggggcatccggcgtttactattcacaaaaagatttaccgtcagcagtctttctccaatgaagtgagcaacttctctgtaaacgataatttgactactcataccttatatatagtggatgaggcttcgatgatttcgaacgaggggttatccggtgctgtgtttggtacagggcgtttgctggacgatttgatacagtttgtttattccggtacaggatgtcggttgatactgatgggggatacggcgcagcttcctccggtgggtgaagaacagagtcctgctttgtttgccgaggcactgaaaggttatgggttggaggtgatagaggtagatttgacgcaggtagtacgtcaggtgcaggactccggtatattatggaatgctacccggttgcgccaacttatagctgaagatgcctgccagagtctgccaaagataaaggtatcggggttcgctgatataaaggtagttccgggcgatgaactgatagatacgttgagtacttgttacgaccgtgacgggatggatgaaaccatcgtcgtatgtcgttccaataagcgtgcgaatatctataataatggtatacgcgcgcaaattctttggcgggaagatgaattgaacacgggcgatttgttgatggtagcaaagaataattactactggacagaaaaaagtaaagaaatggatttcattgccaatggtgagatagctgttcttcaccggatgcgtcgtacacgtgagttgtatggtttccgttttgcggaagttctgctcacttttcctgattacggggattttgaattggaagttaatctattgttagatactttgcatagtgatgcaccggctttgcctaaagcggacaatgacaggctgttttatgctgtgctcgaagattatgccgacattcctgtaaaacgcgaacggatgaaaaagatgaaggctgatccgcattataatgctttgcaagtgaagtatgcttatgccgttacttgccataaagcgcagggcgggcaatggaagaatgtatttcttgaccaggggtatatgacggatgaatatttgacaccggattatttccgctggttatatacggcttttacccgtgccacaggtactttgtatctggtgaattacccgaaagaacaaatcgtataaatagctgggattaaaaaaaatatctgttcgcatgcagtaattaactatttactgcattttcattatacgaatccgatataaaaagactaaaacaatgaaacacatctattctattctaatgttgatttcactcttgtttgtgggtactgcatgcgaggatgattatcgtgatatggtattttttacgggagaggcgcctatttaccagattgggacttgtgataatctgattggttccgtgaatctctatcaggataaaccggaaggtattattgtcggtgtggatggaggtgatggcaactatgtcataataaacggaaacgatgccgtggtaaccgctgcttttgtgaaaaatgaaaatggctatcagcgtatattggttactcctaaaggaataggtgagacttcgataacggtaagagacggcagtggttcttcggcaatgttgagagtgaaggtagacgaatgtgtgaaatttgtttggtctaaagagaaagatggcattgtggttattggagaagctacagaagaacaaaagaagaatatagtggatgcatttactaacttctttaccgtaaaggagggaggacgttatgagatgataccggataatgaatctgatttgtgggaaaaaggaatcctgcgtgtccgtccggatgattctactattgctcctttcgtaggacaatatgaaagggtaccggttatggaaggtgaagtggaacgttcaggtctgctatttaagtataataatgaagagcatctttatactttcaatgctcccaatcttaccaggctgtctgtaatggaatatatcgacttttgggaagatgtaaccgaagtctgtccggtggaagtcccgacaggatgtaaagtttatcatgtggaacgcttaaaaccacgtaatcagagtggagaataattgaaaaagatatactaatctaaccttttttgtcaagagagaatttatgtatgtttaacggaacgggagggcttcggctttcccgtttctattttctgcaaacagatgatgtgttaacctgaaacggatgatgtattttactcaaacagatggtttgtttggggtgattacatcgtttgttttagtccattacatagtatgttgtcatataaaacatactatcttaactcatttcacttctatagatacaaaaaagaggagaaacattcgcttctcctctttactatatatcttcctgaaactaaatcaggattacattgacaaagatacgacatcagaatgtcaaagtcaagtcttttgccagttatttacttgcacaggcgaataataatccgcctgccttcacaagtcaattattaaattccggcaagttccagtaccttttctattgctgcattcagtccgtcaatgttctttccacctgctgttgcaaagtgaggctggccgccgccgccgccttgaatcagtttggcggcttctttcaccagatttccggctttcaatccaccggctacaaggttatcactcaacattactgtcagcatcggttttccttcattgattgttccggcaacgaaacacaggttttctgtaatctcgccacgtagttggaatgcaatattcttaatactttctgcgggtatcggagcacaaatcttaattacctttatgccgtggatttcctgcatgtttttcagcaatctttcctttatctgcgcctctttctccctcatgaagtcttccatctgcttcttcaatccggcattctcttcaatgtacttgcggatggttccggccaagtcgggtgcattgttgaagagcgctttcagatctttcagagtatcttcgatggtgtccatcaattcctctacgcgtgcaccggtgtaagcttcgatacggcgtacgccggcagcaacggagctttcagatacaatctttatcataccgatgtttccggtagcggcaacgtgtgtacctccacagaactcaacggatgaaccgaactgaataacacgcacatggtcgccgtacttttcaccgaacaaggcgatagcacccagttctttggcatcttcaataggaatattgcggtattccttcaaaggtatgttggcacggattttagcattcaccagatgttctacctggcggatttcttcgtccgtcactttctggaagtgagagaagtcgaaacgtagtgagtcgggggttactaaagaacccttttgctctacatgctcgcccagtacttcgcggagtgcagagtccagcaagtgggtagccgagtgattggctgcacaggcagcgcgtttgtcggtatctacgcaagccatcatcggagcttccggatgtgcgggcaatttcttggtgatatgtatcggaaggttattttccttctttgtatcaattacttcaatcgtttcgaattcgctgaccaatacacctgtatcacctacctgaccaccgctttcggcatagaacggggtatagtccagtacgatttggtacaatgtctggtttttctgttttacttggcggtaacgaaggatacttgtttcatattccgtatagtcgtaacctacaaattcagtggttccttctttcagtgtgatccagtcgccggtttctatggcagcggcattgcgggcacgttgcttctgctgttgcatctcggcgtcgaattccttgatgtcggcagtcataccgttttcacggagaatcagttccgtcaggtcgagcgggaaaccgaaagtatcatataaggtaaaggcatccttaccactgatttctgtctttccggcagctttggcgtcagccatcgtcttatccagcaggcggataccggtttccagtgtacggaggaaagagtcttcttcttctttaataaccttgctgatcagttctttctgtgcttccagttccggataagcttcacccatgttttcaatcagaaccgggagtaatttatacatgaatgcctgtctctgccccaggaatgtataaccgtaacgaactgcgcggcgcagaatacggcggattacataacctgcctttgcattcgaaggcaattgtccgtctgtaatagagaaagcgattgtacggatgtggtcggcgataacacgcatagcgatgtccgacttctcgtcttcaccatacttcttgccggtcatgttgcctatagccttcagtatgggttggaatacatctgtatcataattagaagtcttatcttgtagtgtgcgcaccagtctttcgaagcccataccggtatcgataactttggcaggaagtccttcaaggctaccgtcggccttgcggttgaactgcatgaacacaagattccatatctcgattacttgtgggtggtctttgttcaccagttgactaccggggatctgagccttttcttcttcaggacgtgaatcgatatgtatctcggaacacggaccacacggacctgtatcacccatttcccagaagttatcgtgtttgtttccgttgaggatatgatcttttggcaagaactgttcccaataggaagcggcttcattgtcacgttccagtccttcttcggggctgccttcgaatacggtggcgtaaaggttcttcggatctatcttcagaacatctaccaggtattcccatgcccagttgattgcctctttcttaaagtagtcaccgaacgaccagttacccagcatctcgaacatggtatggtggtacgtatcgtgtcctacttcttccaggtcattatgttttccgctaacgcgcaggcatttctgcgagtccgcgactcttttatattttgccgggtggttacccaaaataatatctttgaactggttcatccccgcattagtaaacatcagtgtcgggtcatctttaattaccattggagccgagggcactatctgatggcctttgctctcgaagaaactcttgaacgagtttcggatttcatttgcagtcaacatacgtctgtctgatttatgattttatgatttatgatttatgccatgaggatttatgacttatgcatcacatgatttaaaagaataacttgccgaatactgtagatgtttccccatcactgttttcttataaatcataaatcataaatcataaatcttataattcttgaaaaaactgtgcaaagatagcttgtttttattacttttgtcgtattaatgagcgaaatatttccaaaagatgcgcaaagtttactacatttataatccacagacgcagacttatgaccgtatttaccctactgtccggcaacggatggtgagtctcctgcgccgtttgtttatcggcatgggcttaggggcaggtagtttcattattctgctgattatcttcggttcaccttccgagaaagagttgaggaaggaaaatagccaacttttagcgcaatataatgtgctttcccgtcgtctggacgaggcaatgggggtattgcaggatgtgcaacagcgtgatgataacctgtatcgggttatatttgcggctgaccctgtaccttcggctattcgtcaggcagggtatggcggcactaaccgttatgaacacttgatggatatggcgaactccgatctggtagtgaatacaactcagaagatggatatgcttagcaagcaactctatatccagtcgcgttccttcgatgatgtggtggatatgtgtaagagccatgacgaaatgttgcgttgtatccccgctatccagcctgtttccaataaagaccttcgcaaaacagcttccggttacggaacgcgtatcgaccctatttacggaactacaaaattccatgcaggtatggacttctcggcacctttaggtacggatgtttatgccacaggagatggtacggtgatacagatggggtggcaaaccggatatggtaatcggattgtggtagatcatggatttggttatcagaccgtatacgcgcatttgcgtgattttcgtactaaggtcggcaagaaggtggtacgcggtgaagttattggcggggtaggcagtacgggaaagagtacaggccctcacttgcattatgaagttcatgtaaaaggtcaggtagtcaaccctgtcaactattactttatggacttgagtgctgaggattacgaccggatgatacagattgctgccaaccatggtaaagttctcgattaacagctatggataaagacttgaaattatattattccatcagtgaggtagcccagatgttcgatgtgaacgagtccttgcttcgtttctgggagaaagagtttccacaactttctccgaagaaggggagccgtggggtgcggcaatatcgcaaagaggatattgaaactgtgaagctgatctatcatctggtgaaggaacggggaatgacattacccggtgcccgccagcgaatgaaggacaataaagaaaacactcttcgtaactttgaaattgtagatcgtctgaaagctattcgtgaagaactgctcagtatgaagagagctcttgacggatttacttatgaacaggtggaggagctgaaaaaagatattcaggaaatagaaggatgaataggattactttataccgtgtaaggaaaatggataaagtctcaaatccccgattacaaaaagttaagagtttgtcgacaagaagttaattccttgttgacaaactcttaatttcttgtctactaaaagttgatatcttgtaacccgttgataactaacgataaaaactcttcgcatagaagcgtggtttgtgtataaatatcgcttattttcatttaacagatcatctcttttatacaatcttgctttatagattccttataaccttatggatggagcctgcccaataattacgcagcccgaaacctcttgctttaccaccggttgcccagtcttgtattatttctttcgtttccgtattgaagaatactacttgataagaaccgtatgcttctgctttgttcagtaatttggcaatgataaccaagccaatacccggtttcttttgtgtgggaagtgcgttcacaatttgcttaatctgatcttcactcagcatatagcttgcattggtcgtcatcaattcttgtggatcgatagcttcattgacctgattgacagcatcgagtgagatttcattaactcttactttcagctttttacttacgtcatatttcttggcttcggtaatgaacaatcggttaattccatcaaatgctactttaaattgtgccggggtttctgctgcgccaaatactttagccgctgaatagtccactccatagaaattgatactttcaacttctttaaggaagttcttgttttgtccgaaacaaatcatgcttgttgcaaggaacagaagggtgaatagctttttcatacaattaataatttagaatcagtactcagtttattattttgtcaaaattagaaattagttatcgtaaatcaaagaatttgatgctttttctactcatcggaggcatttgtatctgagagatatattctgccggttcaaaccggatggtaggagctacccgtattttagagcggaataaatctttaatttctttggcaaagctttcgctgttttcgtcactgccaatccgaatcaatatctcgtctgtacctaacttgttggtatacacctcaacaacgtagttctttacccggggaatatcatccaatatgtcgaataatgcaggtggatacagggttgttcctttgtattttatcatttgtccttttcgtcccagcacagaacttaaccggatggtgtttctgccacatgcacaaggttccgtatattggtaacagatgtctccggttttgaaacgaagcaaaggcataccttctacccctaaagtggtaatggttacttctcccggttctcctgccttcaccggaaggttcttatcatccagaaattctacaatgataagttcgggttgcaggtgtccgccatggaattcagaacattcggtgaaggacgattgcatttccgtagaggcataagtggaatagagttggagtgacggccacttttcgctgatacgctgtccaagggtgttcaatgtaaaatcggggttacgcagtgcttcgccgatacatacacacttcttcatagaacaggtgttatgatcaatctgatttttctcggcaaactctatcaatttaatcaggaatgaaggaacgaccatgccgcaggtagggtgaatacggtgaatggtatcccattgcagttccggtataccgttgcctacacgggctactcccataccgagctctctagctcccaagtagtaggccagccctgccatgaagcggcggtctatggtggtcatcagttgcagtatatcgtgtcggctgcatccggcagtattgaaggacagatactcgttgtatgccagacggtccaggtctttggaggtcagtacaaaagtaaccggatctcctaaagttccggaagtggtgacatagtcgataatatcatccgggtctacacagatgaattcactattatgtagttgcaggtctgttttggtggtaacgggaatttgttggaggtcttctatcttcttgattcgggtgatgtctatggaatgttctttgaacatttgctgatagaagtgggaatgtgcctgcaagtaagccaaggtttcagtgagcctggcttcctgatacaatttaatctcttcgggagagtgaaactgtatgtctggattcttttccatattattggtttttattgattttttgttggattcgtactttttcagcttgtttgggtatgggcattgttagtgctttctgccaatagattatggctgtaccagtttgttgtattgcagcataataatctcccaatacttcgtaaacgtaatagaatgaaggattggatgcctcataaagattcaggacctttgtttctattgtttcttttcgctgtgtcttttcccggatgagcttcgttagctgtttataagccatgaactgtttgtagtttgcttgcctgataaagttgtcttcgggaatagtcagactcaaagtggcgatttcgtgatggaaatctatggtatcgctgaatattttgtttagatcgtatgccatatacttgccgcattgccagggagaagtggatacatacatgatctgtttctccggtaggaaaataacagagtgatgggctatgagttgattgatagctatttcattacccatgcccaaatcaatattgtccaatcctttttggttgcggagaatggaagcagctttcatcgggtcgataggcttattctctttcaacagttcttgcagacgggcaaaacgatagggactatcggaagtcgcaatgttttcctggttgcgttcatcgttgcggaaagtatctgattgataatggttggtgcaaataatctgattaccgctacttataaaaagtgccgtcttctccggtgacttttcaatgatagcggctctgccatcctgtgcagaaccgatcagtatggattcggaaacaaatgtttttcgtttcagggcgatagcataagcttcatcaatcgttgaggcatattgcagtatctctctggtcaggatagagatgggagtggcggaagcagtcggcatatccgattttgcagcattgatagtcaccgtgagtccggtttcattcatgcccgaaagtacaccgatcatacccggccaacccacggatgcaaatttatagccttgctcaggctgataaaaagataccagtttgttgtgtgcaaacttatcccccatgtaaaaatcaaaattgcgtccgatgatgagggaagagtcggcactgttttctccccaggtggcaaaggaactgcaacctaccaacatgtaatcttgcatggcatgtcccagatcgtgagccgaatgataattgagctggcgctcgtagggagtaccgataaagtcgtactcatgggtacaggagagcgaaataccataaatttcatctctgaattcttccgggacattctctcctaaattacggttgaaaagtacgatgaagaagcggagaaacttaagataattgtcagaaggtactatttcgcgtatctggtcaacaaagactttctcctgatagtatagcaaatcagaagaaagtttgcctatggcctcaccgcgctggaatgcatcgccactcaccttcaactcccacagaccactgttgctttgccgtagataattgcccgcatattcccgaagactgtctgtctgtaccaattctccgttggccttgggggtgtagtcgggagtcagcatatccgcagagaaatagaggatgctaacaaagaggataatggcaaggagaagcatccctatgccacacgctgtgtatttaattgttttctttaatatcttatgcatggcctattcgtttagctaaatattcatgtccgagtaattcgccacaagtgatgatggaggttaatgtaactcctaaagcaccgtggacattcaggttctgtcctgtgagaaataagtttcccaatttggtccgggtggaaacaaaaccgatctgcggacatttgtaatctttgataattccataagcagaaccgtcgcaagtacccgtaaagtctctgtagctaaggggagtagtggtatacatagtctcgatgtgatcggtaaaatcgatcccgtgacttttgatgaactccaacaattgcctggctttttccattttgaaggctttatagtcttcacctcgttgttcgggaagtgtatcctgccaggcagacagctcatctatatacatgggagtcagaatggaaatgacgtctgcataatcactgttgcgggaagatgcttgtgtggagatcatgcaattggtggtatatcccatattgactttcttatcataccatacatcattgtctccatgcagatagaggttctgattcagatacggataacttttctctttcataatcagataaagagtgaaaatgccgtatgtgttttctaaagaattaatacgggagatataggcatttttgatacagcgggttttgtctagcaaggttaatgtttgtttggggtgtacgttagagatgatgtatttgctttctatccgctctgcatggtttatctctacccctgctacctgattgttctctacaatgatacgggtgacttcactgttgttcaaaactgttccgccatgagcgcgtattacatttatcatttcagaggccacttgcatacttccgtcaatgaaccgataggctccttgtatgtaggagttgttaatcatggcgtgttcatagaagttggaatgttctcttaaaccaccatacagaagtgccgaaccggccaataccgattgcaaatcaggattggtggtaatcttatctatcattcctgctgctgaggtattgaagaacttcattccttcagtagaaataatacctttcttcagattatccacactgatcaggttgcctacctctttcagtaacgttgtatattgccggagattttctttttcgtgaggaaatgattggcaaagggtatcggtaaaacgttcgtatcccatggcgtaatcatatacgcgattcttatagaaaatcttatcaaaagcattttcatccagtttccggactttgaggtgatccatgattcctacataccggaaaaactgattcatgacttgtccttcgtccagactacctatataatgaattcctgtatccaacaaatgtcctttccggcgatacgtctgaaagcatcctccaaacagttcgttcttttcgagcacacatacgttatacccttctttactaagtatggctccacattcaaggccacctaatccgcttccaatgatgatgatgtcatacttactcatggcaattgctttttaagtatatagatggtattcgatgtatatttatcgtttcggatagtctttacttccattccacactcccgggctatgctctgaatttgagcttcggaagtgaagcagagctcatccgtagtgcggttgaacttgacaacttgggtagagagaacttccgtgaggcgggttagccgatgcttatgggtctcagcggaatttccatcacgtacgataatcattccttcaggacgaagaagattagcacatctcactaacaagtcatgttgatgttcataattcatgtaatgcaatacgtcattcaggatgaagacatcactttccgggaactcataaaccgatgcgtcagcatgttcaaaacgaaggttttcgccacgaagccagccgtgttgagctatagctattttatcttcgtcataatcgattcctaatatttgcctttctttggatatcatagacagcatatagcacagaggaccgagaccgcaaccgatatctgtaatctgtcctttcatcggaatcagttgattgaataactggtaattgtgttccatctttactttgatgcggatgtaccactcgatgacaggacttttatagatatagttcagtaccaatgcctcataaaatgccggattcgccggtgtattcttttccaggcaaatacgtgcatattcttctttcatataggaagaaatacgcttggtacgttcctgataggtcgttccgaatgaagcatcgttataaagtatgcgaggcaatattttagagtaaataatgcctttgcggacatagaaaggttgtgccttggctataatctctccattgccgtatagcagaataggaataatatccaattgcagagtttctgataaatagaaagcacctttatgaaaacgtttcatcttgccgtcataggttcgggtaccttcggggaaaatggcaatggagtatccttctcttactttttcccgcatccgttccacacaaagttcatatccttcgtctacatggaagaagcctgcatattgaataatttttccaaataccggagagttccatacccagtgattggttatcatgataatcttcggagaaaaagataataactccaggatatcaatgaaagactggtgattggctattatgatagccggctttttgaatgtctcattggttacgttgacgtgttctttacgtacaaatgttgccactaccaatatacccttgcaagtaatgttgataatccggcaaacaagctgctgcttataactgcggcgtaccggaatgaggtataataagaaaatgaaaattctcagaatgatgcatcctgtaacgaagagcatgaaaaggaggatcgtgcggagtaagcctatcaaggtatacgggggcaatcccttagaagccggtttagcaataaagaactggaaaataataggttgtatggtataggctactaataccaccgctgccattccaaggatggaaatcagtgaaatggattgcagggcgggatgtttggcaaatactaaagttcccattcccacaacggctgtgaatgcagagaagaaaatagctgtcttatgggaattcaggatcgcttttcctgtccggtatttgttttggagtccatccatgatgaagatactgaagtcgtctccgataccgaaaatgaaagtagagaggataatattgataatgttgaattcgatacccagaatccccattaggcccaaaataatggtccagctgataagcataggcaggaaactgatcagggttaattctatacgcccgtacgaaatcaatagggccaggaatataaggaatgaagaaatataaagtatcaggtaaaagtcattattgatggcagagacccattgattagtgaaataactccggtcgaagactacaacatccgtattatccttgaattgttgatagacttcttccttattatcatcagtgatgcgtacctgggtaacgagcatcgtgatggagtcagcgcttgtttgccattcgttcagtagggtagtggcgatactgtttgtatcgtcctgataattatagggctggaatgggtgttctaaccattggtaaaatgcatcgaaactaccttccctgaagtgataggtacgggcggcgtcttctatgtatttgcgaatagttgatatctttcctgactctccccaatactggttccatcgttccagacgcttttgctgttcctccggtgaaattaagaattgctcggcagatgcatacgctttaataagcccttgctctttaaaagcagataagtgctgattggtatttgcatagctttcgagtgcttccgtcatgttcttacctacactgacaaaaagtacggttttctcttgggcattgaaaagctgttccagtttagcctctgcctgtttcaagtgttgaggttcatagttgaggctcatcatgtcttcgttaaacctgactttttgtgaagtaaataagccgatgagggtaataataatgataccacctactaaccatttgttcttttcataaggataagcattgattttttcaataaagcgtaagaccctgccttgcttcacatcagcttgtcctttcagaaaatgtggaaggtaaataagacagaaaagagtagtaccaataagtgccagagaagcaaacaaaccgaaatcgcgtagcaattcggaagtggtaaaagtaagtccgaagaatgcacctattgtagtgaaactgcctactgtaagcggataagttatttctttaatcaattgctggacagtagaaacatgattttgatgggccagcatgtgtatggagtaactcagcgcaatacccagaatagccgagccggcacctacggcaattgcagaaatatatccctgaataaagtagattaggcataaagcgaacaatcccccgaataaaacgggagtgacaatgagagggattgatttcttatgcttaaacaccagcgagatgaaaacaatgataatcagcagtgcgatcgaagaagtaataatggtatcctttttaatctgtcgtgcattatagacgctgaccgagggacctccaaagtaagatgcgcgaatggaaggatactctttctgaatctgttgcagctcattttcaagtattcggatcagattttcattctcaccggtacttcctgttccgaataccggggtcataaacatcagcaatgtatttccatctttcgaaaagatatgcccgttgttgatttcataattggtttccaactgaaaatcctgcagatgctttaatacgttattcccaagtcctaacgggtctctttgtatataacctctcaatgctatacctgcgggagaaagaaggttggtatagttctttcgcatcatggcttctataccttcctgtgttaagagtgagtcgaagtgctgatagtctttttccgtcaagaacagcggaagattttcataaacaaaatctgttgctttttcaatggttgtttcatctacttccgaaaagatatctttaatccaggtttggttagactcttctaataagttttgtttcagttggtctccgacctctatcattagatccggagttactatagagtcggcaggagagattaagatgataatcttatcctttatttttagattatcaaataccttggtgatgttctggttgttcttcgtatcaggaaagaaacgggtcacattctcttcaaacctgacttgccaggcgaagtaccccataaaaaggacacaaacacagagtgacaagtagaagagaactttgtgtctttgaaaataattatatagtctgataaagaactgagtcatgttgttttcggccttctgtatatagtgagcaggctgatcgttataatacctgccagtatactacaagcggttgcaaagataacacttccaattaaatattgctctaaaaccgatttcacattttcaaatgaaatattggtaagatgaagttcaaccggtctgttcagtactttacaccctgtcaggtaactgccatataataggaaaggaatcatgggaggaatactgatattagctgctacaatggctattactttgttgagtttaagcacatgagccaaaaataaagtggcaagcatctggtatccccaaatcgggactattcccataaatacacctaacataatggcataggtaatcttcagattcgattcttcggactgtgtaatgtgagttcggaagaatttccggcaattgctccaggttagtttccggaagaagttacgcggataaatccaaaggaaagtgatgaacactaagaaggtattcaatatactgatgcgggtgaaatcccggaaaggacggaagtgggagacacgttcttcctggggcggataatagacatgtatgggtatattgcggaccgtggttcctccccatactgcaaagaccagtgcttcaagttcaaattcatatttagcggtatagtagaatctctgcacattgattttatgtaatggatagagccggtaacccgattgggtatcctgaagctttactccggtttcaagtttaaaccagaagttggagaacttattagcaaaagtattcttgcccggcatattgtccgaagtcagattacgggcacctaccagcaacgtatccggttctttttctatttcttccatgaaaataggaatgtctgaagcaaaatgctgtccatcggaatctatagtgatggcatatcggtagccggctgctttggcctgttttaatccgttctttaaggcagttccttttcctttattggtaggatgggtgatgatatgcaggttcggatagttttccagaagagtaggggtgctatcggtagagccgtcattgacaacgatgatatcttctacatagaagagtacatcttcaattacggtagtcagcgtcttttcattattgtaggtaggtataataactacaataccaagttgcctggctttctcatgccatagttcctcgctacgttcttccatatttatttgccgattagttgtgcttttaatttgatacagatatcttttgaagatgctccttcagccagaatctggaatgtatccgtttcgttttttttgatagtcaatgagagctttaattccggtgtttcattcggattaataactgaaagaaacttgcatgatgctatctgcttgtattgcaggggagcttgctgtattttttctatgcactcctttattatttgcagcatacaaacgcccggaactacgggctgttgtggaaagtgtccgctataaatagcatgttgtgggttgagcatgacttgcactacccagtctgtctcattgatatgctcagagtgcgtgactttatagaaattgggaagaagttcagccatattagtttgggttttcttttaatttgtccaactgtatccttagtcgtaaccagggatgtttgatttttatctgttcgggatgtcctgagttgaactccgatagatagaatactgtttttccgaatcccctgcctgtgactcttttttcaaaggtactgcttttctttttgatgcggatattctttccacttaaaaatagattcttgaagtctgtttccagtaatagcagcattttctttttcttcatgggctctatgcaactgttgacgtgaaattcattttcccgaagtgaaaaatcaaaaagactgagtccaaagtaagtagatgccaatattcttatttcattatccggcaatttccgtacaattaataaaccgctgaagtgatgcttcatgaagtctaactgcatattgtatttttgcgaatattcttcagcgcaaataataggtgtcacataagatgtggcatctcctgctattgtttttgaggaaccacaggaagtgaatagatacagaataaagatcagattagcgaatagaaaactttgtttcatctttcaaagcattaaatctcttgttgtagaattcatattccgtataattggtggctgtttcggaaaggcgtaatttgtaaaccgacatatctttcttatccaggtatatttcaatttccgaaatgtaggcttgtatggctttattgaccggcttaatcttcactatataataggaatcattttcaaaatattccagtttgtaatcggaagacatttttgagagatcgcctatcatacaagcagtgagcatatcttgcatttgattcatcattttattggcggttaggctcataacgctctttttaccgtccgatacgattttaagccgggagtcgtttatcactattaggtagttgacgggttgggcgtactccatacgtattttgccgctcttttgataatagaactttcctttggaggttaccttctcatccagaatatccaggtacttcacttgtgtaaagtcactttcaatggactgcatggtttgtgcttcctttgccagacggttttcaaaatcctgggtatggattagtttcttcattgtctgggcatgggtataggaaatacccaatatgattgataatattattagtatggttctcataatgcttttataacatgctgtctagacggacaactgtatatccctgttctttaattaaattaagtatctcttttaataacaggtcactgtccggcatccgatcgtgtagaaggatgatagaaccggggcgtaaccttttctgaatacgcttcaaaaccttctctttggaaggttgcagtgtatcgagtgttctgatattccagccaacaggagtgtatcccaatatgcggacagcttttgctatagtaggatttgtgactccaaacggtgggcggaataacttgattttctgcgaagttactcgttctaatgcaaactggcaagcttgcaagtcttttttcatccgcgacaggctgtacaagggaaaatgattggtatgggtaaaagaatgattaccaatcaggtgtccttcgttgataatttgtcggatcaactcctcattctcttctactttgtgaccgatgcagaagaaacaagccggtatttgttgttctttgagtatttgcaatactttgggggtttgtaccgggtccggcccatcatcaaaggtgatagctacaattttatcttcagtctgtttcttacaaaataccttgagatagatgttagaacggatgttgcaagatgcgtagacgagaaagataatcagtaatgtgatcaggatttctactatcattgttttttccggattaaaataagtgaatggttaatggagtgataatgattatatatcagagctgtctgtcccgggtttagattctcttcaaaagttttagccactttccataaagcaaaggaagatgccgtaggatattcaccacattcattcttaaaggtggtatatgttgctgtgggaaacaggctgttttctaaatcagtatacagggtatcttctttcaggtttccattcttaccgataacaaaccaatcgatttgtccggctgttaatcggttactttgcaaaaagcgatgaatcttttcagctacttcctgtgtactgctcgcatgaataaaagtcgatataccggcaagttctgctaatgtggattcggtggtttctcgtcccaataggaagaactgggcaccttcgcctgcttgtatgccccttagcagtcccaggcgttgttgtatagcgtgactgttaggggtaatctcatcaatagctcctacgaggacattttcatcaccttcccagattctcatcataccgtccaatagtgcactttcgaaactcaatccccggtgcacatacgtcatgttgtaagcatgtatctggcggagtaatgctatttgggctccgatggtgttgaaggttgattggataaagggggttgggttcagtagttgttcttcattctcaatgattgtattcaggaacttctctgtatctgccaggcatccgagtccggttgcagtgatgatcgcatgtactttttcggaaggtagggtactgatacattccagtccgcaggcaactcccattttgacgatccggctcatacgcctccgtagtgcggcatttgtgataatactcttgtaatccggttcgttagcggataaataaggggattctccggaagcagtatccgcgtgaatagaagcaatatgattgatatagacaggttgcatcatttctcttttaatgtggaaaacaggatcgaagaatcatttccaccgaatccaaaagaattcgatagtacattacgaatgggtagtccctcgcggaatgaggtttcgggcatcaacatgttttcttctataggttctttgaagttcagattgggatagatgaaaccatgatatacggagagaacagaataaaccgcttcaattccttccgaagcccctaatgtatgaccgataaacgctttgacagaactgaacggaggaattttatcaccaaaaatccgtcggatagcaagtccttctgaaagatcattacttggagttcctgtgccatgtacattgatataatcaatctcttcgggaggaatttcactctttgctatggcttctgtcatagaccagaatggtccgtttccttcgggtgaactaccggtctgatgaaaagcttcattcacattcgaatatccgcttaataagcaataaggctctttctggagtagtttctctgattgaaggacaatatatccggctccttctcctaagttgaggcctacacgggatgcgtcaaaaggacggcagtgttccttatccaaaatcataagtgagttgaagccgttgagggtaaacttgcacaaggcgtccgtacctcctacaatggcagcgtccagttggccattcctgatcatgcgggctcctaacatgatagcattagctgctgatgaacaggcggtactgatagtggttacaaagtcatttactttcagataatccgctatcatttcagtacttgcaccgcagtcatgagagatgacttcccgtaatcttccttttctattgtcctttttaaaggcattgtagaaatgttcactcaaatccataccacctacagaagtggaagatatgagacctacacgcaaagtattcaaatctaaccgggcgtcatcgactgcttcccgggcagctaacatacctaataaggctgtccgggaaaacgttttttgtatatctaaagagagtaaccgttttagttcttcattgctgtattttacctctgatacgggtacatccagttccgtagggaaaagagtgactttccccataccatgctgatgtttcctgagtgaagctatattttctgcaacacccagaccaatacctgaaacaacacctaaaccggttacatatatcttcattatttctgattttcagagatatagttagctaatgtacgtattgagtagaaaatctgtttcccttctgcaggattctttattttgattccatagttacgctctaaaataaggataatctcaagtgcgtcaatagaatcgagtcctaaaccaccgtcaccaaacagaggttcatcaggattaatctcttcgggtgtgacttcttcaagattcagttcttctattaattctctttttagtttttctattaattcttccatatcaatgttgtacttctattagtttaaaatcagctttatactcttccattaaaaggttgcaccatccggtgatgcaagcttttaaattacctttcttcattacaattcgtgcatattcttccagtttatccgcatcgaattctttttctatgaagaaagtattttctccttgtatcttatgacggatacatatctcaccagctacaacgttaggcagag

SEQ ID NO: 6367 - DNA, 21174 bp, Unknown
  gut microbiota DNA sequence
tactgattattagattaataaatctgtgtgaatctgtgtaatctgtggtgagtcttattcattcctttcgtgttatgaatcagctacgagctatcccgaaggcacttatcactaacccctaatcacttttattcgtatctcattgagttagcgggatggatgcgtgtaatcaggaaagaggggcctaacagcatcaggacagatgccagcagagtacctatattcagtaataagaacagcaaaatattgaaggatacgggaacggtatccatgtaatacgtctccggatcaagtttgaagataccaaaccacttttgcaagaaatagaacgccagtccgatgacattgccccatagcatacctttaccgataagaaagactgagaaccaaaggaataccttgcgtatggtggtgttattggcgcccagagacttcagtatgccgatcatggaagtacgttcgatgatgataatcaataagccggacaccatggtaaaacctgctacgcctgccatcagtatcaatattacccagatattcacatccagaatactgagccaggcaaatatctggggattcagctgctctacgttgcgcacgcaatagtcttcaccgtaccggtcctccattccgtccaggtcggcagcaatctgataggtgatctcttcaagacgatcataatcgcgtacctgcaattctgcaccgctcacttgccccggttcccagttgttgagacggtttacaagatataaatcggtaaggaggaaaaggttatcgtattccgagaagttagtctggtaaattcctacaatctgcaaacggcgggcacgaatatcatcctggatataataggtatctatcttatctccaagtttcaacctcagctttgtagccagtgccttagaaatgactacccgattggaagaagccgtatcactaaactgcggtaactctccttccaccagatgttcacggaaaaaagcaggatcaaactctgatcctatccccttcagaaccatgccttgaaaatcctcggcagtctttaccatgcccggtttggtggaatagcgctgcacatgcttcacctcaggatattcggatagaatggagatgacactgtcgttcaccaccacaggacgcgtctcgtaggaacgtgcagcatccgaattcgttatctgaatgtccgcaccgaaacctattactttaccacgcacttcgttcttgaacccgacaatcaccgacaccgtgataatcatcaccgccagaccgatagcaacacctatcagagcaatgagcacggcaggacgggaaacttgctttcccgcatcgctgtcgcgataaatacgtcgggccaaaaacagggctaaactcatgtcataataacttgtgttcttcttacgtatttattcaactcttcccggatatgcctccaatgcctttgataagacaaaaagcgcacgggtcaggtcttccttcttcagcacataggctatacgcacttcattccgaccggaaccgggagtagtatagaagccggaagcaggtgccatgaatacggtttgcccttcatactcgaagtcagaaagacaccaagcacagaacttatcggaatcatccaccggaagttttgccactgtatagaatgctcccataggaataggcgaatacacaccggggatacggttcagtccgtctatcaggcacttacggcgttctacatattcatcatacgtatcgcgcaggtaatcctcatcggcattcagagaagcttcggcagcaatctgaccaatcaacggaggactgagacgtgcctggcagaacttcattacagcactacgtatttccgcattcttcgtaatcaaagcaccaatacggataccacattccgagtaacgcttggatacggagtcaatcagtaccacattgtcttcaataccttccaaatggcaggcagagatatagggagaacctgtataaataaactcacgatacacttcatcggagaagaggaacaaatcgtacttcttcacaaggtcacgtatctggttcatctcgcgacgggtataaagataacctgtcggattattaggattacagatcaggatagcccgggtgcgctcgttaatcagctcttcaaacttttctactttaggaagcgaaaaaccttcttctatggtagtggcaatggtgcgtatcttagcaccggcagagatggcaaacgccatatagttagcgtaagccggttcgggaacaataatctcgtcacccggattgaggcacgccaggaaggagaacaataccgcctccgaaccaccggacgtaatgatgatatcatctgccgtcagtttgatgttgaacttatcataatagcccaccagcttctcacggtaactgcgatatcctgcactgggactatattccagaactttccggtcgatattgcgtatcgcatcaatcgcgacttgcggcgtgggcaaatcgggttgtccgatgttcaggtggaatacatgcactcccctttgcttggctgcatcagccagaggagccagttttctgataggagacgcgggcatctccgttccgcgaatagatattgctggcatgtctaagtttttacaatttgacaaataaatattaacgattgacgatacactttcatatatatgcaatcgaaggtgcaaaagtaacactttatttgaaatgacgggaaagcattggcaaaaaagtttaaaaacactagctatgacttaaaagatagtgatgaattcaaaagaaattgtacctttgagtgtcaaatcgtaaatcatatacaatgccatggtattaaacctgataacatttgcatcgttgctgcataaacaagcatccattctcggctcacacgaacttatattaaacgaactggagaaatatttcactgtaaatattgtagaatatcaaaacataaacaaactcactaaagacgatttcagcctgcttttcattgctaccggcggtgtagaacggttggttatccagcacttcgagtctctgccccgccctgcaatcttactggcggacggtatgcaaaactcactggccgccgctctcgaaatctcgtcctggctacgtggccggggtatgaaaagtgaaatcctccacggagaattacccgaaatcatcaaacgtatcttcgtactccacagtaacttcaaagctcaacaagcactcttcggatcgcgtatcggcgtaataggctccccctcttcctggcttgttgccagcaatgtagattaccttctttccaaacggcgctggggaattgaatacaccgacatttcactggaacgcgtttatgaatattacaatcaggtaacagacgacgaagtgggcgaagcctgcgctgcttttgccggtaaagcgcttgcctgccgcgaagctacaccggaggatctgataaaagccatgcgcctatatcgcgccattaaacggattgtggaggaagaaaaactgagtgcactcaccttgagctgttttaaactgatagaacaaaccggaaccaccggatgcctcgccctctccctattgaacgatgacggtatcattgccggatgtgaaggtgacctgcaatctatctttacccaacttgccgtaaaagtgctgaccggcaaggcttctttcatggcaaacccttccatgatcaatgcacgcaccaacgaaatcgtacttgctcactgtaccgtaggtattgcacaaaccgaacaatacatcatccgcaatcactttgaaacagagatgggtatcggtattcagggaatcctgcctacgggacacgtcaccctggtaaaatgtggcggagaatgtctggacgaatattacctgagcacaggcaccctgaccgagaatacgaactacattaatatgtgccgcacacaggtacgcattaaaatggatacacccgcagagtatttcctcaaaaatccattgggaaaccatcatatcctgatacagggaaattacgaaatactgctggatgaattcctgcaagcgaacggatgcaaaagagttgaataatactattcattaaaatcaggtacacgtactgtaaagcgtgtaccttttcctaattcagaagatacgtttatttcccctctgaaacgctctacaatagtctggcagatactcagtcccaggccggcaccttgcgtaaagctatccactttatagaaacgttcgaatatgcgtcgctgattttcttctgaaatgccgcttccggtatcttccacaaagaaaacggtatagcccggctcttctgtctggaaaccgaaagtgatagaaccttgagtagtgaacttcttggcattgttgatgaagttattaattacctgtttcagacggacagaatccgttactatcgatttaccctcaccttcgggcagcttcatgaccagctctaccccccgaggcatactcaggcgctgagagtcatagatctgctgcatcacaaacgtgaggttgtatccggcaaaacggaagtccattgaaccggactcgatacgggacagatcgagaatatcattaatcagtgccagcaataaggtacagttcgtgttaatcgtatccacaaactgtttcacttcctcaggactgaatgcttcaatgtccttcagcaagtcggagaaaccgacaatagaattcaacggagtacggatttcatggctcatattggcaaggaaagccgacttcagagtatcagcctgcaaagctttgtcacgggctgctatcaactcttcttcggtagccttataacgctggatactttgacaaacacccaataccatataaggtgcctcggaatccagaccattgtaagaagcactacggaattcccaccattcatatttaccttctccgctacgcatacggaaactcatccgggtatccatttcctcgcctttgaaaatagctgtgaaatgttgacgagcctcttccaaatcatccgaatgaataaaaagctccaattctttccgcaagatggtctgcttgccgggaagcccgaagtaatcgagcaatgcacctgagaaatggaaactgtgcgtacgtacgtcatattgccaaggatatacggaacttgcatccacagccagattaaagaagcgtttatgcatttcttcctccgagatattgcggcaacaaatagccatacctgtcatcttgttcttggagtaaatcggcacaatttcaccggaaacaggaaaataggttcccttatgaacttcctgcatgaaagccttttccggaatagggattacacgacgctctgtcctcacctgtttcagtaatgattgcaggatgtcttctccgtttgaataaatgtggaagatggaacctgccatctgcccttcgtaagaacgtgccgtatgagtgtcagggtccagttcgagcatcaacatcaaagcacggttgacaaaatgtatacggaaatccgtatcgtaagttatcagtccgtcacggatagaacagaagatattatcaaattcgtcacgctgctccaccaagcggttctgtatcagcaaacgcgtctgggcgtgcatacgacgacgtgattcatgacggttcaagcgatagagccagataacaagaaagaccaatgcacctaccacgacagagtaaaacagcacaaaccagatacggtagcgctccatcagcggtgcattcatgataatgccactatcactcactttatccgcattcactctaaaaaattccaactgcttgaaatcataaagcagtttaccgggaaggtccacgacccctatcaccgaagggatagctccttgcaacacctgtgcagcacactttcctgccgcattagctccttcgtaaggttccatatcgtgcacgcagaatactccgttagtcaatgccagactttgtccggcaaaaaccggagctttagagttttttccgatgaaagaaaggaacggtgtccatttgggggcaatgacaatgcggttataggcattataatcataacaaatagaggaaatgacaggattaggagcctgtgactgtacattcattactttcatcttatattccggatgaagctcctggaaattgggccatatacgctccagttcagcaacacctttaagtcctaaaagactactgtccgaaacacaaataacttctgtacgattgggaaatacacgacgtgcattttcgagtaggtgcacgaaatcaatcttggatgtatacccacaaacattgggtaacttcgagatcagcttttcattgggatatttgatacccgatatcacaaccggtagtttataaggcagggaatctccacaatgcatcaatgtataaaaagcctcatcactgcttgtaataataatatccgtgtttttttgacgtgcccgttcacaaatacgccgcataatgacacactcagatgcaaaagtccagtaatcagcatccaaatattctgttgtgactttcgcttttatacctccacgtgacaggccatcacgcactccttccgtcaagcggtcattccaaggagtacgatgattatatgactggatgaaaagcacgttgtatgtacgttccgcagcataaaggtgtccggcaaatacaatgcaaggaaacaggcctatcagcatcacgaggaataagcgtctcttcatatctcgtttttcttctgttttgaataaatgtgctatgaattttcctcgcaaatatacggattatattgaaatacagaacagaatgcaccttttcttttaccccatgcaaaagaaaaggtgcacatatagaagaaaaactgactattcgtcgtgcaaggcatccgccggttgtaactgcatggctttataagcaggataccagatgccgacaataatcatcaacgccataagcaaccacgtaagtatagctgcaatcaggaaccggtcgactgtaaattgcattttactgatatccaccaactcggcaatacccacattaaaagcaataatcaatgcaggaatggcagctaccgtcaagagtaatatgccttctcccatcaagcgcagaaaaatgccgcggcgactggatcccattgccatacgcaatgccacttcacggcgacgatgttgcgtacggaaccagaatgtaccaattactcccaagaagatattcagcatcaggaagaacaggatgcaaagctgtgtcttcacttcgttcacatcttcaagttcgctgatgtgacgaatatcgctgaaagaagatgcctccaacagaaagatgttacctacccgatataagcggtcggcatctgccataagtgcatctacaaagtctttgtctgcatcaggagaaacacggagactcacctggacgtagcgcacgttacccagctcattaatcagctcatctctattcagattattcccgataaacgccccaccccattcgtgcgatgtttcaaaatgagaacggcgcacaggaacggcaatggcagcaatacgacgatgatacccacgatcgggataagtcagggccacttcacgattcaatagcggacgtgcatcgggtaaatcaagtaccggataatcctcagtgatattggacgtgataatcatggtttggtcggaaatagcagcagccagttgctcggaagagcctccatcaactgcctgataacggaaaacacgatagaaatccggatcagaccaaaccaggtaagcacccacatgaatactatcctgcaaataaaactgagcgctgttacttccctcattataagggtaacagttctgtgaaatggagacagcctccacacccggacgatgccgtaaacgttcggttatctcaagcaaagcatctatattatcctcaactgtgagttcaggattataaagtgccgacttggatgtcaaggtactgaaagacaaattatagcaatgttccgtatcaaagcccatcggagcgcgataaacgcgcgcagtgacagtaacccagtctacaatgtaccaaagtacagcaaaaaccagcagtaactctacgagtagaaagagattacttcgccattcatttttaatttgtgtaagtagattcttcatagctatctttggtttattgcatcagtaatattcatccgcgacgcacgccatgcaggaatacctgcagaaagtacattcatcaggaggcagaatgcgaaagctgctataaaagcccacggtgataataacataccgggagtcagtgctgtctctccactgaggtaggcatttgtcgaattactgaaaagaaaatcattcagtaggaatgtggctgcataactcaacgctaatccgacaacacctgccagcaacgtcagtacaaaattctcaaagaaaacttgccgtatcagttcaccgccagtagcaccgaaagccttacgcacacctatctccgccatacggcgacgcatacgtgaaagagtcataccggataagttcactgccggaaccaataataagatggcgataacgataccataacgtaacataactccgggaacatcaggttcagcgtaccaacggcgatagagataagccagttgtgtatcgggttgcccgcgatagaaaatctctacatcccgtaatccgtcattatacttttggcgtaagagttctgtttcctttcggatcgcatcaaagtccgccgatgagtgggcaaggataaccgcatgcataggtcccatcgtgtcatcctgccaagagagggattccgcatcggctgcggtgtaaggtacccatatctgtgcataagcggccgtagcaagcatagatacgtctgccacaacacctgcaactgtgtaatctatatagtttaattgcaccgtatgcccgacaacatcggtagtaccaaagagttggcgggcaatcgtagcactcagcacggcacgcggtaatccggcatcacaatcagcacgggtaaatcctgcaccactgagaaaacggaaactaaaaacgctccagaaagcttcatcagtctgtaccatatcagcagtagctttcgatccggcaggcacagagacacgcactttgccagcactactgactaaagtcacagcttccggcgtagtcaacgcacggaaacattcacgtccagtacgcactgacatagaagcattagccgattcattgtccgatttccctttcagcttgacggacatataaggtacgtagagtgtacgtgagcgattcacttcaggctcacaatctacgagacgcacctggaaagtgatgacaagcaccataatcatacagatggccattgccgtacccaacacggacacccaggtaatgatagggttctcacgcaagtgatagagggcttgaaggaagtagagtcgtatcatattttaaagtaatttaatcatcatgtaaagcctcagccggttgtaccttcattgccttacgtgccggaataccaatgccaatggcaatcatcagagcaatcaatacaaagctgatagctgcacaaagcaataatcggtcccactccagcgtagtgttatttctccatgaattcagttccatgtgtgccagattccagtctataaccaatgctataggcgtaacaactgccagcaacagcaaaccctcactcagcaatcggctgaagatagcactgtccgtcgccccatgggctttgtgcaatgcaatctctgagcgacgttgctgggtacggaaccagaatgtaccaagcaatccgaggaagatattcaaaagcaggaatcccatacccattacatagttacggatatcattggtccatgcctgctggaagttacgacgtatatcatggaaagaacgaatttctgaaataaagaggttacctacgcgaaactgagcttcactgtctgctttcagccgttgaatgaaatcatggtcctgtccctcacgaacacgaacacaaagctccaaacctacatagtagaatgactgcttacataagaaacagtacgaattgcgagcctgatcatagtcatgataacgcacgttttgtaatgcagctcccagacgataggtcctcgttgtatcaccaaaaagctgaaaacgttggcctatgaattcagtcattttacgattatatttactataaaggttgttagaagtaaggatctcaccacgctccagcatttcagccatttgttcgggcgtctcaccttgtgcaccctgataacggaagacacggacaaagtcgggggtcaccatgcgacggatagtccaaccgggagagttcaacgtgtcgattttcacctctccactactgttactaccattatagggataggagttctgtgaaaggctgacagcttccacttccgggcggcgacgcaacctttctaccagttcggcaatatcattgtgagtatcttcggatttccgatcggcaatgtaatccgggctctttggcgtcagttcacccaactctatcaggtaacaattttctatattaaatccgcgtggttccagataagtggcggtacgggtgtacaggtagtctaccacataccacatcactacactcaccacaagtagctccagcgccagccagagattattgcgccattcattctttatttgtacaagaagtttcttggtcattttctttaatgattaatgtttagtgattaatgtaggcgaccgcccaatgcatttacaattcccactcttgaagcacgccacgccgggaaaccgctgctcaacaaattcagcacaaagcagaacagcaatgcccaaccgaaagtagacgcatgcagcaatataccggcatccactgccggaggactcagcgtctgactgaattcctgtgcaaacagcaacgagttacccagataagcaaacgccacgctcaacaacaaccccaaagcaccagccagcaacgtcactaccaagttctctgaaataatctgccccatcagttccatcttcgtagatccgaatgcacggcgtacgcctatctctgccacacgttggcgtaagcggctttgagtcatcgaactcaaattaatggcaggtactatcaacaggattataaaaataatcatacgctgacggcgatgctgctccacgtcgggctcctgattggcactgaacgcaatcgaactcttctcctgatcataaggacgattacgataaatcagttcatagccatcctcgccgagaatgacattgtactcttgcctgcgtcgttccgcttcttcacggatagcttcgaagtcatcgcggctccgtgccaggatggtgcaactcatcatacccatgtgctcatcactccaagtatccttggttatttccgttgaagtataaggtacccatacctgcccgtaagcaacggtagccagtgtagaaacatcctttaccacgcccgccactttgtatggcgcatggttcaggaggaactcacgaccgatagcatccgacgtctgaaacaatcggcgtgctacgctttcggtaatcactgctaccggctgtccggcatcgaatgtagcccgatcatagggttttccggcaataaaagagaaatcgaacacatgccagaaagtatcatccgtttgcagcaggtcgatacctgtgccgggttgtcccggcaagtttacaggcgtagaaactaccatgcaggtgtagatagtcacagcttcgggtgttttcagggattggaaacactcgcgtgccgtcttgagtcccatcggaccgttactgctaccaccaccccaattcttattcgtaatactcatgtagtggacatgcagaaaacggtcacggttgctctccggagcaaaaggcgccaccttcacctgctgcatcatcaccaccaacataatgaggaagatggcaagtgccgtaccggctatgctgacagcacttatcagcggctgttgccgaagctgtgcccaggcctgagtaaaatattgctttatcattattctccaatcttcaagttacgtgtattcactccaccaataccacccttagagatgtctgcctgacgtgcccgtccgctcagggtaacgctgcctacgccttccatactggcacgcaaacggtcacaatccacatggatatcagctttacctacaccttccatctttacaactaaagatttacaggtcaggtctttcacattcactttacccacgccttctatctcgaacttgacatcattcagtttcagcgcaccttcgcaattgaaagagcctacaccagtaaactctacatctttcagatcgggtgcactcagatagatggtcacccctttgttgcgattattatcaccatctttcttattcttgaaaccgataatcaggcaatctcctttcacttctgtagtagtagtggttacatactcttccctaccttctattttcagagaatacgaattactctgcgtgaaatacaccgtcgctacagatgtcacctttacagaagaaaaagcttccactttacgaacttcgcttacctgcgggtccttttcattagctgcgtatactgtgccggctactgcggcaaataataaactcaaagttataaataaagtcttcataagttttgctatttaaaattgtttttactatttctcttttctattcttcatgtaaagcttcagccggctgtattttcatcgcctgccgcgccggaaaccaaatacccaccatcaccataagtgctatcaagaaccaagccgctaaagaaccaagcaggaagcgtacaaaactccactctaccggccaggtagaaataagctccgttcgtcctatggtgaattctgcgattcctatattataacagataatcatggcaggtattgttactaatgccagcaacaataatccttcgcccgccagtaacctgaacacctgattctttgtactccccattgccagtcgtaaagcgatctcactgcgacgacgacgagtgcggaaccagaaagtgcctatcaatcctaaaaatacatttacaagcaaaaaaagcacaacaatagcttggctattcactttatccgtatcaccgttcatgacttcaaattgcagttgttgttcggtataaggtacagcatcagccacaaacagatcgtctacatccagtcttggcgcaatctcacgaatgaaatttgtacgataatccggaccatcggcagcaggtttcacacgaaagactatctgtgcccactcgtcggtaaaatgtctcttaatcagattttcatccatacgatagaaaaagcaaggagcatcacttccatagcgataggttctaaaagcttcaatctttccaccttgcgtgacgactgatgtggagtcaccgtacttgctcaatggtgtatccaacgagaacgtcggcatccttttctgaaaacggtcgaaagcagcctgactcaacatcacattgtcccaccctgaaggagtctccacaaagggacgttgcggatcatcactcatgcggaaaacgttaatgtatccaccagtggtattgatgatacgtgcatttacacctatagtatcttgtgcagccaatgaactgtaactgttgcttccgtgcatcggcaaactccagtaacacagggcagctgcttcaacgctgggttcctgctccaatttcttcaatgcacgcagatatctgtcggcatttgtcaaagttgtatcacttgtagcgccgcctataatcgttgtaagtctatatacgtggtcaatgttgtaaccaagaggacggtaaaaggtgtacttgaggcaacccaatgagtcacaaaggaaccacatcacgacaaacaccaggaacagttcagccagcacccatccgttactgcgaaaacgcgaccaaatcatgcgtagattatgtaatatgaatttcataaggtctcctttttatttatcgttcaatgagtctacaattgtacggcgggtggcaagccaagcgggtaatcctgcactcaacagattaatcaccagacaaaaaacaaaagccaatacaaacaccatcggactgaacaaagcgtccatacttaaactgaaatcacctgccgtaccgatattctggctattagtgaacagccatgtacgcataacgtaaacagcaagataactgaataccaaccctactgcgcctcctatcaatgtaagtaccagattctcattcaatatctgacggataagcgtgctaccggttgccccgaaagctttgcgtacacccagttcgctaacgcgctgttgcatacggctattgctcagcccacacaaattgagcgagggtaccagcaaaatgatgaacagggcaattccatattgcagataaagcatcggcagatccggccctacattagcccaaacatggttcacgtgcgccacaatattgtcaggttgctccataatgtccatctgcatttcttccagaccggcattgacatccttcactcttttctcaactccttgcctgatagcaggaaaatcatcaggagtacgtgccaatactgcaatagtttttccacccagatagctccaccaaccagttactttcaattcatcggtatggtacagcccccatacttgagcataagcatctttggcagtaacagaaacatccttcacaactccgataatacgcgacagttctctattcagcaatatttgctgcccaatagcctctgttgttccaaaaagttttcgggccacagaagcacaaataacgatagagcgcatatctcctccccgatcggcttcagtgagagctcttccaccaagaaactgcatactgaaaactttccagaattcaggatcagtattcattgcatcaactttcaatcggttgttaccatcagctaaagataccagtgcaacatctgccgttgtaaatgcagtacaagcttccacttccggaattggctgtatgcactctttcataaacgcagccgaaggagtgctataattattcctatccttattctcttttccctgcatgtgcatagcagagaaatacagacagcggctgcggttcacttccggctccaagtcagcatacttcgtctgccaggtaatcacgatagccataatcatggtgatggcaaaagccgtacccagtatggatatagtgctcagcaacggattttgcctcaggatcgtaaaggcttgacgaatagtttgcatcataataattacgagttactaattacaattcttattctacctggcgtccgtcgaagaagcgcacggtacggcttgtctgctttgcctgttcctcattatgggttaccattacaatggtacgtccgtcttccttattcaactgatgcagcagttccattacctcagcacccatcttagagtccaggttaccggtcggctcatcggcaagaatgatttcaggattaccgataatggcacgggcaatagctacacgctgacattgaccaccggagagttgtgtaggcatgtgacgcatacggtggctcaaaccgacctttgccaacacctcttctgccaagtggcggcgttcctttgcagacacctttctgtataataaaggaagttctacattatcgagcacattcaatgagttaatcaagtggaaagactgaaacacaaagcccaacttcttattacggaaagcagccagttgcttatccttcataccatctgtacgagtaccaccaatctcaatgatcccactcgtgggagcatccaaaagccctataatgttgagcaatgtagattttccacaaccggaaggtcccatgatactgagaaattctcccttttcaacttcgaggttcacattttccaatgccacggtttcaatctcattcgtacgataaatcttgtttatctcagtcaatttaatcataatggtaagtatttaattgttattgatttattcagttctcaatttatagattcttcacagctttcagtcaaatggtatgccaaagcaaacatacattcattatcaatcatttacatttataagcagctgttcggaaatgaacactctgtccgttttcagctgtccgcatcgttattttattcatctcttaaagcttcagcaggcaatatctttgccgcgcgggtgacgggtgcatacgtacccagcaatgcaataataagcaatacgatatacgccagtatactgactatcagaaaatgcgtcagcggctggttttgccagtacacaggattaccattctcagacggattggcaaaacctgatacatagatacggtgcatagtcaaaggcagagaaactgcaaatgcgattgttaccagtagccatgcctccatcagaaactgattgcggataactttctttgtagctcccatactgcgcatcaatccgatatcttgcctccgtgcattacagcgtatccagaatgtgcctaccataccaaggaacacgcagagcaaagcaaatcctgccaatgaatattgcaggcgtaaagtattcgtcactccactctcattttcatatttgtggcggatatctgcaaaacgtcccagcttggtaaaatagaaattacctacattcagctggggaaccacttccgccttgaagcgtttctcaaaagtcgggacatccacattgggtttcaatttgaaagtcaacatatacatccactgaatccaactgtgattccctaccttactatttacctgtatcaacagattacccggttgttcattaatccggtgtttataatcctgcaatactcccataacctcatggaaagtactgtcattatacctcacccttttacctaccgcatctgtggtgccaaaaagctcttctgccatacgttctgtaataaataccccttcacgagcagcgcaatcttcgggcaaagacattatctgtccgctcttggcatccttcataccatacgtacggaatacatctcccccctctgtctgtacaaactggtaatattgcgaatgtaccttcaatgtgtcattgaagtattccgcgccattccacgaagagctgtttgggaagctggcactggtcaccaaagcaaagctttccacttccggacagttcttcaccaagcgggtaatacgatacagattctcctgcttaatcgcagtgctgtcctgggttttgtcatacttaccatgcaattcatcatagtattccatataaagggcatatgcccgttcctcattataaccgggatcaatggcaagattggatgtcaatacataaataggatctattaccgtccagagaaaaaagctcacgaccaccagttccacaaatatccaaccattctgccggcgctgattccataattggtgtcttattatcttcatcatagcatcttaacgtttagagttcaacgactgaataatgtttcggcgcaatgcccatattgcaggaataagtgcagatatgaggttcagtagcacgcaaagtccgaatgacgcacagaataccgtcggattgaaaagcatctcgaatgagaggaaaggagttttttccacatctgtataactgtcaaagagagtaagtatccagtcacttgccgtcagcacaattagataagagatcagtaatcccagtaacccaccaatgcaggttagcaagagattttcccataatacctgccctataagcctcatattagtagcaccataagttttgcgtactcccaactcggaaaggcgctcgtccatacgtgaagacatcataccactcaggttcattgcaggaatgaaaagtaaagcaagcaacatataaaaatacattctcaactcagaagccaaatcaggagctgaacaagagtcgaaccggaatgtactggcccaataatcatcgggctgccccattaaatcattcatgtacttatcggaggcaagattcaattttctgaaaacttcacgcacttcctcctttaaggcttctttatcctcagcatcaggagcggtcatatatataccgacactacctaccaatttcccggtagtatccgaagtaacccaggaattaagcgttatcggtaaccacatatctcccacagaagaaggcgtagcggcagaaacatcttccaccactccgcaaacccgatattcctgtgcatccatattaaagcgccttcccactacgtcatctgtagcaaacagtttcctcgccacgctcaccggaagaaccacttccctgcgtttcgcatcgatatccgcttgcgtgaaaggttttccatgcagaaatcgaaaagtgaaaaccttccagaagccggcatcagtataaagcggggttacgctaatcggctcattattatctggaacctctacgtaattttcacgatagttacttgctgttgcaccaatggcttccagatgtggcaaatcttgcagcatcttcactacatcataactaacggcagagcagttccaactcttatcattatctttaggataagacttcattttcgtcactgtcagcatccggttgcgattatattcgggatatatgggcgcaaacttcacataaaaaataatgaacaatgtcatgacaagggctattgaaagtcctgtacccaccacgtagattccggtaaagagccgatgctgctttatcatggtccacgcttgtttaagataaagtttaatcatagtatcatcgcttttaatgattatcgcataggaggatacactataggggatataaacctgtgcataaaatttatgtatcaggttacttacagctaattcagtttcagcttattcttatttttatagttgctcatatcgctcaccaccacctggtcgcccggttgtaagccgctggctacttccacaaactcaaagttactgtctcccaactgtaccttacgtttcacaatctctttatcagagttacgaacgaaaagctcatactcaccacgtcccacataataagaagcattagcaatacgcattacatcttctttcactgcattcatcacatagacatccgttttcaagcccgaacgcaaacgacggttattatcttcattcaactgtaccgtaaaagagatcactccattcttcgacaacggtgtcacactgctaaccgtaccctccagtttctcactgcctatttttacaatcgctttgcctcccgctgccacacggtcaccgtatgtatcagctatttcaccttctactttgaagtggctgaggtcggaaatcactgcaagctggctaccctgtgaaacctgcgcaccaatctgattatttatataggtaagaatagctttacgcggtgagcgaatctgtgcatcatccagcgtacgtttcatctcggcaagtcccttgcggaatatgctgaaatccaattcctgaactttatattcggcagcaagcacttccttttcattatcatactgctgctccagctgctcatattccaactgggccacattatagctgagttcagcctgacgcactttatccgtagttcccgaacccaagctgtcgagatactgctcattacgcaattccacttttttacggttcaactgcatggccgatactttaatcttcatagccagatcattcagtttggtctgattattcacccgaagctgattcaacttatagctgcgcatctgttcttcatccagcaatttcttgtagtccgtctccacgctctgcaagtcaagtttcaagattggtgtacctatatccacactatctccacctttcttatatatctcgacaattcgggtattgataggtgaattgatgatttcctcaaaagccggcaccacttttcctgatgcactaacactgacttcaatcgtacccttatcaaccgtagaaaacaccagatcttttgtcttcactcccgtacgcataaatgagatgagtacgctgataacgattacacttgccacgccgatgccaccgtagcggataattttcttgttgcgctctttgttacgcacttctttcggaatttctctgtccatgttgaatattgagttatttattattttatcagttttcaacctgttccgctttcaaaaacgaacaggcatattattcacattatttatatatactaaatgcgtgccaaaaatgtaagtaactgaaaacaagacgatagagaaaaaagaagagtgtccgatatcgaacactctgtacattttcggataagtatatcatacttcaggaagtttatcccacaccattcacaataaaagcatcagcagttatttagcaacagacaggcagtcgtttacttttgccctgcttgtttttcatctccgcagtaagtcttatcgggtgttgaccttggttaacaggcctatcaaccttggctaacgaatccgtcaaccttggttaacaagcctgttgaccaaggtcaacacccaattgttcctaaggataaacatactattcattagtcctgcacgaaatgatccctggtgtaaaacaaatgaatagcttagaatcaaactaaaaagaggacaatatacgcatcaataatattgtcatagtttcccagataaacacatcatagcggtcaacgatattctgaaatcctcaaacattggttaataaggcgcaacttatttcatcctctttgtgataagaaaatccttttatatttttaccctcattatggaaaatatcagtataaaaaaagtagaaacgaagcgtgaaatggacgattttgtgaagttcacaaactggttgtatgcagactgtccatactacgttcctgacttggaaatggatattcgtaatacatttaatccgcgtaagaatgcaggattggaatactccgtcctacaaccttttattgcatataacgaagctggaaaaccggttggccgcatagcgggtatcatcaactatcgagccaaccaaaaatggcaaacgaagaacgtccgattcggattcatagactttattgatgacctggaagtatcagccgcactgctgaaaaccgtggagcaatggggcaaggaacatggtatggattatatacaaggcccgatgggaattttcgatttcgacaaggaagggatgcttattgaagatttcgataagctgggatcaatgattacaatatataactacccctactatcccaaacacatggacacgttagggtatgaaaaggaagtggattgggtgcaggtttgcattgaagtacccaaagaaataccgtctaaatatgcccgtgtgac

SEQ ID NO: 6368 - DNA, 812 bp, Unknown
  gut microbiota DNA sequence
cgatggaaaataattggaattttgattgcactttaaagattaatcctgaattgttgactgcttataatgagactaatcatgcagatttcgaattactaccggataattgttatactttagcagaaaaggtttcgttcgtttccggaaaaagtacaagtatcgctacggttaaaattaatattccggatgatttgaaatttggtaaatacatgttaccgatagaattgtccgaatgtagtatgcctacatttgacattaaagaaggggtaaatacttatctggctggtatcgtatatcagaagcatattgatataacagaattaaaagagatcaaactgacagaaagcatgatctccagtaatgcgagaaccgaagattttgaatcattggatccacgtacgcaacttgtcaatatcattgatggagatatcaatacctccttccattcgtattgggcatttcatggttatcctagtgatttctcggaattcccatatatacaggttgaattgcctcatgtgtatagtggttttaaatttagctatatcactagaaccgccgcaaatggttctaacaatggtaatgcaaatccgcaagagctcaatatttatacaagtgagaatggaatagactttactttattgaaaactttaagtgatgatctgccattgtcagaaatgggagccacttatgaatcggaacttatggtgccaatgtctggttcgttcagatatctgcgtattgaatcgactcattctaaagagtcaatactgaatgctatagctattgccgagttaaatttatgggttgcg

SEQ ID NO: 6369 - DNA, 1667 bp, Unknown
  gut microbiota DNA sequence
cccatcatttccggacgtccatgcttcacctttccacctgtcggcaccatacacaacctcaatattcgccaattccctgccggggcattccatctcaagaccccatccattccgagacaatgggttatatccaataccttaccagaaggtataagctctgaagaagtataagccggtgagtccatcgttttttcaatatactccgaaatatatccggctttgtactcatactcattaatcatcgggtctgaacttaaaacaatccctccaagatgcaaagctttcccttcgtcaaaaccattccagccagaaagcttaatccgataaaaccgggccttcactggaagaaatgagatcgtcttctttttataactttcgtgcgcacgatacaagggtttcaaatcacatactttgtgatagacctccccgtcttcactccactgcaactctccacaaggaggcaatacttcatatcccgtaccgacgaaagtctcctgaggttccgccggcacgtttgtagcacttgtcgttgctttcccggacggacctatgatataggtgatgctcctcagaaccttagccctggaataatcaatacgaatataaatcgattcattctttatagccggaatagcacagagttcttgtccctcgaaaagatgttcaggattgacttgagaagtatttgaagaaatcttcacctgaacgttcgatacatcttccgtaggtatcgccatcacctttatatcccgataaaaatcatatttattctcgggtactttcagccttaattccagttgctttccgcccgatactaccgtttcgatactttccagacgtttcatcgcatcttccggctttatccatgggccacccgcaacaaagccattagatacatgaaactcaaagtcaagccccaagcgttcagtttctcttgctacatagtaaacgttatcccaccattctttgctcattgccaactcagtacccggcaactgatctccatgaacctgatcatagaaaacaataccaccaataccgatccgcttaaacgcttccagatctttggtcatcccctcctttgtagaagggaatttaccatgaaaccaccacatcttggtccgggccgaatcctgaggattcaaaaagccggtcagagctttattgaacgttcctccgggaaccgggtaagagtcggcatagcatacgatactcactaataaaaaaagcgaaaacaatctgattttcctcatacaatcatcctccaatagaattccgttaatatccggggttattagtccacgatgcctggatgttcatcaccgtcagtggaatcggcaagagtagatctttctcagacggattgtttgcgcccattttagtaacatgttcatagtgatccgagaaattctttaaggtcgaaacaaaagtatcctttcccattctcaccaggtcaaagtaccgtttaccttcccctataaactcgtatctcctttcatccatgacatcatccattgtcggaacatggtccaaaggagataaatcggcacgttgacgaatggcatcaatccattctttagcctgacttgccttattattattaatcaaagcctctgcataaagcagatacgcatcagccggtctcaggatcgggaaattcaacggat

SEQ ID NO: 6370 - DNA, 23885 bp, Unknown
  gut microbiota DNA sequence
tatccgcttccatttcaagggttatttcagaaaagggtgttctctcggggctttgaagttcttgcatacacttgaatttcaatcacttgcgaacactttatgtaagatatggcaagtattgtgttcttcttgcctattgatttttcgtagctgttcattaccttgattacattgcaggtaaaaagctataaacgaatgaattaagctaataaatcgtcttttaatcgttcgttttttatgcgtaaagttttttaaatctgataaagtcagagaaaaaatgaaaggaatagatattaactaatatttttacaagttttttatcgcttataatcagatatttaagtagaaaaaacactatattacgaaatcttttttatcaaacattttgtcattcaaaaaaacacctttatctttgtgcacattaaacgaacattttttggacaccctataaaatcggacttaagaaattaatatccaacatattatcacccaaaaacaaattttcatccatcatttttcaccctactcccctcccattccaattaaattatctactttcgcattttttaaccacgttaatattacctaacggttaattaatcatttaagtcatgacagaatttaaaaaaacaagaagctgaacggaaatcagctgagaagtaaatcgtacaaatctgataatcagaaggaagacgatagtatagaacaagacaaagcgaatgtaataaatgaaaatttattagcttcgagaaagtattacggagcaaatacccatctgttggtaggcgccctgagatgcttcaaattaggcggttttgagggtacggaagtccatacaatcagtgattttatagagtggtgggacagtacgggcaaaatcagaaagcatgtgaaaggaaagcatatacctctaaaaacaagcagcttaagaaccgagatagagagtatatgggcggtgatacagaaggaagatacagaacatatagatccctatggatatgatgtaaagattaatcagtaatagttaactccaaagaaagggcataattttgccccgtcaacaggatagtgaaagggctacacccttccaccgggatggtgtagccctaacctaaaaagggtgtagctatccaagacaaagggtgtagccatcacagacggttgattataaaccatttataaacaactaaaatcattaagatggagaaacaaacgttgggacaccaacaaaagtatgtaacgaaagacgaaagagtggagaatctatggaagaaactgattgggcaggaaacagacttatccgaagaaaccatcgcatggatggcacgacgaattttacaattaaccgcctacatgccatacggatgtgcactgatagcctatcgaaaacaaaatggagatttttacatgggaagaggaacactgatacattacgaagccgatttccaccgcaaatacgacatcgagcgtattcagaaccatgtagtgtactgggatatagagcaacagggatggagaacgttccagatcgagaacttcctggaatggaaaccagtggtaagttgaaaattgagagttgaaaattaaaaaacaaaagattatggattcatatctattacatgatgctaatgcaggtaataactttaaaatgatgataatgatgcaaaaagagggaatgaaaggatacggtatctactggatgctgctggaatttctaagattacaggacggatataaggcagacttaagagtattgcccatactggcacagaaaatgagagttacggtaaccaccctgaagcggatcatatatgactatgcactcttcgaggtaaacggcacaagcttttcatcgcccggactcacactgcgcatgaaaccatgggacgcccaacaggacgcaaaaagagagtcaggccgtcgtggagggctggctaaccaacagaaaatcagagatgccaaggcaagcaacgctttagctacaaacaaagagaataaagagaatgaaacaatcccctctatatctccccagggagacacgaggaagaatgaggagattcttcttgttccaccggagtatgcactcaacaaacagacacacaactatgaaggattgatagaagaattggaacggcaaaaagtgacatccttaaaagagaaaaatgccattctcagactgaccgactttggaagactgggaggcaaaatatggaaaatcatctatgacatcaacaattcgccacagatgaaagcaaggattgtgatgcccggaaaatatattctgaagctgttgcaaaattaagtagatgatcataattagtttatactttgcaagtataagctaattatgacatacctcccctgatcatcctacataaatatcagctgctttttaagcaagtccacaatatcgctttgcagcttctgagcattgataggtttagaagtgtacgcatcaaaaccactgttcagaatgcgttcttcatcttcggcatagacataagctgtcactgccataatcgggaccgtcggcgacatttcacgtataagttgtgtagcttcgtaaccggtctttttaggcatattgatatccatcaatatcagatgggggttgtattgcttgaatagctccacagcctcttccccatcccaggcatggagaatgttgtactgacgcttcaggatagattcgaacaacaggaaattactctcattatcctcagctattagaactgtgagtttgctctccactttattcaaccggtgttccttctgttccctcactgatttgagctcaacgggacgataaggaagagtaaaccagaaagtagagcccttgccgggttccgattccacaccaatctcaccacccagattctctacaatactttggcaaatagagagtcccagtcctgtgccttgcgagaacgaatcaagctttacaaaacgaccgaacacagtatctttcttgtctttttcaattccatatcccgtatccgtgatatagaaatagagaaaatcagtatttttcagatgataaccaaaagtgatgcttccactgggggtaaacttcatagcgttattcatcatattggttaccacttgtgtcagcctgttcttctcaatgtttacaaaacaatccggcatttccggcagatatcggatgacaaccgcatcatttttctggcggagccgggcggattcttccaactcctgaaacaaggcattcagatctatatcagaatagacaaactcaagtgttccggactcaatcttggaaagatccagaatatctcctacgagttgcaacaacagggtattattgttctcgataatattgatgtattcttctttttcttccggctcttccgcatccgccagaatactggaaaaaccgacaatggcattgagcggggtacgtatttcatggctcatattagccaggaaagctgatttaagacgattggattcttctgctttttcttttgccgtaatcaaatcttcttccattttctttcgcccggtgatcacgagagaagaacctatcaaagtaatcggattgcccttttcatcccgcttatcaaccgtggcctgagcctcaacccattcataacgcgccactccattcttgcggactatcacacgatattcttccttaattttagaaacattaccttccgtcagttccttataggctttctttacccgttccctatcttccttacagattttggcaaaatattggtaatcgggtacggaaagctgatcttcgttcatcatgctgtcgtcatggctaagctccaccggacggttcacatcacagagcatggtacccttttccagatcccatttccagggaacgatattcgccacatccagcgacattgacaatttatgattagcggaacgcaacatctgttgtgtctcggccagttcggtattgtctacgcagaaaacatcaatgaatcccttatgcttggaaggcgtcagaatcacattgaaataattacctatattttcgtaatagtattgataagaaagttccttttgagtggaagtaaccatgctatagaggtggcacatcctttcaaaacctttcggatccgcctcacttccttttttgccaatgacctcacccatggatttgaagtatttctcaaaacgtggattggcttctacagtgatatagtccacaatctttcccgcagagtcgtaaatcagttgctgtttcaaataaacgatgggcatattctcaaacaaactgtgataactggtcatcagtctgatctgttcttcctgcttttttcttgctctggacagccaccccatccgcagccacataaacaagagcatgatgactacaatggcaattatgacactatatttatgttgttcccagaaagagggcggcatcatataaaagactgaattgggaggacacaagccaggcgataatccggcttccataagatcgtaatagttgaacatgggagtaggcacaccacagtctacgatgcgggctcctttctcgttgacaccggataaaacaccgttggtaatctcaaccacttttcttccaacagttttttcatcaaagaaatagccgcctaccagaccgttccgctgcaatccggtattatctaatgagaagataggtgaagaggaataatagctcagaattctggaaatattattggttaatacgacattccctttttgagtatcctgatgccatgagcaaaagagaactccgctgtttgcctctgcatggctcaatgaatccgccaatgcatcggtagtcattacaccggcaacataatcctttatttcaagttcgggaaagttcttgctcacaatctcttttaaatccgaacggaattgggcacttatataccgggcatccgacagaaatatcaactcatccatttcaggcatcaaatcctgcatcagcgaaactgtttctttaagatatacaggtacatagaatacagtcagcgacaaatctcctttataatctttcaagggagttctctcttctaccggaatggcacgcctctccagataagcctcttgcggaccgacgtaatccgtctccgtacaaagaatcacagggacatctttccattgtttttctatatcatctctcagcaaaccccaggaagcactacctaaaagaatcaggagttttggaggattgtctgcatattttccaaagagactttcttcatattccaataattcttctgcattttgtaaatgcataaattgactgcccatgtgctccacatccactacataaggagaatttttatgctgataggaattataaatagggatgataaagtcgttgctccatcgggaagagccactgtatgcgttgagaatcaatattctatcttcattgcccggtttaaatgctgaggatacttcgccaaatacattaacagcatttaaaagaaaagcaactaatataataaacactctgattattatttgcaaatatttcatcgaaattatagtttagtctccaagtgtacccattctttaccacacaaggaacaaaaggtctacatcatagagaaattagactgcaaaactaattaaaaatcagagaattcccagtttttggaaaagagatttttaaagaggattgcgtatcttccatattctgcgtacttttgaaagcataaaacaataatatcaatgaaaatacttcataccagcgactggcacctgggacatacattatataattatgaccgtagccacgagcaacaagcatttttgcaacaactaacccgcatcgtagcagaagaaatgccggatgcaatggtagtgagcggagacatctatcactactccaccccatcggcagccacacaaaagatgtacacggatggtatgctcgaaattcacagggcatgtcccggaatgacaattgtggtaactgccggaaaccacgacagcagttctaaactggaaatagacagcagtctatggaaccattttggtgtgaaagtcgtgggaaacatcgaacgcacccgggaagaagtgaatctggaaaaacatattgtggaagtaatagatgaagcagcagcactgaaaggatatatcattgccgtcccccacgtctatccacagaatttcccgatgctggacactgaaacgccacgcgaagaacggcaagcacgtttcttccaggcattgctggacgaagtaggaaaaatgaacacgggagaattgcccgttgtattaatggcacatctctccatagaaggcagcgaccggacggggcatgacgaaaccgtgggtggaatagaatacatccccatcagttccatgggcgaaggatacgattatctggcactcggacacattcattgtccgcagaacatcaaaggaaacggacggcatgcacgctattgcggtacccccctacccgtcagtttcgacgaagcttatccacactccgtatctatcgtcgaattaaaaggacgggaagcgccacagataaggacaatagaaatagaaaatccaataccactcgtcaccctccccaaggaaccggtagtctttgaagaagccataaagttactggaagaatatccggacgataagccggcttatatccgcctgaatgttctgataaaagactatctggcacccgactgcaatgaacgggcatcgaatgccgtaagaggaaaaagctgtaaatactgctatatcaaatccaaccgcgaaaaacaaacttcagactacatagcccggcacatctccatccaggaaatgcaggaaatgtctccgctggaaatagccagactttattatcaggaggcagaaggagaagagatggacgaggaactctgtgaactgatgagcagtgtcgtacagaaagtgagagaaaagaataatctgcgctaatccgtgtaatctgtggtgaactatgaaacttcaaaaactgactataaagaatctggcctcgatagaagatgccgtcattgattttgagaacggccctttaagtgaagaatccctgttcctgatctgtggtgaaacaggcgccggcaaaacaacattactcgatgccatttgcctggcactctataatgaaacgccccgcatggaacgcacagcaaatgaaaagtaccgggatgtagggcaaacgttttcttctaaaaaggaagatgtggctataaacgacagccgccaactgatgcgacgaaataccagtgaagcttggacagaactggaatttatcggatcaaacgaaataccttacatcgccaaatggtacgtagcccgcgcacatcggaaagcatccggtgccattcaagacactaaatggacgctggaaaactgcaaaaccaacctccaactcaccaagagaaacgaaatcaaagcggaaatacaagaagccgtagggttgaacttcgagcaattctgccgcaccaccctattggctcaaggagatttcactaagtttcttcagagcaaagaaagtgagaaatcggacatcctggagaaactgacaggtaccggaatttattctgaaataggtgcaggaatttatgccataacgaaagaaaagcgcgtagactatgagaatcagaaccggaaactggaaggaatccatgtgctgactgaagaagaaatgaccggaattaacgaaacaatggctgcattaagtagcgaaatcaacggaaataccgggcaaaagaacatagcagcactgaaacgtgactggctgaaaagaaatactgaactcacccttactcaagaaagtcaacagagaatctgggaagtgaaaaaagaacagttacaatcggatgacttccggcagaaagaactactgataaaggattggaatcacactgcggatgcccgcaattggctctcctctttcaaacagcagcagtggcaacaagaaatcaatgccgaacaaaccgaaagcttgaagcagaatttcatccgcctcagcagtggctgcgtttggctgaaggagaatatgaaagagcaacaggcaaaactaattcttgctgaagaatatctgcaaacccatgcaccgttcctgcccatgttcgagcagagccagtctatcgtcaccgatttgaatgccgtgctctcctcacattcccgcatctccatttacgaaaagcagatagtggaattggtacggcagcaacctgcccaagagcaagaacgcacaaataaggagaatgacttcaatctgaaaagcaaagagaatcagatcaggcaacaggaaataaaccaactgaacgcacagcttgattccatgaaccgaagtgccttgcaagaaaagaaaattacattggagactatcaaagagaatttgcagaaagctcaaaacgccctgatagtactggaagataaaaagacagctttggccacagcagaggaaaacgagaaatcactggaaaccaatctgcaagccggcaagaaccggaacgggaaacttaaaaacgaattcgacactcagaagaaggcgtacgatgacctcaaagagctttatgacaaacaaaaagaagctgtggaggaatgggccaaagaagcccgtgcccgtctgtccataggagatatgtgtccggtatgcggccagaagatagaggtgctcagcaaggacgaagattttcagtcgatgcttgcccctatccggcagtcgctggaagcaaaagagaaagaatacaaggaagcggaacaagcattaaacagcaaccgggcagaggtcaaaacttacgagaatatgataacgaacagccgcctggcaacagaaaagacccgaaaaggtcatgatcttgcccgaacggaagcagaagagcaatgcagtcggtgttctattccaagcatctccgacaataccaaagaaatactggaaaagttatttcaggagaataaactgaatctggagaatgtcaatgccaaactaaatgaagtacaaaccctctccaaccatatttccaggctgcaacatctgaaggataatcaccagaaagctgtggaagccgcccggaatgcattggacaccgctgacaagaatctgacgaagctgaaaaacgatatcaccaataaacattcactggcggaaagtgaaaaagagattgttcgtactacgctggaacgcgtcagtccactgattctttgggaagggtggcaaacggagtggcagacctcccctaccgcttttatcgaacgcctacagaaatccgcagagcattataaacttgcacagaacagacaggcggaattaaaagctgccatcgccctcatcgataaagaactgagcagcatatccgccacacaagaactgatctgtacggctttccctgaatggaggcatcttccggcaaaggaaaaaatggaaatcaagaatctgggaatggcgtggaatacgctgaattctgacgtcagcggactgaaacagaacatcctgtctgtccggaagaatctcgatgagctacaagccagcctgacagcattctataccacacacccggatatggacgaagcacgcctcatcgctctttcctactactccaacgaacaaatagaatctctgcgtagcggacagcagaggcttagagaagaagaagtggcagcacagacagccttcagacttacaaccggccaactggaagaacaccaaagtaagaagccggaaatggaagaagaagaaaaccttgaaagtctggatagtcttatcactgctttggatgaaaagatcacagcaggcaatcagaccctcttacgactgaaaatccaattggaagagaatgcgaaaaacattgcccggatcaaagatgagaagaaacgtgcagacgaattgcgggaggtttatctgaaatgggaccgcctttgccatcactttggtgacgagaaaggaacgaatttccgaaatattgcccagagcttcgtactgaaagaattgctcaatggagcaaacgtctacctgcaacgcctgaccgaacgttacgagttggaatgtcaggcaggttcactcaccattctgttgcgcgatttatatcagggaggtgcggcacgtccggcctgtacactgtccggcggagagagtttcctggtttctctgtcattggcactcggtttgtcttcactcagccgccatagcctgtctgtagatacattgttcattgatgaaggattcggaaccctgagcagtgattatctgaacacagtaatggacacactggagaaactgcaccagatgggcggcaaaaaagtgggtatcatcagccatgtagaaggactgcgcgagcggatcaagacccagatacaggtgaagcgaattgataattcgagaagtgaaatcacaacagtgaggacactatgaattttattgtgtacttttgtagcaactattaatagaaaaagacaatgaagaagttcataaaaggagtccggtttgctcctaaaaactattccgacgaagtagaagtgaagattcaacactataaaaaggaaggttataaactaccgtcgcgccacttattgcgcaccgaagaacaactggcgggtatccgcgaaagtgccaaaatcaacaccgcactgctggattacatttctgcaaacatccgcgaaggaatgtccactgcggaaattgaccacatggtttatgaatttacaacggatcatgatgcaatacctgcccctttcatgtacgaaggttttcccaaaagtgtatgtacaagtatcaatgacgtggtatgtcatggcatcccaagcacgaaagagttcctgcgcagcggagatattgtgaatgtagacgtttccactatttataaaggatatttctcggatgcgtcacgaatgtacatgattggagaagtgaagcctgaaatgcaacgcctggtacaggtggcaaaggaatgccgtgacattggcgtacagacagcacaaccgtgggcacggcttggagacgtcggtgcagccattcaggaacatgcggagaaaaacggatacagtgtagtacgcgacctgtgcgggcacggcgtaggaatcaagttccatgaagaaccggacgttgagcacttcggcaagcgcggtacaggtatgcttatcgttccgggaatgacattcaccatcgaaccgatgatcaatatgggaacttacgaagtcttcattgatgaagccgacggatggaccgtctgcacagacgacggacagccttcggcacaatgggaaagtatgcttctgattaccgaaaacggcaacgagatattgactgaataagcatggatattgtttttctaattatcggtcttatagtaggtgtcggcgtagggtatctgatagccggacgaaaaagtgccgcgttgtccgcacaactgcaagccacccgcgaacgggaagaactgctgaatcgtacggtagaagaacggattgcacgtgagagaaccatcacagccgagcgcctggcggagcaggaaaaatctttcaatctgagactggcggagcagcagaagcaatgggaagagcgtctgaaattgcaaactgaagaagcggaagccttgcacaaacgcatgagcacggagtttgagaatctctccaaccgcattttcaaaagcaagacagaagacttcaccaaactgaattcggagcatctcagcaatttactccgcccattgggggaaaacctgaaagatttccgggaaaaggtagaacaagtatatgacaaagagtcgaaacaacgtttctcgctggaagaacgcatcaaagatttggtagaactgaacaaccggatcagcgaagatgccaacaacctgacccgtgcgctaaaaggtgattccaagatacagggcaactggggagaaatgatactggaacgtctgttgcaagcttccggcctgatagaaggcgaacattacttccgccaggaattcctgaaaaacgaacagggtgaaatgctgaccaacgaagaaagcggtcagagaatgcagccggatattattgtcaggtacccggatgagcgggaaatgattatcgactccaaggtatccctgactgcctatgccgcctacaattccgccgaaaacaaagaggaagaggctcgctggttgaaagcacatctgcaatcggtacgggcgcatgtggatgaactcagccagaaggattattcgcattatgatgcaaaagcaccggactttgtgatgatgtttatccctaccgaagctgcctacctgacggcgatcaaagcggataccaatctatgggaatacgcctataataaaaaggtggtattgatgagtcctaccaatctgatcagtgcgctccgcctttccctcgatctctggaaacgggaaaatcaagtgaagaatgtgcaggatattatcaaacgaggtacattactttacgaaaagattgccggatttacagatacattcttgcgcatcggtgacaatctgagcggattgcaaagagattatgacaaggcttacaaccagctttcggatggcaacggcagtgtggtaagacaggccgaactgttgcgtaatatgagtctgactcctaaaaaacgaatatcagcaagactgctgcccaaagaagaggaaacggaggaggaagaaaacggacaggacaaataaacaatccaaattaagatatataaaacatgaaaatcctaaaagaccgtatcctgaaagatggaagatgctaccccggaggtatactgaaagtagataacttcatcaaccaccagatggaccctatcctgatgaaatccatcggtgtggagttcgtcagacgttttgcctccaccccaatcaacaaaattattacggtagaagccagtggtatcgctcccgccattatggtaggttatttattggaattacccgtagtcttcgcaaaaaagaaaaagccgagcactatggagaacatgctgattacttctgtctattctttcaccaagcaacgctcttatgatgtatgtgtcagtaaagactttctccgtccgggcgaccgggtacttttcatcgatgatttcctggccaacggaaatgctgccaaaggtatcatggaacttgtgaaacaggccggagccgaactggtgggcatgggcttcatcatagaaaaagcctttcagcatggaggtgacgaacttcatgagcaaggtattcatgtggagtctctggcgattattgaaagccttgacaattgcgaaattaaaatcaggtaaaagtatttatcgcacatctataaacttacagccggcttgttgattcataaacaagccggctgtttcgttataatccgagtatctatttttattcagcaaagcattatttatgggataaagttgtccgaataacttctttcacatcttccacgattcccatagtaacatctttatcaaacttcaatcccactgataatccatcgctgttggcaaccgtttggtaatcctttaacttcaattccaattcctgaagagaaggattctttatcactgagcttgtacctcctttcggatacaaagatacttctatgggtaaaaatatatccgaagccgtcttatatttagaactgtaaatcttaggttctccaaaagaaacgaatataggaagcaaactatctaaacgagcttcagaaactccgcctaattctccggaaatttctccacgaacttgtagataagcctcttttatggtgcgcaggtaagaagtgatagcggtggatgacgaaccacggtcatatctcacaaataaaccaggaacctgccttttatccgtatttgcaactttcctatattctttcctcaagagatccttaagacgggctgataaggtttccacatcatattccttaatcaattcctgattcagcatcatcttatttctcatatttacaaagaaactataaaaacgatccgttgatttctcagtctgagactccatctttccgcccatagcatcgttcgctttacgagtgaagaaagcctccaactgttgcaactcgctctcctgaactgaattttgtttcacactcgcagacgcgtttatcgcctgccccactgtcttcttaacttccggacgcgcaaatgcataaagcgttccggcagctacaggcacaaaaagcaatagcttcaaacgcgcccaattgtttgttcttctttttaacatcattgtgatacgatttttaagtttgctgtgattgaacccgcaagccatagagtagagccttgcacccacggacttcttcactagcaagagttgatattctgttgcatcgatgccattattaataacgccattatcggcttcatattcatgcacttcacgaagttcacgcatcaggagccatgcggcaggattgaaccaatggaatataacgatacattccatccaaagtaaatccaatgtatgtctatgttgcaggtgcatttgctcatgcaacaggatttctccggggttccgttcgtaatcctcctttgacaggacaacggtatgcccccaactgaaagagactatcttctccggacagatgaccagcttgtatttcccgtaattacaggcaggatagctccggataagccgacgcatacggatggtagaaagcaagaggaaagcaagcactatcaaagccccgataaaataacaaccgcccaacagccagatcacaggaatagtatgaatcacattcgtacgatctccctctataccctcccctttctctgccatcaaaagacttgcttcttcagacaaatgcttttcacccgttcctccttctctttgaacatctatttccttctcagtcaataaatgtcttacagtagttattggcaactgcaaggttgtatattgaggaacatctatttgcagcaatggaagtaacgtacatgccatcgttcctgccagcaacaaaaaacggttcgtacggaacagcgtatctttcctgaaaaacaatctgaacagaaagtacaggattgtcaggcataaggtagactcaaatatataaaacaatatagttcccatgatctatttatttgccgggtataactctatttctatctgttcgactttttactttctatctctgctatcaacgcttttaactcgtctaccgacataccctcttcttcaataaatgtagatacaacattggtataagagttattatagtattgggctactacgtcattcagtgcagaacgcttatattctttatcggaaacagccgcatagtactgatacgtgttaccataggccttgtatttcacaaagcctttttcctctaatcctctaactaaggtagatacggtattataatgaggtttcggctcttcataaaaagccagcaattcacgaacaaacatcggaccatgttcccagaacatttgcatgatttcctcttctttagcagttaatcgtttcataatattttcaggtttatttgggtgaacaacgcaaagataggaattagttttaaacaaacaactaatactattagttattcaactaacaaaacaagtagtttaactaatattattagtagatagtaaatacaccttattatatatagaaaaagagaagaagtataagggcaaggattgtttgcagcagaagagaaatcaaatacattcagtcctgaatgtaaattcattataagaaacaagatgtttcatcatttgaaaccaacagtttcaccgtttggaactgaaagtttcatgccttgaaactgagagttccatcgcttggaactaatggtttcaagcaatgaaacttcttttgcaatacgaagataggtttcgtactcttatttatactttctttttctttggcaatgcctggttcagtaccacatatcccagtattccggcaataatagtaccacacaacacaccgaatttagcttgattcagcagttccggataagcatcagagaaagaaagattggctatgaacaatgacaccgtaaatccaacgccacccagcaatgacacgcctgcaatatttttccagttcataccttcgggcatacgggcaagcccgcttttaatagtcagccaggtgaaaagataaattcccaaaaacttacccaaaagaagacctaagccaacagcaagacctacatttcctataacttctccgccaccgctaaaaacaactcctgcattggcaaaagcaaataaaggaagaatgacaaaattcacagctccatgcaagttatcctccaaagattgtaaaggacttatcacacgatccgaagcccgctccacttgctttaatgtagcaatctgttcgtttgtcaatacaatgttatcagattgtaccaccgggaaagaactgacaatagcccggatacgccggatatatttacccgcatccagccgtggacgggcggggatcacaaatgcaagtatcacaccggatattgtgctgtggatgccagattgcaggaataaataccagataataatgccaaagaaaagaaagaagatcttctgtgtcataccaaactttcccatataatataagaacgtataaagtatggcagctacaatcaaataaccgtaagcaacctcggagctataaaaaatggcaatcaccaaaataccaccaatatcatctaccacagcaaaagcagtcaggaaaatcttcagactcaacggtacgcgcttgcccagcagactaagcactcccaatgagaaggcaatgtccgtagccataggaatagccatgccttgtgtttcaggagtaccgggagttaccagaaaataataaaccagaaccggaaatatcattcctccacatgctgcaatgaacggcagaatagctttcctgaaagaggataactctcctaccagtaactcgcgttttatctctaatcccacagctaaaaagaaaatcgtcatcagacagtcattgataaactcaatcatggtcagattatgaccgccatgcgaaagcaagttaaaatcacctatacgcaaatgcaactcctgcgacaggaaactctgatacacaggagccaatgaagaattggcaacaatagctgccagaatagcagtcaggaataataaaatacttgccgccacattcagtgccgaaaagtttttcacagtacgtagaataatcatatgttcgatttaagtattagatttccaaagggatatcccgacaccgttaacgagctattcctgatagctcattaacgctaattttttaacccaaagtacaaatacacctgttaatattaaatttaacacaatagtaagcacagaaattactaatgccggaccacccaagttgtaacccaacgcaatgaaaataactcctgcccctacctcaccacgggtaaacataccaatggaaagtgccagacgttcgctcaatttacggtcgcggtagaagaataccggaaataacttacctacattggaaagtaacgatacaattaccacatgtacaataatcaatgcccaaggcatcatttcctgagaaccggttacagaagccagccccgtatcaccagggagactgattccctgaagcggaggcatactcataccaaccaggaacatgaagataaatgaaattccggttgaagctttacgttcccaagccgtatcaatatccttatgtttcatgaccatacccagaacgaatgccggaagcaacacctcaatatgaatgctggcatcttctccatataagttctttgtaataagataaagcgattgagtggcggcaaacaccaaaacggaataaaacagaatggctttccaatcctgccgcatattgtatttactcagtttcttccaaccgaaggaaagcaacagaaagacgataaggataattaccagcaactgccagcgaggtccgatcatcattatttgcaaaggaatcatcaagaggatggtatccaaatcatcaaagatggccagcacctgaatcttcttgtagatccagctggactttagtccgatagcagccaacatagtgaataatatacctgcggaagtaggagccgcaaaacgactcagtaacaagttttctttccatgcctcccaactattccagtattccggcggaagtaaaacaaaaatatagtaaatagcaatcagaaaccaaggcatggcggccgtagccatagcaacgaaataatcttttgcgtacgtttgccatcgggacttgtccacctcaaactcacgtcccacattgatcataatgaatcccagacaaatatatagtaacacattagatacagttttcaccataccataatcacttcctgaccatgcaggcagatattgcgctataaagagacctaccaccaggaaggccgaaaacgatagaacttttctcatttattattagttagaattttcaaaacaaaggggattgtcaagacagtcctacagaaagagaacaatcccccggactaatatgaatcagcttttatgcttttttatattaatctaatttcaacaccgcaaggaacgctttctgcggcacttcaacattaccaatctgcttcatacgtttctttcctcttttctgcttctccagcaattttctcttacgactgacgtcaccaccgtaacactttgccgtaacgtctttgcgtaccgccttaatcgtctcacgagaaatgattttagctccgatagccgcttggatagcaatatcaaactgttgtcttggaatcaggtctttcagcttctcgcacatacggtgtcccaaatcatacgcattgtcgaaatgtgtcagtgttgaaagagcgtccaccggttcgccgttcagcaaaatatccagttttattaacttggatggacggaaaccactggcgtgataatcaaaagaggcatatcctttcgagatacttttcagtttatcataaaagtcgataacaatttctcccaaaggcatatcataatagatttccacacgattacccgaaatatattcctgtttcaccagttcaccgcgtttgcccaaacacaaagtcatgatgggaccgatataatcggtagttgtgataacggaagcacgaatataaggctcttcaatgcggtctatcaaagtaggatcgggcatacttccggggttatgcacctctgtcatatgaccttgtttgtcgtaaatattataagaaacgttcggcacagtagttatcacgttcatgtcgaattcacgatcaaggcgttcctgcacaatctccatgtgcaacagtcccaggaatccgcaacggaatccaaagcccaacgccaacgaggattcaggctggaaggtcagtgatgcatcgttcaattgcagcttttccaaagaggaacgcaagtcttcaaagtcttccgcctcaatggggtataccccggcaaaaaccatcggcttcacttcctcgaaacctgcgatggcttctttacacgggcgggtaatgtgagtaatcgtatctcccacttttacctctttagaagttttgataccggaaataatgtatcccacatcacctgtacgcagttcctgacgcgccaccatctccatcttaagtacaccgacttcatcggcatcatattctttaccggtattgaagaatttcaccttatctcccttacggatcaccccgttcacaatcttgaagtaagcgatgataccacggaaagaattgaatacggagtcgaagatcaaagcctgcaacggtgcttcctcgtccccttcaggatggggaatacgctcaataaccgcagtcagaatctcttctacgcccataccagtcttaccggaagcacggatgatttcactacgtttgcaaccaagcaactctacgatttcatcctccacctcttcgggcatggcactcgccatatcacatttattgatgaccggaataatttccagatcatgctcaattgccatataaagattggaaatcgtttgcgcctgtacaccttgcgaagcatctacaatcagtaatgcaccttcacaagcagcaatagaacgggaaacctcatacgaaaagtctacgtgtcccggagtatcaatcagattcagaacatacttttcgcctttgtacgtatactccatctgaatagcatggctcttaatggtgatacctctctctttttccagatccatatcatccaacatctgtcctccggtcacctgtatggtgttggtaaattcaagcagacggtcagctaaagtagacttaccatgatcaatgtgggcaataatgcaaaagttacgtatattcttcattttctacaattatctatctataaataagtatattacaaaatgaggctgaataactcgtagtacagtcgcaaaacaaaatggtaatatctcgcaacgggctcgcctccttttgcgggcgcaaagataatgaaaaatatgaggttttgaaagtgatttattcaatatccgaggccgtaaatgtctatatatcctaaaactattctatcatcccactgttatgtatgcataataacctaaactgcataactgaaatgaaaaaatttattatttttgcgtgttccctcctattattggccggatgctccaagaatgagataatcatttatggctcatcgcccgaaaacaatgaatccgacaacagtcagccttcggagaaagaagacgcactcatcaccttttccgcttcactcgaaagtcgtaaagtaaccagatctatgtcgcccatgcctaaaggtctggtaagtcagatttatgcctttgaaactacagacaggaatttcgataacccttttgccgaaggtttgtattcaaccgcttccgcaggtatattgaccggattgaaaggctacaaaatgtatttgagtaacggatcatataatatgtatgcgttttctgaaaactcctccgtttatcctccagacctgatagatggaatatccgctccgttaaagaatggcattgactatctatggtgggaaaatctggatcaagacgtcacaacttcacaaatccacatgcccattgtattccagcatgtagccacccaggttgtagtagacttatcagccggcgacggtataaaactggacagtctgatttcagctagtatacttccacccaccccgggtgccactctcgatatacagactggaattattgaatccacctacacctatgatactgctccgctcactatggggaaaaatggttttctcacgcaggccatcgttctaccgacaaaagctaccaatcctatgtctttgacgctacagatattggcagacggagaaacgactccacgtacctataccgtaggcattcccattccgggcaaactggcaggaggattttcgtacgtcttcagtgccattatagacggaaattccgtatcgttccccaatgtcagtatcaaagactggaccgaagtagatgaatccggtaacccgctttatccgacacagaaataataaagatcactcttgcatcctccaaatacaacaacaaagtagaaaatatggaaactaaaatatctgagatcagaaaagagtatatcaaaggcaaattgacacaatgcaccatcaatgacaatccttttgagcaatttgaagagtggttgaatgatgctattgcccacaatgcggacgagcccaccgccatgatagtagcaactgtctcggccgagggacatccttctacacgcaccgtcttgctgaaaggagtggaaaacaacaaatttatattctttactaattatgaaagccgaaaaggaaaacaattggctgataacccatatatttccctctcttttgtatggcacaaattggaaagacaagtacacattgaaggtaaagccgaaaaatgcctcgaccaagtgtcggatacttacttttccagcagaccctataaaagcaagataggtgcaagaatttctccgcaaagccgggtgataagtagtcgtatggagattatgcgggctttcgtaaaagaggtcttcaaactggcgggacatgaaatcagacgtcccgacaactggggtggttttgccgtaactcctacccgcttcgaattctggcaggggcgggaaagccgcctgcacgaccgcattcagtatatacttcaggaagatggtagctggaaacaggaaagactggctccttaaacatcccttgtcaatggactggaacataaaaagaagcgttgataacatataaatgtatcaacgcttctttttataagataaatgtcaatctctctcttaaaccaacttaacaaacagttcgccttctacttcctgagtagagatcttgtcttctctcagcaaccagccaaggcccaagaacaaatctttgtctaccaacttagttgctttcttgatttgtttagcagttaaaccttcagtctcattcagagcactccaaatttttcctgcagtttcaccagctttttcttttaacattttccttttgtttttagttatacatgctttaatccaaattctctcattagcgaggttcagattttatttcagcggcaaagatagttatatttatgttatataacacattattctctgtttttttatgttatatgtcataaaaagagcatttattcagcaggtcagaccaaaaagaatgattcattcaagcgaagctgatggtttgtttacattaaatagacgatctgttttcaagatattccgcccaaatgcgggcagcttcttccaccatcctgacacacggacgtttagcataatattggtcggtgcgttcttcgggagtagacactccttccggcttcttcaaccccaataattcagcacaaattgtagagccgttccgtttcttaaactcggcagccaattcctgtactactgcataattggccccttttccttcacgatctttgggatcagtcgctccagtttccagtccggcaagcagaaacataccgcatgcagcgccacaagtctgacgcatacgaccgatacctccaccgaaggaagctgccatacgcgccgcctgttcttgcgtaaatccatacatgtcggcaaaagcaagcaccacagactgggagcaattataaccactcttaaaaaactctaccgctttctctattctttcttcaaacattaccctatccctttttatccttctatatccaacaacatgggacaatgatcagaatgtacagcatcattcagaatacgcgcctctttcagtaacgggcgaacaggttcggtcaccatacaataatcaatacgccatcctttattctttgcgcgggagttgaaacgataactccaccacgtatattcctgctgttcgggatgcaacaaacggaaagtatcgataaaaccggcattcagaaaacgcgtcatccattcccgttcttcgggcaagaaaccactattagtagcattacgaataggatcatgaatatctatcggttcatgacagatattataatctccgcaaagtataagtttcggacgtgattttcgcagctccgtcacgtactcctggaacttctccaaccacaccatcttaaatgcctggcgttcgtcaccactcgttcctgaaggatgataaacactcacgacagatatatcgccaaaatcggcacggataaaacggccttcattatcatattcttctattcccatgccatattccacatggtccggctcttttttagtcaagatggctaccccgctataccccttcttctgcgcagaatagagataatgcttataccccaatgtactcaatgcttcttccggatattgatccggctgcaatttagtttcttgaatgcacaccacatcagcttgttcctgttccagccattccggcaaacctttactaacagctgcacgcagcccgtttacattatatgtaataattttcatatgatcgtttatttttatcttatttattaaga

SEQ ID NO: 6371 - DNA, 7571 bp, Unknown
  gut microbiota DNA sequence
aggattgtcgcccacagcagagccaacagcacgacaagcattcggcttttgcaatttctgtgcaatttttccgtatgaggtaataccacccaagggaatattcagcagctctttccatacactcagctgaaattctgttcctttcagatgtaatggcaacacatcaatattctctttatctatagacaggacagcattaaccgtcttttgctgaagttcatctctgtgctctctgtaggcagcatgcggaaagatatgcttcaattcatccaatacagcatcccggctttcagtaacaaaagccagataacagattcccttagaggtagaagccatcagtatttccccaaaaggggtttcagtaaaggagtaggcaatgctcagattgcgacctccattcccagattcttctgcactcatggacagtactttcaaaaagcgactgttcaaacgttcctgtttcatgataattcagatattaataacataatatttaagacggttacgatacccgcaatagcgtaaagtacgaaactgctccatttactgttgacatactgccccattaccttacgcgaagatgtcaacccgacttgcaggaaaacggtaaaaggcaactgtatactcagcaccatttgcgaaatcaacagtcctttaaaaggatcgccgatgaagaatatcagcaacaaggcgatacccaatgaaaggatcacacccacctgcgagtgactatccttgatgtgataggattctccgaagataccggcaaagatagaacccgccgccatgccacttgtaatggtagatgaaatacccgccatcagcaaagccagagcaaagacaaccgcggcactgtttccaagcaaaggctccagcaaagacttcgcctgttgcagctcttcaacctgaataccactcttaaagaaagtggcagcagccagcaatatcatagcactattgatagcccatcccacaatcatagagaagagcgtatcaaacaactcatacttcaaaaccttacgaatagaactatcatcttgcttattatattcatggctctgaatcacctccgaatgcaggaataagttatgcggcatcaccactgctcccaacacgctcataataatcagcatgctccctttcgggaaagcaggtgtcacccatccttccacagccatcggccagtcaatcttcaccaggaacaactcataaataaaggataatccgataacggaaacaaaggcaatgatggaacgctctatcttcttatacgaattcgtaaaaagcatgatgacgacaaagacggttgtcaatacagctccccatataatagggatatcaaaaagcatttccaaggcaattgcacctcccaatatttcggcaagggaagtcgatatggatgccaacaccgcagtgcccaaaataggacgtgagacccactttggcgtatattttgtggctgcttcagataaacacaaacctgtaacaatgcccaagtgagccacattatgctgcaatacaatcaacatgatcgttgacaaagttaccacccaaagcagggaatacccaaattcggaacccgccgcaaaattggaagcccagtttcccggatcaataaaaccaactgtaacaagcaacccgggaccaatatatttaaaaacgtccagaccacctaaataacgcttgtggtctctgcgtttcaagtctttcagaatatttttcatcgttcgttctttaaatggcgtaaaattacgaaataataacaagcgagccacactttcagttcaaaaaagaagcccccggcattgtacaacaccgagggccaacctatatttttaaagtacagggatttagttagaatcccatttcatgtagcgcccggcacaactgatccggacaagaagtcgaacgccttccgcaacgtactccttccagacgggaaatcacatcatttaccgacattcctttcaccagacgggaaagaccttgcaaatttccgttacaacctccccaaaacgcaatatccgttattatattattttctatttccaattcaatgtgagaactacatgtaccttgagtcttataagtatacttcattactcttcactaccctccggcttcatgttggtataaacagtttgcacatcatcaaactcttcgagacgttctatcatcttgtccaaagtttcacgttgctcgggagtcacctctttcgtatcgttcggaatataagtaaattcaccaccgacatcctcaaaaccacattcttccagatgtttctggatagctgcatagctcttcggatcgccatagatagtgattgttccttcttcttcatcctcttcgaactcatcatctacatcgtagtcaatcaggtcaagaatgagttcttccatatctatgccgtctttcttcttgaaagtaaacatacacttatggtcgaacaggaaagctaatgatcccatagtacccaagtttccgccaaacttattgaatacggaacgtacatcggcaactgtacgggtagtattgtcagtcaacgtatctacgaatacagcaataccgtgaggaccgtatccttcataggtcattcctttgtaatcgctctggtccttacccattgcattcttgatagcacggtcaatgttatccttcggcatattctcacgcttacaagtagcgataaccgaacgcaaagtcggattattttccggttccgggccaccagcctttaccgcaatagcaatttgtttacccagtcttgtaaaggtctttgccatgtgaccccatcttttcaatttggcagcttttctatattcaaatgctcttcccattggaattatattttaatgtttaattattaattgtttaactatcaattagcgaagtttggcatccaacttatcttccagattcttcacgagtttcgacatgatcttatcgatcatcttatcgttcagtgtctggttttcatcctgcaacaagaagcttactgcatacgattttttaccggcttccagattcttaccttcataaacatcgaagagagatacatctttcagcaatttcttctctgtctcataagcaatcttctctatttcggcaaactgcaccttcttgtcaaccaacaaggcaaggtcacgcttcacagccgggaatttagaaatttccgcatagctgatctttacagaacggatggctttcatcagctctttccaattcaggtcagcgtaatatacttcattgtcaatgtcgaaagctttcagaatcttcttcgttacgatgccgaatgtagcaagacgctttccgcccttagtctgtacagacaaggcagcagcataaatatcatccgtcaggttacctacaaccagatttctcatattcaaccctaaacgcaggaaaatgttctctacgtaagccttcaactcatatacagaactttcttcatcagcatgcgcccatgaattggatacttttttacccgttacccacaacccgagatgataattctcagtataagctgccaatgacttttcggggttcttcttttcttcattgaaataatagcaatttccgaattcgaagaatttcaagtcggcattcttacggttagcattgtgagagatactttccaatccaccgaacaacaaagtctgacgcatggcattcaggtctgtactcaacggattcagtagcattaccaggtttttagaaggataagtttccataccttcataatagccagcacgtgtcagagagttattcagaatctcattgaaaccacaacctaccaactgttcagctaccaggttctgcaatttgttagacttatcatgttcgcccttcgtagtcaagctagacttcagcgtagacggtatttctacattattatatccataaatacggaggatatcttcaataacatcacaatcgcgttgcacgtctacacgataagggggaaccgccaaagtcaatccttctgccgtctcattggttattttcatctccagactggtaacaatgctcttgattgtctccaccggaatcactttacctaccaacgagtgcaccttctcataagataactctacgatgaaatcctgagcaggagcagcacaaatatcctttacttcagaagaaacagtaccgccggccagttctttcaccattatggcagccaatttcaaacaataaatagtgatattggggtcaatacctctttcaaatcggaaagaagcatctgtattcagtccatgacgacgagctgtcttacgaacccatgtcggatggaaataagcgctttcaatgaagacatctttggtagtttccgtagaaccggaatccagaccaccgaatacaccggcaatacacatcggtttttccgtgtcacaaatcatcaggtcacgatcagataatttacgttccacgccatccaacgtgacaaacggagtaccttccggcattgtcctcaccactacttcgccacctttaattttatctgcatcaaagcagtgcaatggttggccgaatgcatgaacaatgtaatttgtgatatccactacattattgataggacgcagtccgatgatacggagtttattctgcaaccattccggactttcttttactgttacgcccttcaccgttacaccggcatagcgagggcaagcttcactgttttcaactgtaacattgatatccagatcatgattttcaacggcaaaagcatctacagacggtttcttcagagaagtcggtttgttattttgcaccagataagcatacaagtcacgggctaccccatagtgagaacaagcatcggcacgattcggagtgatatccacttccagcacatagtcgctcttgatattataataatctttggcaagagttcccggaactgcatcagccggcagcacgatgatacctgcatgatctgtaccaataccgatttcatcttcagcgcaaatcatcccattggactcaacaccacggagttttgattttttaatcgtaaaacattcatctccgtcatagagttttgcacccaaagtggcaattaccactttctgaccggcagccacattcggtgcaccgcacacgatctgcacaggttctccctgtcccagattcacagtagtcacgtgcatgtggtctgaattcggatgaggaatgcatgtcaacacttcaccgattacgagaccttccagtcctcctttaatcgtttgcacttcttctacacttcccgtttccaagccaatagaagttaatgcagcggcaacttcttccggtgtcaaatcgaaatcgacatactccttcaaccaattataagagatattcatatcattaattttttattgtttccaaaagtgacccgcaaaattacaaagtttttttggatgacagggaattatccatcaagaaaataatgaaaacagccgaaactacatgataaaaagtaattccggctgcaatattaaaatgcttatgtaattttaccattaatttagaatggcaacggtccatccgatcctaccccaccaaacggattgtctgtttgaggggcaaactcagtcggaggcggcacactgccatcacttactgcattcattttagaaccaaaggttgctccaccaccttctgccggatgcggaatcaccatatcatcttccggattctggaaacgggtgtactgaccgataaaacgcaaacgaacatcacctaccgcaccgttacgatgcttggcaataataatttctgccataccgcgtaaatcggttccatcttgtgaggtataaatcttataatattcaggacggtgaataaaacacaccatatcggcatcctgctcaatggctcccgactcacgcaagtcacttaactgcggacgtttaccttcttcaccttcacgactttccacaccacgattcaactgtgacaaggcaataatcggaatattcagttctttcgccaatcccttcaacgaacgtgaaatcgtacttacctcttcctgacggctaccaaatgacattccgctcgcattcatcaactgaaggtagtcgataataataatccttactccatgttcgcgtaccaggcgtcgagcttttgtacgaagttcaaacactgacaatgaaggtgtatcatctacatacagcggagcatccaaaagatcacgcaacttataatccagctgttgccattcataatccgccagttgtccgctcttaattttctcactcggaatttcgcacgcattggagatcaaacgattcaccaactgtacgttactcatttcaagagagaacacagctaccggattacgataattcaccgcaatattctttgccatagaaagtacgaatgccgtctttcccatggccggacgggcagcaatgataataaggtcggatctctgccaaccggaagtcattttgtcaagtttggtaaaaccgctctccaaaccacttaaaccgtccgtacgggcagctgcaatctgaattaactgatacgcttcggcaataacaggattaatctgtgtataatccttcttcatgttctgctgggagatctcaaacaatcttccttcagcttcctgcatcaaatcatctacgtccagagtttcatcgaaagctttactctgaacattgctggtaaatgtaatcaattcacgagccaatgccttctgtgcaatgatgcgggcgtgatattcaatatgcgccgaagaggcaaccttactacttaactgagtaatataaaacggaccacccacttcctccaaatcaccgcgtttagcaagttgctcctttaccgtaaggatatccaccggtttctgattcacagccaagtcggtgatagcggaataaatcaactggtgccggtgctcataaaaagactccggacgaagaatttcacttactaacgaataagcgtctttctctatcatcaatgctcccaatacagcctcttccagttccggcgcttgcggctggatacgtccgtagtcatttacgggctgtatttttgccttactattgcttcggggagcttttctctgttctgccattttttaatactatgaattattaaagggatggcaaagataatgcttattaatcaaaatcatccctattctaccaaacaaaaaaagagctactcctgaaattcagaaatagctctttacattctatcaaagttatttttaaatagtcattacctctaaataacaactatcaccctttacaacatgcctttatttgctctacaatataagccacatcttcatccgtcacccaaggaccggcaggaatacataaacccatattaaacaaacgttcagaaacaccattcacataacaaggattagttgcatagacaggctgcaaatgcataggtttccacaagggacgggtctcaattcccagttcatccagtttacgccggacctcatcataggtagtaccggtcttcactggatctatcagaatagtagacagccaataattagcgttgaaacgaccatcaggattagatttcaacgttataccatccacaccttcaaaagcatt

SEQ ID NO: 6372 - DNA, 249 bp, Unknown
  gut microbiota DNA sequence
gcgccggacctcatcataattagtaccggtcttcactggatctatcagaatagtagacaaccagtaattagcgttgaaacgaccatcaggattagatttcaacgttataccatccacaccttcaaaagcattctcgtaaagagcatgtacatggcggtgatgcgcaatatgctcatccaatacggtcatctgaccacgaccgatacccgcacaaatattactcatacgataattgtaaccgatcttttc

SEQ ID NO: 6373 - DNA, 482 bp, Unknown
  gut microbiota DNA sequence
tgcgtgaagacgttgtttatttcctcctttacacggttacggaaacggttgatggttatgaaatccggatgctcatgaccggcaagccagatataatggatatcacgcaaaagaagcttctctattttacgacaggaatagatattattcatataagcgtagataattaccttgagcatcattttgggatgataagctgagcgccccgtttctttataaagcttcttgaaattatcaagattgagattatcaacaactgcattgactatgcggacaggatcgtccgcagctatgttttcatcaattctttgtggaaaaagaacggtttggttgggaatgtaaggacgaaaatgtaactttgccataacgaaaaaactgatgcctaaagttacataaactttgggtaataacaaagcccgggcttgggaaagtctgggctttgcgcataaaaaaaggttgtgccagcattttgacacaacctc

SEQ ID NO: 6374 - DNA, 48529 bp, Unknown
  gut microbiota DNA sequence
ttttagacgcggatgacacggataacgcggatttaaaaggctgcgctataaaagtggataaaaaaaaagatccgcgttatccgtgtcatccgcgtctaaaaaattatttatcatttaactcataaccgtacagaaaggaaccaatcccatcacaaaaaacatgcccagagcattgccctgggctataaatattaagtttgtcagtcttcagtctgcactgtttgttttcaaacaaaatctttcagttcttgttgtagccgttggcgggtaaagaagatacggctttttacggttcctaaaggcaatccgagacggtcagctatttcacgatacttgaaaccggagacatgcatggagaaaggaactttataatcgcggggtaacgaattcacgatgcgatgcatttcttttaaatcataagatccttcggcatttgcaaaaccggagttttgcggcaggtttaagtgataaaggttatctgtctggtccacgaaagtttgttcgcgaacgattctgcggtaattattaataaagatattccgcataatggtgtacatccaccctttgaaattggtatcgggcatgtacttgtcttcgttgtccaatgctttgagtgaggtttcctgcaataaatcattcgcctcctctttatcggctgtcaacttatatgcaaagcgaagcagttcttcttgcacactaatcaaatccttcctaaaactgtaggtattcatactttgctcttttaaatagttaataattattttaaattcacggttgcaagtatagggaagttttggggttcccgaggaccgagttttgtttttatttagggcaaaaactatcaattgacagttttcaccccctttttgagagttttctggtggtgatttttgtaaaaagcgtatctttttccgaagatttcgtaaactgtttgtgatttttttatagttttgcctacatatagcaaaaacactttatttaaaaacactttattttatgagacgaattattaaatcaatcactcttctggctatcatggctatcgctttgccgtcattcggtcaaggattgaaagctttcaagctgaagaacggcctttccgtatatgtatgggaagacaacacgaaatcggatgtgtacggtattgtggcctgccgaacaggttcagtgaacgatccggcagagtacacaggattggcacactatctggaacacgtgatgtttaagggtaccgacaaaatcggtgcactggactgggctaccgaaaagcctatttatgataaaatcattgccaagtacgatgaaatggccgacgaagctgatcccgttaagaaagaggcaatcgctaaagagatcaacgagctgaccatagaagccggaaaggttagtgtatccaacgagttcatgaacctgatagaaagcatgggtggaaagagactgaacgccggaaccagcttcgacgtaacttactatcacaactcattccctccctaccagatcaacaaatggttggaaatctactcacagcgtcttatcaacccggtattccgtaccttccagactgagctggaaagtgtatacgaagaatataatatgtataaagataatccgggaagcgtacagcaagaattcatttcgagtgtcgcctatgaaggacatccgtacgcacgccccatcatcggtctgccggaacacctgaagaaccctcgcctgagcaaactaatcgaatactacaacgaatggtatactcccgaaaacatggtactcattcttgtgggtaacgtcaatgccaagcaaatcagcggacgtatcaacgccactttcggacgtttaccggctaaggctactcccgaacgtaaaacttatcctgaccttgaaattaaaggtcgcaagcagtataatgctaaaatcggttattacccaaatgtatgcctcgtatacaaaggcgtaccttccggacaccccgatgaaaaacctctggaaatcgccatgtccttgctgagcaacagcagcagcaccggtacgctggacaaattgaccatcgacggtgaactgaccaatggttatgcctatgcagacacccgccgcgaacaaggccgcaatatcgtacgttgcaccccactgtacgatgaaaaccaacgtcgtttcgaatcgaacaagagcgctgaaaagaaagcactgaaagctatcgagaaaatcgccaacggacaattcgaagaatggcagatcaatgctatcaagaacaatatgtgtcgtgacttcgacctgatgatggaatcgaatacttccaaagccctcacgctgatgcaggcctttatcagtgaagaagacctgggacaagttctcaactacaaagatgaggtaatggctattactacagaagatatcaagcgtgttgccaaacaatacctgaccaacgattacctggccatctacattgaaaaaggcaagctggacaagaatgcaaaaatcaagaaaccgggttacaaacccatcgaaccgcctgtaggcaaacaatctttgtatgctacacagttcaagaatatgcctatcggacaagtggaagagaaattcctcgacttcagcgagatacagagcaaacaactgaatgaccgctccaagatgtattattcgcagaatccggaaaacaacgtattcagccttacactccgttatggtgtcggagtacgtgatttcccgaaactgggtattgcagcggacttgatgaacaacgccggtatcatgggtacttatgagccgcaacaactgaaagaggaacttagcagactgaatgcaacttgccgcgtaagcgccagtcaaaactacctctacatcaccatggaaggctacgaagaaaccttgccgcaagcttgtcagcttcttgcccgccaaatcctgatgccgaaactggacgaaaaacagttaagccgtatcaaaggttccatgctgggtagccgccaacaacgtaaggagaatgtaaacaccttatccaacgcactcctccaatacatgatcttccaggataagtcatcctatattgacgaactgacagataaggaaatctacgaattgcagatctccgagctgacaggtgatatcaaccgcgcatccaactatgaagccgaaatcttctattgcggaacaatgcctttcgataatgcttacgacgtcctcagcaagaatctgccgctggttgccaacgaaaagccatctacatctccgcaggacaagccgatggtttcagtaacggaaaataccatttacttcctgcctaacacggatgcggaacaggcacagatttatttctacctgccgatggcaaaatatgataagaaagatgatgcaatacgcgatgcgttcaatcaatatttctccggtggtttcaacggtttggtaatgactgaaatccgtgaaaagcgttctatggcttactcagccggagcctacatcggaactcctgcattgcccggtaaccccacttacctgtttggtaacatcggtacgcagaacgacaaagccaatgacgcgctggatgtcttcatgggattggtaacggatatgcctaagaatgcagaccgtatcgataacatcaagagttacatacgccaagagatgctgacaactcatccttctttccgtgataaagcagagaacatgagagaattgcagcgcataggttacaatgcagaccctgccaaggagaacctgccaaaggttgacgcattgacttttgacgatatcgtgaagttctacgaagagaatattaagggtaaaccttactgcatcggtgtcatgggtaacccgaaagatattgatctgaagaaactggagaaatacggcaaagtagtgaaactgaatgagagaaaattattcaacacgaaagacgcattgttctaaagagctacgagttacgagctacaagctacgagttgctgcgctatgacgctgaaagagctacgagttacgagctacaaactacaagttgctgcgctatgacgctgaaaagcacttgtagctcgtagctctttctttattactccttgtcttcctcctcttctccgcctcccgtaagaatcggcagacagatattatacttcactgccagaatgcgcgtcacaaaaaccgatactccgcccaccacctggcaagcataggactgcattcccagcagatcgcacaaccagtaagccgtaccgcctaccacacatgccatcgcataaatctcttttcggaaaataagcggtatctcattgataaacacatcacggatcactccacccgcagcacctgtaatgctacccataatgatggctacccagaacggatatcccaatgcaatgcttttccctacaccgaccaccgtaaacagtgccagaccgatactgtcgaagataaaaaacgtattgtgcaagtggatgagatgctttccgaaaagaatgacccaaagtaaagccagtcccgtacaaatcagatagataggatcagtcatccaccccggcgtcactcccagcaatacatcgcggatggtaccgccgccgatagccgtcacaaaacctaccacgtacgccccaaaccagtcgaaccgctttgccgatgccagacggataccgctgatggcaaaagcgaacgtacctataaaatcgagaatttgaacaaatgtaggcatgataatcaatgattaacgttaaatgtttaatgatttataatcggtattcattaaaattatgggcaaagtaacgaataatttccctaagaaaacgtatttttgtctcatcaatttatatgcaatgaaaataacaatcgtatcgggcgcacgccccaacttcatgaaaatagctcccatcacccgggccatcaaagccgcgcaggaagctggaaagaagatttcataccgtctcatctacaccgggcgacaggatgataccagtctggatgcctccttgttttccgacctggacatgaagcggccggacggttatctgggagtcaccggacatgaccattcggaagtggcagccgccatcatgcttgctttcgagaaggaactgaacaatcatcccgcgcaggtagtactcgttgtagacgatcttaccgccaccatgagctgttccatcgttgccaaaaagcgcggtctgaaagttgcgcacctcattgccggaacccgttcgttcgatatgaatatgccccgcgaagtgaaccgcaccatcgtagatgccatttccgactatctgtttaccgcaggcatggtagccaaccgcaacctgaaccaggaaggcatgattcccgaatacatccattatgtaggcaatatattgatagataccgtccgctacaaccgtcaccgtctgttgcagcctgtatggttctccaccatagggttggaaaagcgcggttacctgttgctgaccctcaaccggcacgacctgctgaccaagaaacatgttctcaaatcgttgatacaaacattgattgagaaatccgaaggcatgcccatcattgcgcccctgcacccttatgtgcaaaaagccatcaaatcgctggacatccccgcgtctaatctgcacatcctgccgcctcaaagttatctgcatttcggttacctcatcaaccatgcaaaaggcattgtgacggactccggaaacattgccgaggaagctaccttcctcgatgtcccctgcatcacgctcaactcctacgccgagcatcccgaaacctggcgtgtaggtaccaatgagttagtgaatgaagattccgtggctcttgccaatgctctggaaagattaatgctcggcgaatggaaacatactaccctgcccgaccgttgggatggacgtacagcggaacgtatcgtacagacgttgattaacgaagaattaaaggagcattactgaattaggagttaagttagaggaatttaacagataaccaacagaaataacctaacttatagaaagcgaaaagccgtaaagaggggtgttttccagtcaggttcttttccaaaagactctcagatatacgaaataggaaagcggttagtgcaacagcatgaaaccgctttaaacaattgtaccagcgcaataagcggacataaggaagcaattcccgttcacgacccaagaggtttttcacagaacggcgtgttttcaccaaaaaagaagccgcatcttcctccaccagatgccagaccggattttcaatatgcaacaccgatatgcccgcatcttccagcctctttccgaaagcggtatcctcatatcccagatgaaacgtttcgtcaaaacggacacgcagaaaaagctctctcggaataaaaaagttcatacttataaagtgctgataaggatgcttacgacgttcggcagccggttgcgcttccacctgcgctccgtatttattgcgcagaaaggagtccccctcctccggataacaaaagccaccgcaaaccacctgtccgcccgcattcttgaggtataaagaaagaaagtcctcacctaccggacttgtgtccgtatccagaaaaagcaaataaggataacgcgcctgttcacccaaataattgcggataaatgccggaccatgattcgtctccagttccaacacacgacatccgtccaaccggttcaacacacgattttcttccctcactttccggcacgacgcgtcgtccgccagcaaaatttcgaaaggaaactccgtcagcaaggccatctcatataatttccgaaccaacgagacgcaatttatattatacaccggaatgagtatggacagcatattgtgaattttacgcgacaaatatagcacaaatcagatgaaagttaaagcagatataaacattcctcttatttctttagattatatttacttcttatttaactgtattttgttaactttgcggcctcatactgacttaaatatgaaacaacaatatatagctctcatcctttttctgctgtcattattcgtcgcacacagcgcatccgcacagattaaaggtgtcgtgaccgactccctcaccaatgaaccattaatgtacatcaccgttcaatacgagggaaaaggcgtgggtgccatcaccaatgccgaaggcgaatacacagtggaaacccgcaaaggctggaatgaattatcattctccgccatcggatacgtgaccaagaaagtcaccctgaagcctaccaccaaagtactgaacgtgaagctggcacctgccgacgtcatgctctccgaagttgtggtgaagccccagaaagagaaatactcccgtaagaacaatcccgccgtggattttatgaggaaagttatcgagaataagaaagaactgaaactggaagccaacgatttctaccagtatcagaaatacgaaaagatgaagatgtccatgaacgacgtcacccccgaaaagatggaaaagggcatctacaagaaattctcattcttcaaagaccaggtggaagtatcgcccaagaccaacaagatgatcctccccatctccatcaaggagacatcttcgaagaccatctaccgcaaaagtcccaaaagcgaaaaaaccatcatcgaaggtgtgaattccagcggtatagaggagtttttcaatacgggagacatgttgggcaccatcctgaccgatgtcttctccgatgtcaatatctacgacgatgacatccgactcctgcaacgccgcttcgtcagccccatcggtcgcggggccatcagtttctataaatactacctcatggacaccgtcatggtggaccgtcaggagtgtgtgcacctcaccttcgtgcctcaaaactcacaggatttcggtttcacgggacacctctacgtagtgaaggattctacttatgccgtaaagaagtgtaccatgaacctgccaaaaaagaccggtgtgaactttgtggacaacctcgacatagtgcagcaattcgagcagatgccggacggaaactgggtacttacggacgatgacatgaccgtggaactgcaattcgtaaaaggcatacaagggcttgaaatacagcgtactaccaaatactccaattacaactttgaagacattgagcctcgtctcttccgcctgaaaggcaacgtcatcaaagaagccaacatgctcaacaagagtgatgaatattgggcgagtgtgcgtcaggttcccctcacaaagaaagagagtaacatggacgtcttcatgaaccgcattgagcaaattcccggattcaaatatgtcatcttcggtgcgaaagccctgattgagaacttcgtggaaacgggcaccaagaagcaccccagcaagttcgacttcgggcctatcaataccaccatcacaagcaattacgtgaatggcacacgtttccgtctcagtggtatgaccaccggtaacctcgatccgcactggagtttcagcggatatgcggcttacggtacgagggacaagaaatggttctataaaggtcaggcagcctactcgttcaacaagcgcgaatatgtattgtgggaatttcccaagcactacctggccttcgattacagttacgacgtcatgtctcccatggataaatacctctcaacggacaaagataatatgtttgtgggctggaagtggaccaaggtagaccaaatgtcgtacatgcgcgacgctaccctgacctacgaactggaaaccaataccggtttttccatcaaagccatggcacgccaccgcaacgaccagcctgccggaggtgtattgcaatactggaaaaacgatggtaacatcgccggaatatgggatgatacgaataccttcatcaaggacatcaccaccaccgaactcggcgtcactctgcgttacgcaccgggtgagacgtatgtcaacacgaagcagcgccgtgtgcccgtatcgctggatgccccgatcttctccctctcccacaccctcggtctgaaaggcgtgttaggtggcgagtacaactttaaccttacggaagccagtatccgtaaacgtttctggttcggttcgtggggtaaactggatattaccgcccgtgccggcgcgcagtggaacactgtaccgttccccttgttgaacctgcccatggcaaatctgtcatacatcacccagcacaacgagtcattcagcctgatcaacaacatggagttcctgaacgaccgttatgcctctctcgccctgacctatgacatgaacggaaagctgttcaaccgcatcccgcttatcaagaagttgaagtggcgcgaaactttccgcatccgtggtatgtatggcaccctgacggacaaaaacaatccgtacaagagccataacagtgaactgttccttttccccatgcgcgacggtgtccccaccagccacgtaatgggcagtactccctacttggaagccagtgtaggtatctacaacatattcaagctgttgcatatcgaatatgtacgccgcctcacctacaccgatataccgggagtgaagaaagatggcatacgcttcatgatattaatgatattctaaaatagcgacttagtgatgaatgattagtgattagcatagttacttatcactaatcactaaacgttaaacacttattcacatgactccattagcagaaaggcttcgccctaaaaccttagacgactacatcggtcagaaacacttagtaggaccgggtgcggtgctgcgcaagatgattgacgcaggacgtatttcttcgttcatactatgggggcctccgggtgtaggcaaaaccactctggcacagatcatcgctaacaaactggaaactccgttctacaccctgagcgctgtgaccagcggagtgaaagatgtgcgcgaagtgatagaccgcgcgaagagcaaccgtttcttctcgcaaggcagtcccatcctgttcattgatgaaatacaccgtttcagcaagtcacagcaagactcactgctcggagccgtggaacaaggcacagtgacgctgataggcgctaccacggagaatccgtcttttgaggtaatccgcccactgctgtcacgctgccaactctatgtgctgaaatctttggaaaaagatgatttactggaactgttgcaacgtgccattaccaccgaccatatactgaaagagcgtaccatcgagctgaaagaaaccaccgccatgcttcgctacagtggtggagacgcccgcaaattgctcaacatcctggatctcgttgtttcttccgaagccggagatcccgtcgtcatcaccgatgagatggtgacagaacgcctgcaacagaatccgcttgcctacgacaaagacggagagatgcattatgatatcatttccgccttcatcaagtccatccgtggcagtgatcccgacggtgccatctattggctggcccgcatggtggaagccggagaagatcccgcattcatcgcccgccgcctcgtcatttccgcttcggaagacgtgggactggcaaacccgaacgccttgctgattgccaatgcgtgtttcgacgctgtaatgaaagtgggttggcccgaaggacgtatccctctggcggaagccaccgtttacctcgccacaagcccgaagagcaactccgcctacatggccatcaacaatgccctggaacttgtacgccagaccggcaatctgcccgtacccctgcacctgcgcaatgcacctaccaaactgatgaaacagttgggttatggagacaattataagtatgcgcacgattatcccggccacttcgtcaagcaacaatttctgcccgacgagctgaaagaccgccgtctgtgggaagcacaagacaatgctgccgaacagaaacatgcggaacggatgagagcgttgtggggtgaggataagttcagaaaatcgtaatctcaaatcttttccctaaatttgcgtactcactttaaatatatacaaaatgagaattgtagtattagacggttacaccacgaatcccggcgatctgtgctgggataagttgaaagagttaggcgagtgcacgatctatgatcgcaccgctcccggcgaagttcttgaacgtgctgccggtgcagaagccatccttaccaataaggtagtgatcaacagcgagacaatggctgccctgcccgatctgaaatacatcggcgtgatggctacaggctacaacgtggtagacatcaacgccgcccgcgaacgcggcatcatcatcaccaatatccctgcatacagcactccctctgtcggacaaatggtatttgcacatatcctgaacatcacccagcaagtacgccattattccgaagaagtcagcaagggaaactggagcaagaatcccgacttctgcttctacgacactccactcatcgagctgctcggaaaaaaaatcggtatcgtaggactgggacagaccggctacaacaccgcccgtatagccatcggcttcggtatgaaggtatgggcctacacttccaaatcgcgcctccaacttcctcccgaaatccgtaaagcggaactcgaccaattgttccacgaatgtgacatcgtcagcctgcactgcccactgaacgacagtacccgtgaactgatcaacgccaaccgcctctccttgatgaaacccacctccatcctcatcaataccggacgcggcccgctcatcaacgaacaagatcttgccaatgccctgaataccggcatcatctacgctgccggactggatgttctttctgaagaaccaccccgtgccgacaatccgttactcaccgcccggaattgcttcatcacccctcacatcgcatgggccaactttgaagcccgccaaaggctgatacatattcttatcagtaacttaaaagcatatattgacggaaaaccggtaaatgtaataaaataagctacgagctacaagctacgggctacgagtggctgcgctatcataccgaaaggcactcgtaactcgtagctttgtaacttgtagcccgtagctttacaacaacatgggaaaatcagaaatcaaaagtttattccgcagcattccagtcctcctgagcatcgtattggcccttgtcacgatgattgctgcattctccgggaacttcgaccccgccaattcaaggtacatgcccgtactgggattagcattgcccgcactattgctatgcaatctgttagtcgccatctgttgggcattcgcccgcaggcgctgggcattcattccccttgcagcattagttttcaactacggatatatccttgccatcttccagttcagcttcaccaagaagattcccgaagggcactacagcagcaattatgccgacggatacctgaaaatagccacctacaacgttggcaatttcggaggagaaattacaggctactcctgcaaggaaatcgcccgctacatgaaagaacaggaagtcgacgtcctctgcttccaagaatgtggcgacaacaaatacttcccgatggacagcatccgcaacgtattttcccactggcgctacgccttgatccctaccgaggattctatccgcggagtgcttcctatcgccgtgttcagccgctacccgctcgtcaatccccagttcatttcctaccagcaaagcgccaactgtagcatgcagtgcgacattgtcctgggacgcgacaccgtccgtctgctcaacaaccacttgcagaccaccagcgtcagccagaaccgccggaaatgggaacgcggacttgccaacagtaacgacacccgtcgtgaagcagaagtcgtgcaaggcgccatcacttccctgcacgacaacttcgtgaaacgcgccgaacaaacggacagcatccgccaactggtagttgccagcccctaccccgtactggcatgcggtgacttcaactccctgccatcctcctacacctacgccgaactgtccgatgtcctcaaagacggcttccgcaccagcggtcggggctatatgtacacctaccgctacttcaaacgcctgttgcgcatcgactacatattccattcgcccggcatccagggataccgttactactcgcccgatctggacctgtgcagcgaccataatccggtgctgatggaaatgaaaattaagaaatgagaaacaaccacctaatgaaactacttatgaaaagaccgctacttctacttcttaatctgatccctatattactgtttgcccagcaaccggttattttccctgacgacttcaaaacaagcgccctgaacgggaaagaagtgaccattacaaacaccctgacgctgacaaacaactacagctacacgtatggcacactgaccttttccaacggccagctatggactcctaccgaaaagttcgaaccgggtgtagatatgttcaatcagaagaacctggagaaccagaaaaaccaactcaccgtaaagcaaggctccttccccatcgtcgatgcagacggaacctgccgcatcggacaaaccatagaagggctgaccggaaaagccagctacagcaacggcacatacaccatcaccctgacccggaaacccgaattcaaaggcaacgaacgccccatctcctgcgacaccccggaaacgtacaacctgaaagtggtcagcttcaacctggaacacttcggcaaaaacgtaaacacctatagcctcaagctgcccaaagtagccctcgccctgcaagcactgcaagccgacatctacgcccttgtggaagtagaaggagccgccggactggaagaactctgccagctcctgaaccggaactgcaacacccagaaatacaagacacgctattataaagacaacgtgcagggcatggcctgcttcatctacaatagcgacgcagttacccccgtgggcgccatcagtctgaacaaactcgccgacaattacctgccggaacgcaaaaccgcccaaggtttccaactgaacagcaatcaggagcgtttcatcctctgctgcaatcactggaaatcaaaatcaggcagcaatgttccggagcaatacaaagataaaggcgacggccaaggcgcctataatccccgccgtgtgcaggaagccgaagccactctgaagttcatcaaagaaatcacgaaaacctacaatgatcccgacgtcctggtggtaggcgacctgaacgcctatacctgtgaagaccccatccgtaccctcgaaaacggtggtctggtcaatctgctcaccacctacgccccaaaccagtacagttacgcttacttcagtaatggcagttacgcagtaggctatctggatcacagtctggccacaagtacccttgaaaagcaagtaaccgatgcccgtcccttccgtatcaacgccgacgaaccacagaaaatggacgtcgatcaaagcggcgtacagaaagacaatatgtaccgctgctccgaccacagccccatcgtcaccttcctgaatctggggaacggcagcacaggtatcgaaaccccgacaatttcccgccccgctatccgcctgacaggcgatccacgcagcggctacctcactttagtaacttctgccaaccttacccttgcccgtgcggagattgtcagcgtcagcggacaagtcatcgcctcatacaacgctcttgatgcggaaagtactggtaacgctttcaccctgcctatcggaaatctggcacgcggattctatctggtacgtgcttacgaccaccaaggtggctgtaccacttgcaaagcagtgctgccataacgaaagaacgacatcacatatcatataattccctacttttgcagttttctttaaatttaaagaaaatatatgatatgaacaagctaaaaaaaacaactgcaaagcacctctcttttttacaaatgatggacaagctttccgctcttttattcacagagaattatcatctcagcgatgaagcataccgcaccgtcaaacgtattacaaagcaccttaatcagctgattgaaagacatgagcaagatttaagggataataaaatgagaaaacaggagcaaaccacatgttaatgttacataaataacacactctttttttgtacactttcagaaagcaaagattctattttatagatacatatagaagtaaaagtgtacaaatatcatagttatttttatttattttttcgtacctttacagatgtgcagccgcaacaaagcgtctgttcacaacaatttaagagattattttttttaacatggaagaaactatttccaaagaatcacaatcccccgggtatttagtctccgaatttaccggtgtacggagcaagaaatcacaaaccatcagtatcaagcagtacctcgacaaagtgcgcagcgacgagttcaaagaaaaagtactccgccaccgcctactccggcagcaaccgggacacgaagccgaagcacaagccatcaagagtaagatgccctgcatcatccccgccggcatctgccagggcgggcatgcagccagccaactcgtgcaactaagtctcatcaccagtgtggatctggacgacaccaacgaacgcaccgatgagatcttcgaatctctcaaagaattgccctatctgaaagttctgcaccgcagcatttcaggtacaggcctgaaagcatttctctgtatcagcatcagcaatcccgaccaatacagcgctatctacgccgctgtgtccgccgagatcagtcaatatgcacaacatccctgcgacaagaagtgcaaggacatcacccgcccctgtttctactcctgggaccctgaggcatactacaaccccaccgccacctcttacagtctgcccgaagctacagcagcagaagaagaaggaacaccgaacgtcgcaaagttccaccccctttcttccgccgctcccggtgcaacacccgcagagggggataaccctgccgctcccggattccttgcacagttcgtcagcgatttcgagcatcgaaatcccttcatgcgtggcgaacgaaatgacattgcactgaagttgggacgcgcttcccgaagtaaaggtttttcttcagaagaattagaaagtattatttctgttttttcgaagcattggtccaactctgattttactgcggacgatattcgcaagcgagtacaggctggttatcaattcgttaacaaacagcaatcttctgaaaagcctccatttcagggttcacagggttcaaggttcactatgaaccctccccgccaggagagagcgtcggaagatgaagacgttttgttggaaaataataacaaattacgctctgccgcaccctactttccggaggaagtctacctgcatttaccacgcttcctgcaagaatgcgtcaagtacgctgccaaccctcgcgaaaaagacatcatgctcttgggaagtctgaacaattgcagcgcctgcctgcccggcacccgcttcatctacaagaatgcagaacactccacacacttctattctgccgtccccgcatctgcggcagccggcaaaagtgcgataggcttcacctcttatctgatggacgccattcaggaacattacgaccggctgcgtcgcaaacaaaaaaaagagtttgaaaaggcccagttggtttgggaaaaagagcaacatgccgcattccgcgagaagcgttgcgccgacatcaatctgaaaccggaagagccgaagtatatttatataaaaatctcccccaccacctccaaaagccggttgatagaacatctgcgcgacagcggtgaactgggttgctgcatgaccagtacggaaatcggcaccctgatctctgccatcgggcaagactatggcaagtataccgacatcctttgcaaagcattccaccacgaagagatttcatcttcctacaaagtggacggtgatcctataatcgttcatctgccccggctggcgctcaacctctcgggtacgcaagaacaattcattctcttcttcatctcactcgaagacgggctttacagccgtttcgtcatctacacccgtgaagcggaatggatatgggaaacttgcgcccctatggacgaccagaccgatctgcgttcctactatcgcaagttgggagaacagctgcttgagatgcatctgcatctgctggattttcccacacaagtcaccttcaccgctgagcaatggaaggaacatacccgtcagttcactgaaatgctgaacaacgctattgtagaaggcaaagacgctccgggtggcatcgtcttccgccacggtctgtttgccatgcgcattgccgccttgctgacggttttccggaaatgggaagattataaattcgccaaagagtattgctgcacggacgaagatttcaatacggccatgctcatcacccgcacacttatcgaacatagtctgctgatgagcacggcattgccttctaccgtgcatccccccgtagctatgcacaaatatcaccggctgacaggaataattcacaatctgacaaatacatttactttttcagcatttatgcaagaagcagagagacatggactctcactatcctctgccaagcgtttgctgaaaaaagcagtagacttggaattcattgtaaaacaagaggataactacaaaaagagaaaatagccacgtggtgggtagggttcatagtgaaccttgaacccagatgaaccctaaaatagaaaaaaagacggagatttccgtctttttttgtaaggatatacgagttacacaagggataacaaaattattgcaagggctactgtttttattgcacagggcaaatgccgcactattatgtacttgctttagggttcgcccagcgcatccacaatgagcctcacttgcgcaggcgtatattgctttgcacaatgttgcaaccccgtattcgccagggcttccttcaatccaggcttcaaggcaatccactggttaagttttgccacagcagtcttaggttcaatatccggacagtagagttgtgccaattcgcttttaccataggtgcggcatacaaattcatcttctttttcattcttttccatacaataagtttttatgtttatataccataaaggtactaataattaatgaattagtattgtttttgtaacagaaatgcagtactaaaagtaaaaataattccgtttctaaaaaagctgtattttctcctttatacttgcttgcggataatcacttgttatctcctgaaaagctccggtaagtcgtgataagtccgaaaaacgcctgtcggctgccctatctttgttctatcaaaaacaagcttgttggagaactgacaaattaaaaattaaaatgttatgggagtatttttcaagaaagaggagtatgccgatccaaccaaaaaggatgcggccaagatgttctatccccgtctggtgacgctggggcaaagtgtgggactggatgtactgacgtacaaaataaggaatgtgagttcactttccaaaggtgacatacagagtgtgattactaactttgtagagacaatgcgcgagagcctgtatgccgggcaatcggtaaatatcaaagatttcggtgtattctcactcagctgtgagggtgaaggttctgccacacgcaaggagtgtacggcagaaaaaatcaaacgggtaaacatcaatttccgtccttccacctcagtcaaggtagaccttgtgaccacccgtgccggagagaaaatcgaattcatcgacctgcaagcttatctggaagcgcagaaagaagccggaaacggatcgggtgacgatggtaacggtggaaatggtggagacggtggactggatgaaaatccactgggataggctctgaaatcttcgttttttagaaatcaagaatgaaggaatcacaagaaattaaaagaatcaaaggtattaagggctgcgctgtgggaagcggtgcagctattgttttaactaaatacgaaatgttatgaaaaaattgacttgggatgctgtattaaaggttgtaatcgcagtggcttcggccattttgggtgcattgagcgctcatgcaatgcctctgtaaatgtagcctctataaatctgtaaaaacgtaaaataagacttgtttctatgagaaaaattaatctgatcgtcatccactgctccgccacccgctgcaaccgcccttatacggaagctgacttaaccgccgatcatctgcgacgtggcttcagtgaggccggatatcattattatgtacgcctaaacggagacatcaaaaaccttcgtcctgtggtgaaaccgggagcgcatgtgaaaggctacaatactaattcaattggtatttgctatgaaggtggtttggattgtcacgggatagcaaaagacacacggacggaatggcaaaggcattctctgcgagtactggtacgagccctgaaaatggatcatccagaggcacagattgtcgggcatagggatttaagcccggacatcaatggaaacggagaggtggagccgatggagtggacgaaggagtgcccgtgctttgaggtgaagagggaacggtggtaacaaaaaagagagtgtgctttgggcacactctctttttcatataataaaacaaatgtttcttattcttcttgaagagagaagtttttaacttcccaagtagaagcacaagccgtatcactcgtatatttaatggcaatacgaatgttctgaccattatacttgctgaggttagcttccattgtaatgaaggtaaagctatcgggccatgttgcaaattccactttatcccaagtagcagtagtcacatcattagtataatccgtggaaacacagacactgatatagtcttccgcttttgctccatacagataacctgcagcgccttcaaatctcaatacaggagacatagcttccttcaagttaatttccgtcggaataatcaaccaactttcagtaaccttattgcctcccaaatatccggtagctttccaaccatatttagcgtcaagaatccaaacataatcttttgttcccaagtctacatcctgaatagtacatccaccatcctcaccaataaaggtgcttgaatagtataccttcgcttcattccatacacctttcgctttgatgaacaacatagtcttaggcatgacattggcggtctccgtccaagttgcaccgtcataaatgaactcagttgcagatatagcctgactactgttactgtaataaaccacagctaccgtcaaatctgcctgagcatacggataagcattcttcagataaatcggcaatgtctctcccggtttaccaacataggtagctcccatcttagcataatcttcaggttgcaataccgctacagtaacatccggagtggtgtattctttccaagtactggatgctgcatcatatcgatatacagcagaagtgttgtattttgcaacagcacgcgtagaggcgaacatcatagcagcagctacttccacttcattttcaggaacttccttatacaaataaacatcagcataataaccagccttaggttcggaaacacttacgtttttaatctctacagtaggagcacatgccgaagtactcttatatacaaaggcaagacgtgctttctttccaacataatctttcaaatcaattgcaccggaattaacaaaagtccaactcttgccttccgaccatgcagcgttcagcgtagcccaagtagcagacttaacgttgtctacataatcagtagaaatcttaacttcaataaaatcagcccgattattaccattcaaatagttgatggcagcatcgaatgaaagtgacggagctgtagcaccggacaaatctatttctgtagaaaccaaccagctttcagtagggttattcactccattggcaaaagccgctgctttccaataaccgttctgtgaatcgtatttccatgcataagtgacgccttccaaattgatatcctggaaagcaaagccaccatcgcttgctttcattgtttcattcaaataaatgccgaatgaagaaggtggatatgaaccgaaagaataagaatcattatattcattcaatttcactgttttcttcttctcaacattcacaatggaagtagtaccatctgcattttgagaaaatttccagtctccaccggttccaggaagagctcccacattaaaggtattatacgttcctgacagataaataaactttccatccggacgttgcaaagaatagcctgttgcagtaggagcaacagtcaatacatagtttgaaacatcactactgattagaccatcggcaacagtcacagcagtacctgccatataaccataggtctttgtttcatcctgaagtcttcccaaaggaataagttttccttctttgtcaggagctacaaacacataattacctccttcggcagccattcccgatactttttgataaacattcggaatttcgccaccaccaccgatactcggttctgtttcagaataagcatagttgaccatgcgcatatcaccgtcagcaggattctctacagcttgttttaaaatggcaggaattttacttaccgtagacggagacaagaatgaagcagtaactgtttcaccccatactgtcttatagtcaccagtagtgagctcataagcggaaataccgttgaaatcagtcaggtattcaggcaatttttcagcattattgaaggccaccgtcactttcgacccatcgttcaaataaggataaaggctttcaaggtaagcaggcagataccatgatgcttgtgcgttctccgtaaaatatttattcgaccccatagcttccaaagctgccacaaagtctattccttccggatctaccctatccgttgctaattttatattgctttcaagtccggccactttcttatagtcaccgtctgccaggctcaactcgacgttctgcacatccttaggtatggcaagctcatcatagccaggaaagttatcttcgttatagtcgcaacttgccaaaaacagcaaagatgcgcacatgctaaatataatatttttcttcataatctgtcttggtttagaaattgaacttcaatcttacagaataagtacggccaaaaccgtaaagtacacgcgtagcgctctcccaatcgtgagcactgccatcacgagcatctgcaatgtattcctgatcaaggacattgtttacgtttccactcaatgtagcacgtacttttccaaaatcaaatgaataacctgcacttatatcgaatgtactatatgacggaattttccacgggctaccaatgacataaggttcatttggcgttgtagtattggcattaatatcataatcagcaaagttgcgtgaaaagaagttccaatccactccaatgcgcaaacctgttatcggacgtacacctaagcccaaagcagctgttgtctgtgccgaaccacccacattaacattatccatatcaaccagatatttatacttttctgcctctgccatatctgtcacaacatctccacgagtgtttttcaacatctggccttgtgagtcaaataaatatccggtagctacgcctttccagcgccagtcaccccaagaaaacatacctgtaacatctaaccaattcaaaggctttgcaacaaaatcaaattctacaccccagtggtcagcatttgcgccggtcatattcatcgcccaacgcaaaccatcggctgtcgtgccactatcataaagagctttatccatccaacgggtataataaccattcaaattggcagtgaagaaacggctacggtaaccatatcccaactcaaacgacatgattttctcgttctttgcatccggattacggtcatgtgaagtctgtgaattgatgaaagaagtatcgaacatcggcgcacggttgatgtaacctgcattaacgaaaacgttatgattttcagtcaagttatagttggcacctcccttgatgtttccacccaaataatttttcgtagaagactttgcattatctttactataatacatacggtcataacgccagtagccagtatttgaagcaccaccggaaacaaaagcgctcaacttatcttgattgtattccaattgtgcgaataccccttcatacataacgaaaccatcataatcacgacgcaacacatcgcccacattcaatttctcgtttatataactggagttaccacccactgccggattattttccgctgtaacattcttgcgattataggaatcaataaaataagtgccaccaaaaaggtctgtcagaacatcctggtgcaaacctttataataacggaaatcaattcctccatagaaatcaaaattctcaccgatcttagtggtatatgtagaaagtaatccataccagagatggttgttcatcatcttactcattaccattttagaaccattggtacttgcggcattcattgtttcaacagcatcatagtcaaaagttccatccggacgacggaattgcgtgtttaccaaaccgtttgtagacccataccatgagttagcgtaggtactgtcacctgtacctctatagccgtcaccacgaccgatagatacataaagagcagtacttaaacttgatttctggtcaatctgccacaagtgattcaaagaaatctgtggtttgtgataagagttcttggaagagttataagattgtccgttgcgataaccgaaagtggagttatacttataagggctttcttcacccatatattgttttacacgttgccattccttaatagaaagaccattctggttgctacgttgattatgccactgaggagcaccaaaagcagtcaaagacaactgatgattgtcattgaaacgtttagcaatactaacaaaccaagtatatccttcaaactctgtaccttgtatatagccatcaccccaagttttggctcccaacaaagagaatgcccatccgtcttttgacaaaccagaagagagattaaataaaattttattataaccatcattacccatagcataggatacagaaccacctttttttgcttcggtagttttggtaataatattaatagaaccacctactgccggagaagcaactttagcagcacccaaaccacgttgtatctggatacttctagtaacatcagacaaacctgaccagttcgaccaatatactttattattctccataccgttcatcggcacaccattaaccatcatagccgaattctcactcttgaaacctcggatgttaaccttgctatctccaaaaccaccaccgtctttagtagcgtaaatacccggagtagactttaagatttcagggaattcttgcgtacccaacttttcttcaatgaaaaccggatcaatagtagataccgctaccggagttttacgggcaaccgctatagaagaagtaattgtaacgtccgccagcatcacggcatccggatccatcttgataacccccaaatcaacagaagcacccttctgtgttattttcttcttgaggtctttaaaacctacatacttgaacaccaatgttccaccttgagcaacaccttgcttaaaataaccatcaatgtcagtcacagttccttgtgaagtgccttctaccataacagcagcgcccactaacggttctcctgtttctgagtcaacaagctgacctttcactgtagtctgggcaaatgccgcagcactgcatatagacagcacagccaccaacaggaaatgaattagatgttttttcatacttctgttttttgttaattaaatgtgttaattacgaatgttaattaagtattaaatactgttttaagacgcaaatataattaataagatttagatttgtattacatttctgctacaaaattttagggtatataggagttattgaaactttttataacaaaaaagccctacaagttttttgcagggctttctatttgtcataaaaatattagttatgctatcagattcttactgttatcagtcattcatcagctttctataacgtacacgggtaggttcttctttccctaaacgtttctgtttattttcctcatattccgaataagaaccttcgaaatagaagacattggaatcaccttcgaatgcaagtatatgagtgcaaatacggtcgaggaaccaacggtcgtgactgataattacggcacatcctgcaaagtcttcaagaccttcttcgagtgcgcgaagcgtattcacgtcgatgtcattggtaggttcgtccagcaacagcacgttgccctcttctttcagagccatagcaaggtgcagacggttacgttcaccacccgaaagtacaccgcaaagcttctcctgatctccaccggagaagttgaaacgtgacagataggcacgtgcattgatatcacgtccacccatacgaatcagttccgtaccaccggaaataacctggtacacgctcttgttcgggtcgatatcgctgtgttgctggtcgacataagctacctttacggtctctcctacttcaaactcacctttatctactgtttccagccccatgatcaaccggaacagcgttgttttacccgcaccgttagggccgattacacccacaatgccgttaggcggaagcatgaagttgagatcatcgaacagaagtttgtcgccataagcttttgccacgtgcttcgcttcgataaccttatttccaagacgcggaccattagggataaagatttcaagtttctcttctttctccttgatatcttcattcatcaatttatcgtaagaattcaaacgtgccttacctttcgcctgacgcgctttaggagccatacgcacccactccaactcacgctccaatgtcttgcggcgcttgctggcggttttctcttccatttccatgcgcttggtcttctgttccaaccagctggaatagttacctttccaggggataccttcgccacggtcgagttcaagaatccagcctgccacatggtcgaggaagtaacggtcgtgggttacggcaatcaccgtaccctcgtattgctgcaaatgttgttccaaccaatcgatggattcagcgtcaaggtggttggtaggttcgtccagcaacaacacatcgggcttctgcaacagcaagcggcaaagtgccacacggcgacgctcacctcccgaaagatggtctacagttgcgtcttcgggcggacaacgaagggcatccatagcgcgttccagtttactgtcgagattccaggcatcagttgcatcgatgatatcctgaagttctccctgacggacaaaaagcttatccatcttgtcggcatcctcgtaatactccggcaggccgaatttctggttaatctcttcgtactcagcgagtgcatccacaatgggttgtacaccttccatcacaatttcttttacggttttcgtaggatccaggtaaggttcctgagccagatagcccactgagtaacccggtgaaaacaccacttcgccctgataagacttgtccaacccggcgataatcttcagcaaggtagatttaccggagccattcagaccgatgatgccaatctttgcaccataaaagaacgaaaggtagatgttcttcagcacctgcttgttgttctgctgaatggtcttgttcagccctaccatagaaaagataatctttttatcgtcaactgttgccataaagtttttaagtgtattatattaataatgtatatgctattcccatccgatgaatattgggcaaagataacaaaaaaagagatattcttttgcattttcaaaaattgtctctatctttgcgcccgcttaacagcaataaaggattgattcagtagctcagcaggtagagcacaacacttttaatgttggggtcctgggttcgagccccagctggatcacagaaatcaaaaaagcctctgcaagtcagaggcttttttctttttgacaacaatttcaatctccacgaaaataacagatgcctttaatttaatccatatccaaccaaggaaatcatttcgactggtaaaactcgaattttaccatccttaccaagcctattgcaccttcgaaataaaatcagtcgtgttgtcggcaaaaagttaaataaagacaatcgctcactttttccaaaagatttcgtacatttgcagcgtctgacattagtgtcagactaatatatctgattttattatttatataccaaatcagcagaattctattatggatatttacaaagtcggcctggatatcggctctactaccgctaaaataatagtgctggataagagtgagagaaatgtccttttctacaaatatgaaaggcatcaggcaaaagttcaggaatgcctactggcatttttccaccagctgaaagaacagatgggcgatgttactttatcaatcaatatcaccggttcagtaggcatgggaatcgcagagaaatactctctgcctttcgtgcaggaagtggtagcggcagcccaatatattcggcggaatcatcccggaatatcttccatgatcgacatcggaggagaagatgccaaagtcgtcttcttccagaataatcaagccaccgatttacggatgaacggaaactgcgccggaggaacaggggcatttatcgatcagatggccatattattgggagtatcgatggatgaactgaacggactggctctccgggcaacacgagtacatccgatagcttcccgatgtggtgtattctgtaagacggatattcagaatctgatagccaagaatataccgaaagaagatatcgcggcttccattttccatgctgtaacggtgcaaaccatcgttacacttgcgcatggatgtgatattgttgctccgatattactttgtggagggccgttgacatttattccggcactcaggaaatcattcgccaactatttgcagttatcagaggagaacgactttctgctgccggagaaaagtaatcttattccagcctggggagcagcactggcagagaactcccggcaaatgaagataactgagctaaccggacttctggaaaatctatcagaaaaagcataccagccacaaaacagccttccaccttttttcaaggatgaaacggaatatctgcaatggaaggacaggttggcacaatatgatgtgcagcggacggaattaacatccggaatacaacaggctaccataggaatagattccggctctaccaccaccaaaatagtagtgcttgatgaaaataaccgtatcctgtactcctactatcacgacaacaaaggaaatccgataaaagccgtggaagaaggattgcagaaactgcataaagaatgtcaggaaaaagggacgatcctgcaaatcaaaggaggatgctccaccggatacggagaggatctgataaaagctgccttccagatggatgccggtatcattgaaaccatagcccattacatggctgccaaacatataaataaggatgtatctttcatcctggacatcggcggacaggatatgaaagccattttcacaaatggcggaattatcaaccggattgaaataaacgaggcttgctcatccggatgcggttcttttatcagcacctttgcacaatcactggactacaaagtggaggacttcgccaaagcggcttgtttctcaaaagctccgtgtgatctgggaacacgctgcaccgttttcatgaattccaaagtgaaacaagtgctccgtgaaggggcatccgtggcggatatagcggccggtctttcttactctgtcgtaaagaactgcctgtacaaagtgcttcaacttaaaaagccggatgaacttggaaaacatatcgtggtgcaaggtggaaccatgcgcaatgatgccatcgtacgaggtctggagaagctgacaggaaaagaagtattccgtagcgattgtcccgaattaatgggtgctctgggctgtgcactttatgcaaagcaacttaagacggccaaagttacaaatctggaagatatgatgcatcaggcccaattcacttcccgacaggttcagtgcaacggatgtgaaaaccaatgtgccatcacccggtatactttcggtaatggagaacattatttctccggcaataaatgcgaaaaggtgtttaccaataaagggaatgtttcggagaaaggcgtaaatgcttatgaaaagaaaatcgaacttctgtttgaccggcaagtaaatatagccgctccactactgaccataggtattccccgctgcctgaatatgtatgaagaatatcccttctggcattctttgttcacagagtgtggcatccgggtatgcctgtcggatgcttcgacattcaataaatatgagaaggcggccaatatggtaatgtccgacaatatctgtttccccgcaaaactggtgcacagccatatccaaaaccttatcgaatacaaagtagaccggatatttatgccgtttgtcatattcgaagaaatcgataagcaacaacagaacagttacaactgccccattgtgtccggatattcacaggttatcaagaatgtccagacagataacttaccgattgaccatccggccatcactttcaaggatacaggattactgtataagcaatgccgtgactacctgagcacactgggcgtacaagagcaggtagtaaagaaagcattcgaccatgcactgaaagcacaagacgcttttgaaaaagagcttatcgcctataaccggcaaatagttgaagaaggaaataaaaagcagaagctgattattctccttgccggacgtccatatcattcggacccgttggtacaacataagatttcgaatatgatcagcgctatgggcgtttatataattacagatgatatcgtccgtcatcaggatattccactgaaggaggtgaattttctggctcaatgggcatttaccaaccgtattttgaaatcagccaaatgggcagcgcagcagggaaatcacgtgcaatatatgcagctgacttctttcggatgtggaccggatgcctttctgatagacgaaatacgcactttactgaagcagtacaataaaaatcttactttattgaagatagacgacgttagtaacaccggttccatcaaactgcgtgtacgttcgctggtagagagtctgcacatcagtttgcaacaagctgaagaaagacaggtacagaaacctttatccctccctcttttcaccaaaaaggacagaaagaagaagattatcgccccattcttcaccccttttatatcaccacttattccttccatttttaaagtggcaggatatgaaatggagactctgcccataagcgatgaatgttcgtgcgactggggtttgaagtattccaacaatgaagtttgctatccggctacactgattgtgggtgacatcgtgaaagcttttaaggaaggacgatatgacccggacaacacttgtgtagccattacgcagacgggaggacaatgccgtgccagcaactacatctctttaataaaaaaagcattgatagaaaacggatacactcatactcccattctgtcaatagcattcggcagcggaatagataatcagcagccgggcttcaaagtaaattggctgaaagtattgccaatagcgcttgccgctgttctatacagcgactgcatagctaaattctattacgccgccgttgtccgtgagaaaaagccgggacaggcagctaaattaaaagatatgtacctggaagcggcaaagcctcttatcctgaaaaacagaccggaagatttgctcagttacttatctctggcagttgacgaattcaatcagatctgtcagcaaaaatcatgtcctaaggtgggtgtggtaggagaaatcttcctaaagttcaatccttttgcacaaaaagacatcaccacatggctcatagacagaggtatagaggtggttcctccattgatgacagactttttcatgcaaagcttcgtcaatatgaaagtaaaccaggatagtcatataaaaaagaaatatattcctgatttcgctatcgactggctttatggaaaagttcagaaacaaattgataaaatcaacaagataggaaaagccttcctgtactttcaaccctttgaaaatatttacgagaaagcggaaaaagccaaacaggttatatcgctgaacacgcagttcggtgaaggctggctgattgccggagagatgtcgtcttttgccagtcagggtattaatcatgtcatcagtttgcaaccattcgggtgtatagctaaccatattgtggaaaagggaatagaaaaacgtataaagtctgtctaccctcagataaatatattatctttagattttgacagtagcgtcagcgatgtgaatatcaccaatcgcctgttactttttgttgataacataaaataaataagaccatgggagctacagaaaacaatgagttggaatatcaaataattgaaacagcgaaacagctttttatagaaaaaggcttcgttgaaaccagcatgagtgatattgccgcaaaagtaggaataaaccgtcctaccctacactactatttcaggacaaaagacagaatgtttcaagctgtattcggttcgatagtgatgtcgctattaccgaaagtacaggaaataatacagcaggaactgccgttcatagatcgcgtaagtcttatattggataagtatataacactcttcaccgaaaaccctgacatgccaaagtttatatgcggggaaatacagcgcgatgtcaaccacctgcttgatgcagctaaggaaatgcagtttgaagaaacgttcctgattataaaggaacgactgctcatggaaatggaagcaggcagactaaagaaagtacccatacatacagtattcataactttctatggtttgcttacttttcctttgattacaaaaaatttgatcaccagcatattcctgaaagatactaccgatttttcggtttttatgctggagtggaagcaatatattctttttcacttgatgaatttgctgggtattgagaaggaaaattgattgttactcatatacataaccgataaaaaagtatagtatgaaaacgattcgaattattttctccttattgctgataactgcaatgagtatgcctactctttcggcacaaactaagaaagagaaaaaagaactgaagaagcaggccgttgaaaaactggtcacatccgggaagtataaaataaatgtaaacagagctcttcctgcacgaggacggtctgttacactaacttcaccgtactctgtggaaataagaaatgattccgttatatcttatctgccttactatgggcgtgcttactctattccttatggcggtggagaagggctaaactttaaagctccactcaccgactataagttggagtggggcaagaaggaaacagccaagataaagttctctgcacgaagtgaggaggataagttcgatttcagtatagacgttttcagtaacggatcatcttcgatattcgtgaatatgcagaaccgtcagtccatcagtttccagggagaactggatatgccgaaagaaatcaaccaatgattacctttgtacatgatatctttttaaatttatgtataaagaataccaaccctgcgcactactctctccctatatagacaagtattgggaattcaaagggaatccggagtacggaatgcgtatcaacatacttcctgatgggtgtacagactttatcttcacccttggggaagcaacacaagcggtaaatagcagtctgaccatgaagccttatcgtgcttattttataggtccgatgaatagctattcggaattggtagcgtatgcggaaacggttcacatgttaggggttcgcttcctaccttgcggactatcccgctttatccgtctgccactgcacgaactgactaacctgagaatcagtgcagacgaggtaacctgctttttcgatacttcttttgcagaaaggctatgcgaagaagactgtttagaaaatagggtaaagatcatagaagaattatttatcaaatctctttataaacacgacttgccgacagatccgcagattgtatttgcaataaaacagattaaccggcatcagggaaaactgtccgtgcagtcattgatggagaatatttgtctgtgccagcgacaatttgaacgcaaattcaagatgaacacaggttataccccgaaaatatacagcagaatcatgaaattcaagaacgcggtggatttattaaggggcactaccagtgacaatctgctctctactgctatccatgcaggctattatgacgtgccgcacctctcaagagaaattaaaaggttatccggcaatactccctactctttcctttctattcctctgacagaagaagatgtcacactgacttacgtagaagcataaatgtcgtttttgtacaatgcaggaatatctccgactacctatatttgcaccattcaattaacaaaacaaattctgcattatggaaacaatgagagaaaaagccgcacaaatgttgcgcgcaagtgaagtagtcgttctgacctcagtaaataaagaaggatatccacgccccgtgcctatgagtatggttaagtccgaagacatttcaacagtatggatgtcaaccggaagcgactccatgaagaccgaggattttcgcaagaatccgaaaggtggactatgcttctatgcacagggaaacagtgtttgcatgacaggtgatgtggaagtaatcacagaccaaaatgtaaaacaagagctttggcaagactggttcatcaatcattttcccggcggaccgaccgatcccaactatgtaatactgaaatttacagcaaatcacgccacttactggattgacggaaagttcatccacaagaaagtttaatggagtcctgtcgaaggaattcaactcaatagacagaaaagcgaccggcagcgtggttattaacaaataatccgtaaatttgcagcccgaaatttagagactgtaaagaatgcaaggaacaaagaatctgactaaaggtcccattaaccgccaactattcaatctggcgatgcctattatggctacctcgttcatccagatggcatacagcctgacggacatggcatgggtaggccgtataggtagtgaagctgttgccgccgttggtgcagtgggaatattgacgtggatgtccggttccatagccttgctaaataaagtaggttcggaagtcagcgtaggacaatccataggtgcgcgcaacgaacaggatgcccggcagtttgcttcgcacaatatcagtattgccttgctcatctccatctgctgggctgctttgctattcttgtttgccaatcccatcctgcgtatattcgaactgaaagagcatatcacggaaaatgccgtgacttacttgcgtattgtctcaacaggactaccgttcgtgtttctgtccgcagccttcaccggaatatacaatgcggcaggacgaagcaaaacacccttctatatcagcggcacaggattgattatgaatatcatactcgatccgcttttcatcttcggtttcggctggggaacggtaggtgcagcacttgccacatggctggccgaagctacggtattcggtatattcatctataagctacgctataaggacgatctgttaggtggatttcccttcctgacacgtctcaaaaagaaatatacccggcgtatattcaagttgggacttccggttgccacactgaatactttgttcgcttttgtcaatatgttcctttcacgtacagcttcggaacaaggtggacacattggtcttatggcctttaccaccggaggacaaatagaagccatcacctggaatacttcacaaggcttctctaccggactaagcactttcattgcacaaaactatgccgccggagagaagtcaagggtaaagaaagcctggtacactacattatggatgacgtccatattcggcacactatgttcgctgctgtttatctttttcggaagcgaagtattctctatcttcgtacccgaaccggaagcatttcgcgtaggtggtgacttcctgcgcatagacggttactcacaactcttcatgatgctggaaatcaccatgcaaggggtcttctacggattaggaagaacgattcctcctgccatcatcagtatatcatgcaactatatgcgtattcccgtagcactgttcctggtacacatgggaatgggcgtagacgccatatggtgggctgtaagtgcaacaactattgccaaaggaattatccttaccgcgtggtttatattgataaagagaaaaatactctaaaaatgcagaacaaaagacctaaacataataacaatagaattgttatataactaactttgcattacaaacatagtaacattttaaaagaataaagtatgaaaaagattaagattagtgtactgctattgagcggtgccatattattaggaagttgcagcacaatgaataacactgccaaaggtggtgtgataggtggtggatcgggcgctgctgccggtgccattatcggtggattgattggtaaaggtaagggtgcggctattggtgcagcagtaggtgcagcagtaggtacgggtgcaggtgttgccatcggtcataagatggataagaaagctgccgaagctgccaagattgaaggcgcacaggtagagaaagtaacagataccaatggccttgccgctgtaaaggttacttttgaatcaggtatcctgtttggcttcaattcatctacattgagcaatacttccaagtcttctctgcgcgaactggcccagatattgaaagaagaccctacaacagatattgcaatcgtaggccatacggataaagtaggtacatatgaagctaacatgaaggtttcaaaagaccgtgcatataccgtagagaattatctgcaagattgcggtgtgtctccttcacagttcaagaaggtggaaggcgtaggctacaatcagtatgacgacagcatgtcagccagccagaatcgccgcgtagatatttatatgtacgccagcgagcagatgattaagaatgcagaagcaggcaagtaagttacgagctacaaaaggctacgagctacaggttattgcgctatcagtccgaaaggcacttgtagcttgtagcttgtaactcgtagctttttaacattaaaaatcacgacaatgagtataaagaaagtcttgcggatagtccgcaacctgatactctttttctttatttccactattctggcagtggtgctgtatcgctttatccctgtttacaccactcccctcatggtaatccgcagtacccagcaactcttcaaaggcgaaaagccggtatggcatcatacttgggttcctttcgataagatctcccctcacttgccgatggcagttatcgcttcggaagataatcgctttgccacccacaacggcttcgatttcgaagagataaaaaaagccatgaaagagaatgaaacccgcaaacggaaacggggtgccagtactattagccaacagaccgcaaagaatgtattcctttggccgcaatcctcatgggtacgaaagggattcgaagtttatttcacctggttgatagagctatgctggtcgaaagaacggattatggaagtctatctcaactccatcgaaatgggacaaggtatttatggagcagaagctgccgccaaatataagttccataccactgccgccaaactgactgcgggacaatgtgcattgatagcggcaacactccccaatccgatacgttttgattcggcgcatccgtcagcttacattctgcggagacagtcgcaaatcctgagattgatgaaattggttcccaaattccctccggtagaaaagaaagaagtcaagaagcagaagactgagaagaggaaaaagaaataatctgtgtatatttgtatgcttaatatggtaaggaatgaaaaaaatcttgtcgctattcttgatttgtatcatctgttgcggggtgcatgcccagcgtacggaggtttataatcagcatatacatacggtgcaggtcattgccaacaatgattatatgtcgcctgccgtcatccggctgggagagaatgaaactgtagaaatatctttcgaccacctgactcacgattaccaccgctaccagtacatcctcacgcactgcaatgcggactggaccccttcggatctttccgaaacagaatacctggatggtttcaatgacaatccgatagaagatcatgatatttccgtcaatactaccctgccctacacgcattaccgtctgacacttcctaacgaccaggtacaactgaaactttcgggtaactaccgtctgactgtttatgacgatgcggatggaaaggataagccggctttcactacctgtttccgggtattgcaaaaggaggtgaacgtatcggcacaagtcagcagtgacactgagatagaccggaataagacgcaccaacaagtgagttttagcattcagtataaaggatatcctatccgcaatccgcagaatgaagtcaaagtacacgttttacaggataatcgtacggataactgggtaacgaatctgcatccttcctatattggtcccgatcagctacgttacgaacataaccgggccttgatatttcctgcgggaaacgaataccggcgttttgaaatggtgagtacccgctatgcctcgcaaggtgtggagagtattcgttatcatgctccttactatcatgtcacactccgcccggacgagcctcgcttactaaactacagttacgatcaggatcagaacggacgcttcgtaatacgatatgacgaggcagtagataatgctacggaagctgattacttcttcgttcatttctctctgctatgggagaacccgctaactgaagggaacttctatctgcaaggagcttttacttatgataattttaatgaagagagtcggttgaagtataatgcagaagcgcatgcttatgaatgcacgcaattgctgaaacagggagcgtataattatcaatacttatatgtggctcccggtaccaccgtaggaagtaccgcacaggcagaggggaatttctatgagacagagaatgaatatctgatccttgtttaccaccgggcctttggagaaagatacgacaggctgatcgggatgcaacaggtgaaatagttacgagctacaagctacgagtgtttttcagcgtaacagtgcagcaactcgtagtttgtagctcgtaactcgtaactatctaatatgcgtgtcctccatctttcatttccttttcactaatcttatgtatatcaatacttctccaagcatagaagatatacgcaagaacaaacggaaccaggaaggaaacatagaacattaccctcagcgtaaactggctggagcaactgtttgccaacgtcagtgaactctgtaaatcattggtagaaggataataagccgtattattatatcctgcaaccagcaacaatgcaagtaccgccagcaccgtacctatgcccgtaaaccagatacctttatcaaactttgtcttcaacaaactctttcctataccgaacagcaccagcaccactcctatcagaaacagcaccagtaccagcggcatttcgataaagttcgtcagatacttatacggttccataaagacttcacccgtctccggattcaccgcatatccatctgccaacagcgtgcggataacaaacgacaggaagaacaccaggaacagcacggaattacctatcaacgaacgtcggctacgcgccaccagatccttatcatcaatattattaataaagtaaagagctcccagaatacgagccaggaagaacactgccaacccaagcactacattccacgggttagccaacgcatccagaccatgccagccatttgcccaatgactgataaccggcatcaccgtattcgtcatattccccttatcgatataaaactccgaaccggtaaaaaacgtagccaccgcaccgcccagcagcaccggacctactactccattaatcaccaggaatgtacggtatgtattctttcccagcagatttcccgccttgctctggaactcatagctgacagcctgcaacacaaagctgaacagaataatcatccaaagccagtacgcaccaccaaaacttgtactataaaacaatgggaaagatgcaaagaacgcaccaccaaacgttaccagcgtagtgaacgtaaactcccacttccgcccggtagagttaatcatcattttcctgtgctcttccgtcttgcccaggcagaaaataagcgaattaccaccctgcacaaacagcaggaatacaagaagggctcccagcaatgataccacgaaccaccaatattgttgtagaaaaacgtaggtcataagatttacgatttataatttatgatttataatttatgggggatgatttatgatttatagagaatagaatatgatttataccacgccataattccgcatggtataaatcttaaatcataaatcttataaatcttctccttccggtcctttctttatcgctttcagcaagataccgatttcggctatcagcatgacggtaaacaatacaaggaagatgaagaatgttgtctgcacggagccgacatccaactttgagatagctgcatttacaggcagcatatcctgtatggcccatggctgacgtccacattcggcaaccacccatccggcttgtccggccagataacccaacggaatagtcagcagagctacccagtgcatccatttcatttttgacaaatcccgcttgtatgccaggaacaatacaactataaagaatagtataaagtatccgcccaacatcaccatcacacgaaatgcatagaatgtcagtggcacattaggaaccagttcatttacatccttaatatatccataaccaaaataagctacattttccttcaacaccttggcagcttccacagcttcggcatcgttatccgcagcctgtgcggcacgataagctgccagcgcaccaatcgctgttttcccgcgttctatcttctcctcggcagaaagtgcctgcgttccgtctttcaactgataaccaccctcaataaggtccgtgataccgggcacgaatccatccaacttcctttccgccagcaatgaaagcatctttggtatctctattctgaacaggaaaggatcctgtccgtcattataagtctttttttcaggattcaacataccgatggcaaccaatccggccccctgctgcccctcataatatccttccatggcagccagcttcatcggctgcgtctgtgccacctgatagcccgaaccgtctcccgtccatgcagagagcagggccgaaaccaaacctacccaggcagctatctttatgctggacaatgcgaacttcttattccgcttcttcagcagaaaccagcacgctacacctaccacaaacacggcacccagcacccagccggacaacaccgtatggaaaaacttattcaccgccgtaggcgacaaagccactgcccaaaagtccaccatctcatttctcacagtatccggattgaactccatccccaccggattttgcatccatgcatttgccacaagtatccaccaggccgaaatcgtagcaccaagtcccgtcagccaggtagatgccaggtggaacttcttgctcaccttgtcccagccaaagaacatgactgcgatgaaagtagcctccataaagaaggccagaatgccttcgatagcaagcggcgccccgaagatatcgcccacaaaccagctgtaattgctccagttggttccgaactcaaactccagaatcagtcccgtcgccacgcctatggcaaagttgataccgaatagtttcatccaaaacttggcggtgcgtttccaaaactcatcacccgtacgataatacatagtctccatgatacccatgatgactgccagccctagcgtgagcggcacaaaaatccaatgataaatagcggtcagtgcaaattgtgccctcgaccagtcaatcagagaagtgtcgatgtgttcaagcataagaaatcgagttatagttattaattgttagttgctttactcagaagttaaaggagttattgctttactcaaggcggatcaccaatagcacgatggatgagttccctgcccacatactcttctttatctccgcctacggccggcgtattcagataattgggaaagaagaaaaggcgcaatatgaagaacatgatgaagagtttcaccagaataatgaaccataaagttctcccaagtgtcatacctcggaaaccatcgacgtaaaaacgccagattttcaggactgtattcttcataatagaaaatttataatcattacaaatataaaacttttatatattaaataacaaataaaagggcaaaaagttagtcatcgacacaaaaaagcattccgacgacgaaaaattcagaactgtctatctcttttgcggggcattttccgacaccgtatcttcgcaagcgttaaacaatatagcataacgaagatatgagaaacgtaagaagattgacagtgataacactctgcgtagcaagcgcctgtgtcggcagcacgacactgcgggcacaggacgccgctcccattgcatcgcaagagttaacggcatccgatgccgctcccaaagctgatactgcacttcccgctcagtgggatttgcagacttgcatcgactatgccttgcaacacaacatcaccctgaagcgtaaccgtatcagtgcggaaagcgcagaagtagatgtaaaaacggccaaggctgctctttttcccagcctctcggcaagtatcagccagcgcattgtgaaccgcccgaacagtgaaagcggtaccatcatcagtggcgacaacatcaccagcagtagcagtaagacctcgtacaacggcagttatggcattgatgccaactggaccctttacaacggtagcaaacgtctgaacaccatcaagcaacagcaactgaacaatcgcatcgccgaactcaacgttgccgagagtgaaaattctatcgaggaaagcattgcacagatatatgtgcagatactctatgctgccgaagctgtgaaagtgaacgaaaatacacttgccgtcagccaggccgaacgtgaccgcggacagcaattgttggaagccggaagcatcgccaagagtgaccttgcgcaactggatgcacaggtcagcacagataaatatcagttagtgacggcacaagccacccttcaggactacaaactacaactgaaacaactacttgaactggatggtgaaaaggaaatgaacctctatctgccctccctgggagatgagaatgtattgatacccctacccagcaagacggatgtgtatcaagccgcccttactttccgcccggagatagagtcgggcaaactgaatgttaaggcatccgaccttgacatcagcatcgctaaagcgggatatattccgacattaagcctcagcgcaggtatcggtacaacgaatgccaatggcaacgatttttccttctccgaacaggtaaagaataattggaacaactcactgggactgaccgtaagcatccccatcttcaccaaccgtcagaccaagagtgccgtgcaaaaggcccgtctgcaaaagcagaccagtgaactggacttgcaggatcagcagaaaactttatacaagaccatagaaagcctctggctggatgccaacagtgcacagcagcaatatgttgccgctgccgagaaactgcgcagtacgcaaaccagttacgatctgattcaggaacaattcaacctgggcatgaagaataccgtggaactgctgactgagaagaataatctgctcaacgcacagcaggaaacactgcaagccaagtacatggcaatactaaatgcacagttgctccgcttctaccagggcgaaggtatacagttgtaaccgcatgacgtaaacaagcctgtatgtcagcataattcagatatataatatatcattcaacgagataagaaataaacgagataagaaatataaggtatgagtaaaaagaaaattatcagcttagcggtcggagtcattattgtagccggcatagctatttgggcatttggcggacaagccaaaaagcggaaagtggtatatgagacggccaccgtagaccgcgccaacatctccaattcagtgacggccacaggcactatcgaaccggtgaccgaagtggaagtaggtacacaggtcagcggtatcatcgatagattatacgcagactataactcagtagtaaccaaggggcagctcattgccgaaatggacaaagtaaccctgcaaagcgaattagcatcgcaaaaggctacttacgacggtgccaaagccgaatatgaatatcaacagaaaaattacgagcgtaacaaaggattgcatgagaaacaactcatcagtgatacggattacgagcaaagtctttataactaccagaaagcaaagagcgccttcgacagcagtaaagcctctctggccaaagcagagcgtaatctgtcctatgcaaccatcacctctcctatcgacggcgttgttatcagccgcgacgtggaagaaggacagacagtagcttccggttttgaaaccccgaccctcttcaccatcgctgccgacctgacacagatgcaggtagtagctgacgtggatgaagccgatataggcgatgtggaagaaggacagcgtgtaagtttcacggtagacgcttatccgaatgatgtgttcgaaggaaaagtgacacagattcgcctgggagccacaagcagttcaagcagtaccactaccaccactacggtagttacatatgaagtagtcatttccgcccacaatccggacttgaaactgaaaccgaggctgacggcaaacatcactatctacactctggataaacaaggagtactgagcgttccggcaaaagcgctgcgctttacgcctgccgttccactggtaggatcgaatgcagtggttaaagattgcgaaggtgaacataaagtctggactcgtgaaggtgacacattcactgcacatccggtcagcataggtatctctaacggaattgtcaccgaaattacaggcggtatcaacgaaggcacacaaatagtatccgatgcggtgattagcacaggtgccgaaaccgctgtagcagaaggccagggagacggcgaaagaagtcctttcatgccgggccctccgggaaacaacaagaaaaagaatagtaaataaccagcgtagcgctggagcaaagtttcctttcggcatgcaagtaatttttcatttattcaacgaaacaattccgaaacaatgagcaaaacagttatagaattacaaaatattcggcgcgactttcaggtgggcgatgaaacggtccatgccctgcgtggcgtctccttctccatcaccgaaggagagttcgtgaccatcatgggtacgtccggctccggtaagtcaacgctgttgaataccctgggctgcctagatactcccaccagcggcgaatacctgctggatggcatatccgtacgcaccatgagcaaacctcaacgagccatcctgcggaaccggaagatcggctttgtttttcagaattacaacctgttggcaaagaccactgccgtagagaatgtagagttacccttgatgtacaacgcttccgtctcagcagccgaacgtaagcaacgcgccatccaagccctgcaagcagtgggactgggtaatcgtctggaacataaatcgaaccagatgtccggcggacagatgcagcgtgtagccatcgcccgagccctggtgaacaaccctgcggtaatccttgccgatgaagcaacaggtaatctggatacacgtacttcttttgagatattggttctcttccagaaactgcatgccgaaggacgtacgattatatttgtcacccacaaccccgaaatagctcagtacagtagccggaatatccgtctacgcgacgggcatgtgacggaagatacggtgaacccgaaaatcctctcagcggcagaagctctggcagcgctgccaaagagtgatgaagactaataaatataaattatgaacggaacaaaccttttcaaaatagccctccgcgcccttgccaacaataagcttcgcgccttcctcaccatgttgggtatcatcatcggtgtggcatccgtcatcaccatgctcgccatcgggcaaggctcgaagaaaagtattcaggcacagatcgcggaaatgggttcgaatatgattatgattcatccgggcggtgatatgcgtggcggtgtccgtcaggatgcctcgtccatgcagactctgaagctgactgattatgaagccctgcgggatgaaaccaacttcctggcagccgtcagccccaatgtatcgtccagcggacagctcatcgcaggaaacaacaactatcctgcctctgtaaatggtgtaggtaccgaatatctcgaaatccgccagttaagcgtagagagtggcgagatgtttaccgaagcggacattcagagtgccgccaaagtctgcatcatcggtaagaccattgtggacaatcttttcccggacggacaggaccctatcggacatatcatccgtttcaaccaggtacccctacgtgtagtgggtgtacttaaagccaaaggctataactccatgggtatggaccaggacgaaatcgtactggcaccttataccacggtaatgaaacgtatgcttgccgtcacatacctgcaaggtgtcttcgcctctgccctctctgaggatatgacggattatgcaacggatgaaatcaccaccatcctgcgccgcaaccataagctgaaagagagtgatgacgacgacttcaccattcgcagccaacaggaactcagcaccatgctgaactccactaccgacctgatgacaacactcctggcatgtatcgccggtatctcgctggtagtaggtggtatcggtatcatgaacatcatgtacgtcagcgtgacggagcgtacccgtgaaatcggtttgcgtatgtctgtcggtgcccgtggggtggatattctctcacaattcctaatcgaggccatccttatcagtattacaggtggtatcatcggagtcgtcattggctgcggagcctcattcatcgtaaagaacgtagcccactggcctatctacatccaggcatggagtgtattcctctccttcgccgtttgtacggtcaccggtgtgttcttcggctggtatccggctaagaaggcagcggatctggacccgatagaggcaataagatacgaataaaagtgattagcggttagtgattagtggttagttgggaattccaatacgctacacagcaattaatcactaatcactaaacgttaatcactaaaattaattatttttgtaacatgattatgcaagactcccaaactcgccggattgtagaagttctcatccatatcatcggatggggaatcgttttcgctttcccatttctgctgatgaatcgtagcggatttacggtaagctgggtagactatttacgtcatggcagtgcggttccggtatcattcctgatcgtgttctacataaactactgtttcttcatcccccgtttcttatttgagggacgcatcaagcaatatgtattactgaatctcctgctcatactttgcacagctgtcggcgtacacttttggcaagatttcatcttccatacgtatgtgaaacccgaagctcacaaacgccccggacctcccagttggatcttcatcctgcgagatgtcttctcaatggttctcaccgtaggactggccgctgccatccgtatgagtggccgttgggtaaaagtagaagccgcacgccgggaagccgagaaaagccgcacggaagcggaactgaaaaacctgcgtaatcaactgaacccgcacttcctactcaacaccctgaacaacatctatgctcttatcgccttcgacagcgataaagcacaagccgccgttcaggaattaagtcgcctgctgcgtcacgttctctacgacaatcaacagaattttgtctctcttggcaaagagatggatttcatccgcaactacattgaattgatgcgcattcgcctctccgcaaacgtaactgtagagacacaaatagatgttcgtgccgatagtcgtacggaaatagccccgctcattttcatctccctcatagagaatgccttcaaacatggcatctctcccaccgagcccagttttatccacatccatttcagtgaaagccccggtcgggtatgctgcgaaataaccaacagctaccaccccaaaagccagactgataaaagtggaagtggcataggactggagcaagtgcggaaacgcctggaattaacttatcccggccaatatgaatggacccaaggagtaagcgacgatgggaaagaatataaatcaatcttatcactctttaacattcaacattatgaatctaacttgtgccatagtagatgacgaacctttagctttagatttactggaaagctacgtcaacaaaactccgttcctgacattgaagggaaagtattccagtgccgtacaggctatgaaggaactgccggataagcaagtggatttgcttttccttgatatacagatgcccgaacttaacggtttggaattttccaaaatggtagatacacatacccgcattgtctttagtaccgcttttgaacaatacgccattgatggttataaagtaaatgctttggattatctgctaaaacctatttcttacgtggattttttgcaggcagctaataaagccgtacaatggtttgaactcttacaacagcctaaagaagaaatagaaagtatatttgtaaaaagtgactataagctggtacaaatagaacttaaaaagatactttatgtagaaggtttgaaggattatgttaaaatttatacagaagataccgcccgacctattttatcgcttatgagtatgaaatcaatggaggaattattaccaacatcccgtttcatgcgggttcacagatcttatattgtacagaaagaaaaaataagagttattgatcggggacggattgtgtttgataaaacgtatatccctgtcagcgatagttataaacaggtatttcaaactttcctggataaaaggagctaggaaataacattcatttgtcgataaaatatccgaatctgtcgacaaaacataatttcctattgcatattaaaaaatgtttttttacctttgcatcgaacagataaaggaagttgtgaaacttcccccaatagaatagtttagttaagtctagtttagtttttgtgtgaagcacttcctccgtaagcgaacgataggaagtgctttttgttttattgattttcaag

SEQ ID NO: 6375 - DNA, 736 bp, Unknown
  gut microbiota DNA sequence
acagacaggaagcgaaacgcgcctcgacctcgacagctacacctttacggcagaagccggcttctgcaccaaccgcttcgaactgcatctgactacccgtaccattaccggagtagaagaagtccagaatacgaatgtcgcccaagtgacggcaggaaccggacaaatcttaatatctgcgcaaccgggagatgtgatgaggatctgcaatgtcaccggacaagtcattgagcgtcggatattgacagagtcatcaatctcgctccccgtcgcaccgggcttctacatcgtaaccatcggtaaagagacatttaaaattatggtaaccaaataaaaacagaacatccatgaaatatatactcagcctattcattgctctctggagcatcgcggcgtggggacaagaaggaggggatgggtttaacccctccaaccccggcgaaccgggccagagatacaatctgacggtcaacgtcacccccgacggggcaggcagtacctcaccttcggggaaacagcaatacgctttgggagaatctgtttacctcagcgccaatgccaacaactattaccagtttgtcggttgggcacaggacggagatacgatttcccgcagccgttctttcaattataccatgccggcaaaaaatactaccataaccgccgtgttcaaggctacagacagcttcaatcccgacaatcccgacgatccgtcgcaggaagtcattaagtataa

SEQ ID NO: 6376 - DNA, 50775 bp, Unknown
  gut microbiota DNA sequence
ggtttgtctttgtttgcacagacagataaacctaatatcgtagtgataatgacggaccagcaacgtgccgatttgtgtggacgtgaaggttttcccatggatattactccatttgtcgatgaattggcacatcagaacgcttggttcgataaagcgtatacggttatgccggccagtactcctgcacgttgttccatgtttaccggccgttttccaactgcaactcatgtacgtaccaatcacaatgtgcgtgacattaattatgcgaaagacttggtaaccgttctgaaggagaatcattataaaacagctttagtaggtaagaatcatgcttatctgaactcaaaggatatggatttctggtctgaatattctcactgggggaagaataagccggtgacggaaggagagcgtgctatttccaaattctttaaagaggcagtcgggcagtatctggaaccttcgcctatacctttgaaagatcagcaacctacgagaattgtggatgaggctatagaatggatagatagccagaaggacaatccgttctttgtatgggtttcattccctgaaccgcataatccgtatcaggtttgtgaaccttattattcaatgtttgcaccggataagattccggctgtgaagacttcacgtaaggatgtattgaagaagggagaaaagtatcagattctggcggaactggaagacgcttcttgtcctgatcttgaaagagacctacctcggttgcgtggaaattatatggggatgattcgtctcattgatgatcagatcaaacgcttggttgaggagctgaaggaaaagggactattcgagaaaactatcatcgttgttctgtccgatcatggagattattgcggtgaatacggactaattcgtaagggagtaggcttgtctgagtctctaaccagaataccgatggtttgggcaggctatcagataaagaagcagcctaaagctatagatgcgcatgtttcgttggccgatcttttccctactttctgcactgcgataggtgattcaataccggtaggtgttcagggacggagtttgtggcctatgttgacgggtaaagaatatccgaaagaagagttttcaagcgttgttgtacagttaggttttggcggagaagatgttcctttggacgatagcttgacttttgagcaggaaggtgcgctgggacccaataaggtggctcattttgacgaattgaatacatggactcaaagtggaacctcccgaatggtacgtatgggtgactggaaactgattatgaatagttatggaaaaggggaactgtacaatttgaagaaagatccgtatgaaattaataatttatttggaaatcccaagttgatagataagcagagcgagttgctgacaaaattgttggcctgggaattgcgtttgcaggacccgttgccattaccaagacatcgttatcattttaagcggaacccttataactatcattttactgactaatgaagcatgtattcaggttgtgtcaatagagtattatcgaaatagaagtgtatgaaaaagaatttatttcttgtctgtttgtttatgtttggaacattggcatcttgccaatgttcctctaaaaagagtgctgacaatgctgttgtcaataccactgaaacacctgtgcctttgggtgatccgttcattttgctgcacgatggagtatactatgcctatggtacgcattcgaataaaggaattgaattttatacctccgatgacttgctgacctggaagtatggagggttggcattgaataaggaagattcctgggcggaccgttggttctgggctcctgagatttattttgtaaatgggaaattctatatgtattattcggcagatgaacatatctgtgtagcggttgcggactctcccacgggaccgtttgttcaggataagaaggagccgatgattgctgatgagaagtgtattgacaattctctgtttatagatgataacggtacgccttatttatcctttgtacgtttcaatgacggtaacaacatttggatagcagagttggaaaaggatttgattactatcaagaaagagacaatgcatccttgcctccatgtaactcaggaatgggagaaagtctggcctcgcgtgaatgaaggttcctatattcttaagcataatggaatttattatatgtcttattctgctaacagttatgaaagtccattttatggtgtaggctgtgctacggctactgatctgatgggtacatggacgaagtatgatgaaaaccctttattgcaaaagcccggtaagctggttggagtggggcatagtgctatgtttacggataaagccggcaagcttcgcatagtctatcatgctcataaagataaggataacattcatccgcgtgccatgtacatcggagaagtttcgtttgaaaatgtcggtggagtggaccgcatgagaattagtgaagagtatataacccctaaacttgtgaaatgacgcttgttttgagtcacagaacttcgatgaaaagggctatttttatcgaagttctgttataaaccgttgtttgattgattttcttgaatcttaaagggacgatatttctatttattgaaatgtttcttttattgtttatcgtcaaattgggctatatttgacgtatgaatctataaaaagcacgaaaatgaagaaaagaataatagcccttattagttttctttgctatattatttgctgggcacaagcagcagatgaacattactatttcaaaaatctcagcattcaggatgggttatcccagactacagtcaatgctattatacaggacaagaagggatttatgtggtttggtaccaagggtggactgagccgatacgatgggatgtcattccggaactttaaacgtgatatgactgataatcatagtttgggaaacaatttcgtgacttgtctttatcaggacaataaagggaatatctgggttggtacagatgccggggtgtatatttattattctgaccaggagatttttattccatttgaccgtctgagtggggagaatacaaagatagaacggactgtttccgctatttcgggagataaacagggccgggtatggatagcggtcgaaacacagggactcttctgttatgagccgcaaaaaggccaacttcataattatacattgaatgagttctcagccaatgtacagagcgttgcttttgataatagtggaacaatctgggtaggattttatggcaatggcctgttctattccaaggataatttaaaaacgcttcacccttatctttccccgaaggatagtgatgaggtttttaaggatgatgttatcatgaagatagttccgggagcatataattgtatctatataagttccataagaaagggagtgcaggagttgaatctgacttccggtaacctgagaaatttgctgttgatggatgaaaccggtgaaatggtatatagccgtgacctgttggtaaattcggataatgaactgtggataggagctgaatcgggagtttatatctacaatcttcgtacggacaagtatgtgcatctgcatagttctaaggatgatccttattcgttgtccgataatgccgtttattcgttgtgcgaggatcgtgaaagtggcatctgggtaggttcatattttgggggagtagattattatccgaaatcctatacttattttgagaagtattatccgaaagatggggacaataatttgcaaggcaaacgggttcgtgagttttgtcaggataataagggcatattatggattggcaccgaagatggtggtttgaaccgttttgatccgagcactaagaccttctcattctttgcacccagttccgggtttacgaatattcatgggctttgtatggtgggtgataagttgtgggttggaactttctctaaaggtttgaaaattgtagatactaataccggtaatatcctgaaaacctaccagaaaaatggttctccacgttcattaattgataacagcatctttgctatttgcagaacaacgactggtgatatttatttgggaacgatgttcggtctgttaaaatacaatggacaaacggatgactttgaaaggattacagaactggccggcagatttgtatatgatataaaggaggattcgggcggtaacttgtggctggcaacctatgcgaatggcgcttattgctataatgtgaatgaaaagagatggaaaaactatgtgcacaatgagggtaatcaagagagccttccttatgataaggttttgagtatttttgaagactcccatcgccagatctggctgactacgcaaggaggtggtttctgtctgtttcatcctgaaacggagacttttaccagctataattcatccaacggattgcctaatgatgtcgtttaccagattgtagaagacgcggagggtctgttctggttgactacgaatagtgggttggtacgttttaatcctgtaactaaacaggtgaagggatatactacggccaatggattgcttggtgatcaatttaactaccgttccagctataaggatgaagccggtaacatttatctgggtagtattgatggctttattgtatttaatcctaagacatttacagagaataagaacctgccgccggtggtgattaccgattttatgctgtttaataaagaagttcgtgctgatgaagagaatactcctcttgataagagcattactttctcggacagcattacccttcaggctaatcagaactcattttccttccgtattgcagccttgggttatcaggtgccgaaaatgaataaattgatgtacagattggatggctttgataaggactggataactgtgggggaaagccctattgtgacttattccaatctgtggcatggtgattatcagtttcgtgtgaaagcgtccaatagtgatggtatttggggacccgaagaacagttgttatatatccatatccgtcctcctttttatctttccatctgggcttattgcatttatttattgttgtttattgtttgctttgtatatactttctggtatttcaagcaacgtagcagcaggcagcaccgccgccagcttgagaagttcgaacaggagaaagaacgtgagatttataatgccaagatagatttctttacgaacgtagcacatgaaatccgcactccgctgacattgataaaaggacctttggagaatatcattctgaaaaagcatctggacccggaaactcatgaagatctgaacatcatgcagcataatacggaaaggttgctgaacctgacgaatcaacttctggatttcaggaaggtagagagtcagggatacagtttgaactttaccaaatgtgatattactaatgttttgagagagacttatatgagatttagttccctttcgcgccagaaaggtctcgactttacattggagttgccggatgaaaacttctgtgcgcatgtcaaccgtgaagcttttacgaagattataagtaatcttttaaataatgggatgaagtatgctgatagttatatgcatataaagctggaagtagatcaggaaaagcaggctttctatgtggtgactaagaacgacggagtaatcattcctgatgagatgaaagaggaaatctttcagccttttgtccgttttagccagaaggaagagggaaaggttactacaggtgcgggtatcggtttggctctttcccgttcgttggcagagctccatcgtggcactttggtcatggttcagggagaagaagcgaacattttccgcttgacacttcctatcacccaggatatggtcatagctctggattctgatgtagagaataaagatgcagagttgcaagcggaaacatccggtgaatcctatccggatgataaattggaagggaaacattcgaaagaaagcaaacatatggttttggttgtagaagacaatccggaaatgctcgctttcatcgaacgtcagttatcgtctcaatatgctgtaatcactgctaccaatggtaaagaggctttggaagctttggatagtaatttcgtaaatctggtggtgagtgatgtcgttatgccgttgatggatggttttgaactttgcaagactataaaatcgaatgtaggttatagccatattcctattatacttttaactgcaaagacaaatatccagtctaagattgaaggaatggaactgggagcggactcttatattgaaaagcctttttcaccggaatatctcctggctgtggtttctaatctgataaataaccgggagaaacttcgcagggattttgctaaatctccttttgttgcggtcaatacaatggcattgaccaaggctgatgaagaatttatcaagaagctgaacgaaataattctttctaacctgtcaaaccaggaattcagtatggatgatatggcagagagcctgaatatgagccgttccagtttctatcgtaagatgaagggagtattagacttgagtcccaatgagtatttacgcatagaacgtttgaagcgtgccgcccaattattgaaagaaggtgagagccgtatcaatgaaatctgttatatggtcgggttcaattcttcttcttatttctctaaatgcttcctgaagcaattcggggtacttccgaaggattttgccggctaaagggaggcatccggaatttccggtgtatgagttaaatcatcggcattggaagtcttgaacgtctttcttttttctgttcgttttgcatctatatgtcggtggcgttggatatatagatacaacgtattggatatatagatgcaacacattggatatatagatgcaatacgtccgatatatagatgctgcacgttctgtctatacaactgattgccgggaaagtttaaactcatgtaccgaatgttccggacgctccggctaaagtaagtaagaagcaacttgtgcaaagaaatgggatttttcagtaagctcaggatgacggagtgaacaaattcattgatgactgatatttagtggctttatttggaataaaattgtggcttttatgcgattttgagatgttttttctatttattggaatgcttatttcgtattgagaagatactgtgcgctatctttgtaaccgtctcataagagattataccatgataacaattatgtgtttcttaatgtctaataaataaagaattaaccttatgtgtaagaagtcgttattattgctgtttttacttccttttcagttcgtattcgctcaaacaagtttattgaccgattttcccgagggatatacccctaaagaagtcggtaaacgtcttgcatatcattttgtagatggaaagcatatgcttcatattggaaagtggattagttatccggagacttttacctggaatggagggctaaagtttgctgcacttaccaatgatcaagagcttgtgaagcttttgcagaacagatttgagcttctgttcacaacagaaaaggccttattgcctatcatgaatcatgtggatgtaaatatgttcggtagcttgcctttggaactgtataagattacaaaggatcaacgctatctggatctgggccttccttatgccgatactcaatggcaactccctgcaaacgccaaaccgaaagaaagagaatgggaccagaaaggttattcctggcagacccgtttgtggattgacgatatgtacatgattactattgtgcagactcaggcttacagagttaccggtgatcgtaaatatatagaccgtgctgcaagagagatggtgatgtatctggacgaactgcaatgtccgaatggtcttttctatcatgctccggatgttcctttctattggggaagaggtaatggatggatggctgccggtatggctgaattgttgagcagcttgcccgaagacagtgaatatcgtccacgtattctgcacggttaccgtaccatgatgaaaagcctgaagaaatatcagtcttcaaacggtttgtggcatcagttgctggatcatcccgattgttggctcgaaacttcaggatctgccatgtttacctttgctttcattaaaggagtgaagaatggctggttggatgccaaggaatatgcacccgctgcccgcaaagcatggatggctatggtgaaatacatagatgaaaatgataatgtgaaatctgtttgcgaaggtaccaataagaagaacgacaaacagtattactatgatcgcaaacaaaatgtaggtgattatcatggacaagctccttacctctggtgtgccgttgcacttctggaggaataagatagcattactttaataatctcatatcgaaaatctatttatacttataagatgaacataagcagttgggtgaaggcccttacctttgttgtactgttgttttcctattcgacagtagtaaccggacaaaccaaagtaaatgatgtcagagactctgaacgcctctggctcgactcggaaattacccataatggagactatcagtggaaaatgataaaggcaggagatgtagcagatcctggagaaaaggtttcattgtcagattacccgaccgcgaactggttgcctgccattgtgcccggtacagttctgaattcattggtacataaccggaaatatccggaaccttattacggaatcaacaataagatcgaatccaaattaataccggatatctctgaaaccggtcgtgacttttatacctactggttccggactgaatttacagttcccaaatcatttgaaggaaaacatgtctggttgcaagtggatggtatcaactatcgtgccgaagtatgggtgaatggaaacctgctcagtactattaaaggtatgtttatgcaggattatattgacgtgactgactttgtgaagatagataaggctaacgcattggctataaaagtatatccggttgatgtccccggcagtgccaaacccaagtcctggggtgcagtgggtgagttccacaatggtgggaacggaaatatcggattgaacactactatgctgatgaccgtaggctgggattttactttcatggatggtatccgtgaccgtaatacggggatctggaaaaacatctctctctatgctaccggtaaagtggcgttacgtcatccttttgtgaaatccgaattgcgtaaacctggttatgaccaggcacgtgagttcatttctgtggaagttgtaaatcctactaccggatttagcggaattaattgtacggtaagaggtgagattacaggtgaaaatataactttcgagaaaaagcttaaagttttgcgtggagaagagaaaatcttgtctttttctccggatgaatttcctcaattagtgattaactctcctcgtttgtggtggcctgtgaacaaaggtcctcaaaacctgtatgagttgaaaatgaccgtatccatcgatggagtagtttgcgactcggttaaaacaaaattcggtattcgtgagattacttccgatacgaatgcgcctgataagtcacgtgtcttttatgtcaatggcaagcgtctctttattcgtggaacgaactggataccggaagctatgttgagaacttctgacgagcgtacgtatgccgaactgcgatatagccgtcagtcgggtgtcaatcttttacgcatgtggggaggtggcattgccgaatccgattatttcttccagttgtgtgatgagatgggactgctggtatggcaggaattctggatgacgggtgatacacgccatccgaacgataagggcaattatctggataatgtggcatctactgtgaaacgtatccgcaatcatccttctctggcttattatgtagcctctaatgaaagtaccgaggttacaggtacccctgaattattgaacaaactggacggtacgcgaggatatcagatgcagtcagaatgtgccggagtgcatgatggaagtccgtataagcaggtgaatccgatgcagcattatgaaaatacggcatctccacgtggaagccgtgtcgatggtttcaatccggagtatggtgcgcctacacttcccacagtggagattcttcgtgagatgatggacgaaaaagacctctggcctatcaataaagaggtgtgggattacctggatggaaatggtttccacttgatgactaccatgtatactgatttggtgaacaactatggaaagtcatcctctattgatgagtttgctcagaaaggacaactgttgggtgccattaactcaaagagtatctgggaagtgtggaattacaataagttggattatggtgatcgcttctgttccggactcttgttttggtatcataactgctccatgcgtcaggtatcttcccgtatgtgggattggtctttggaacccactgcttctttgtaccatacagccaattcattggagccactacatgcccagttcgattatctgaagaatacagtatctgtggtgaacgattattatcgctcttttaataattacaaagtgatagcacgggtatatgatatcaatagccggaaggtatatgaagaatctgcttccgtgaatcttccggaagatggagtagccaatgatgtactgaccatccgttttcctgaaaacatctctcaggttcactttatcaagctggtgctgaaagatgagaagggtaaagacgtttcttccaacttctattggagatcaaatgataagtatgaaggcagtaagactctgaccggtcctgcatcttcaggatttgaagacttgaataagctgaaagcggctaatgtgaagctctcctataaagcgcgtcaggcagacggtcgctatttcgtagacattacattgaagaatacctccggtggtatcgctttctttaatcagttgcaattcctcaattccaaaatgagtccgatacgcccgtcgttctattcggataactttttctctctggttccgggtgaaaagaaaactgtcaccattgaaacggcggaagaaaagttgactgagggagctgttctggtattgaagggttggaatgtaactactcagaagtataaactcaaataaaaaaataacgtgaagagattccatattcttactgttctgttgttgctcagctgggggatatccgctcaaaatcattttgatattgtggtggtaggcggtaatcccggtggcataatggcggcgattgcagcggccaggcaaggcaagacctcggttatattggaacgtagtcaacatattggaggacttccggccaacggactgggagctactgatattgctacccgggaggcaactaccggtctgttcatggagtttacttccagaatcaagcaatattatacagaacggtatggaaagaactctcagcagctgaaggattgcagtgacggctttcatttcgaaccgtctgttgcagcctctatctatcaggatatgctgaacgaacataaggataagattaccgtgcttcttatgcggcagttcgatgctgaagatcagaatatcactctcagaaacgggcgcattgaaagcatctgtatactgaatcgtgagaatggagagaaagaactttatcagggtgacatctttgtggatgccacttatgaaggtgatctgggtgctgcggcaggtgtgcctttccgcgtaggcagggaaagtaaagccgaattcggagaacccggagcaggaagaacctatgaatactggaaaagtctgcccgccaatggtagcacaggagagtctgataatgcagtccaggcatataactatcgcctttgcctgactaatgatcctgataatcgtgtcctctttccgaagccggcatcgtataacaggaacgaatatgtctcactgattgaagatgtatggaccggaaagaatactcaacgggccatgctgaaggtaactgatgaaatgatggaagaaaaccgtcgtcatatcgctggcggtaaccagactaaacttccaggagacagttggggaatcagaaaactgagcagtatcgtgaaactgcctaatcagaagacagatggcaataatcagcatgctgcatttatctctactgatctgccggaagagaactggccttggcctacttcttcctgggagtggagagataagtttgccaaacgtctgaaagattatacattgggtttattctggtttgcccagaatgatccggaattgccggagcatttccgtaaagcaatgctagaatggggattggctaaagatgaatatcaggataatgaatattttccccgccaggtctatgtacgtgaaggaagacgctttgaaggagtttacttctttactgctaaggatgctttacccactgcaccgggcaaacgcccgcctttgcatggcagtagcgtgacagccagccattatgcactcgattcgcatgctgccagaaagcgggaagccggaagagtacatttggatggattcatcagctatcctacagcagtgtatacggtgcccttgggtgtgattctaccccggaatgtagataatctgctattacctgtacctgtatccggttcgcatatcggattctccacattgcgtatggagccatgttggatggcattggggcaggcggcaggtatcactgcttcactggctattgaccgtaaagttgctgttcaggatgtggatatgtccatattgcaggatttgctgatcgaccagaaagcaacgctgatttactttcgtgacttgcgtccggaaaatacaggtttccatttggctcaatatatgggattgagagggtatttgcccggatgggatgcggatttgcaaggaacggttgatgaaaagacgttgcaggactggagtacattatgtgggtttaagccccgggctgttcccggaaaaacaacccgattggaagtattgaccgagatttataaacatattcgtcaataaaacgataattttaaccatgcgaaacatagatattaagatgaagctaaaactcatagtcggtttgataggagtgctgtcattgagtagtttttctactctgccttcttcagatgataccgataagaaagaacaggagaactgggtaattggcccatttcatcgtcctgaaggtgtcaatcctgtactcactccacagcctacctctttctattgtccgatgcgcaaggaacaggtgaagtgggaggaaagtgatattttcaatcctgctgccaccgtgaaagatggaaggattgtcgtgctctatcgtgctgaagataactcggcacaaggcatcgggaagagaacttcccgtatcgggtatgctgaaagcgtggatggagtaactatgaagagattcgacagtccggtacttttccccggtggagatgattttgagagtatagagtgtccgggtggttgcgaagatccgcgagtggcaatgaccgaagacggattatacgtgatgctttatacggcgtggaaccggaagaccccccgtcttgcggtggctacctccagagacttgaagaactggaccaagcacggtcttgcttttgaaaaagcgtatgacgggcgtttcgccagaattgctaccaagtcagcctccatgcttaccaaggtgaaaggtgggaaactggttatcgataaagtagatggtaagtatttcatgtattggggagaatatgctgtgcatgcagctacttccgacaatcttacagactggtatcctgtgctggatgagaacaacgagttgttgaaaatagccaggccgcgtaacggatacttcgacagccagatgactgaatgtggtcctcctgctattcgtaccaaacaaggcatcgtattgatgtataatggtaagaatgataaaaagagaggcgatgcaaattatccggcaggtgcttactgcgctggtcagctcctgtttgattccaaagatccttataaagtattgggccgtttagacaagcctttcttcatgcctgaagcttcttttgagaagagcgggcagtataaggacggaaccgtgtttatcgaaggattggcctattataagaagaagctatatctttattacggctgtgcagactccaaagtggcggtagccgtgtgcgacgacaccaagaaactattgaaagtgaagtaatatcaacggatattccagagaaagtaaattattgtaatgtttaatagatagaattcaaattgttatgtacaagaaagtattcgcattattatttttattatcatctttccagttgctaatcgcccagactagtcttctgaagaattttcccgaagggtatactcccgatgaaatcggcagacgtattgcctaccgttttgtaaccgagaaacatgcattgcatgccggaaaatggattggttatcctgaaaccttctattggaacggttctcttaaatatgcggcggcagccaaagacaaagcgctcatcaagcttctgcaagccagatttgagcatctgtttactaccgaaaaggagttgttgcccatcaagaatcatgtcgatctgaatatgttcggaagtttgcctctggagctttattgggtgacgaaggatgaacgctacaaagaactgggattgccttatgccgatacccaatgggaagttcccgaagatgccaaaccaagtgagaaggaatgggcagagaagggctattcatggcagacacgtctttggattgacgatatgtacatgattaccattgtacagacacatgcctacaaagtgaccaatgatagcaaatatatagatcgtgcagctaaagagatggtgatgtatctggatgaattgcaacgtcccaacggtctcttctatcatgcaccggacgtacctttctattgggggcgcggaaacggatggatggcagcaggtatggcagaattgcttcgttatttgcccaagaagcacaaagaccgtccccgcatcatggaaggctacctgaccatgatgaaaagtctgaaggaatatcagaatccggaaggcctgtggaatcagttgctcgatgatcccgaatgctggactgaaacatcgggttctgccatgtttaccttcgcttttattacgggggtaaagaacggatggctggatgccaaagaatatgctccggcagcccgcaaggcatggatggctttggtgacttaccttaccgaaaagaatcaggtgagagaaatctgcgtaggtaccaataagaagaacgacaagcaatactattatgaccgtccgcgtcgtactggtgattttcatgcgcaaggaccttacctctggtgtgtggtcgccttgatggagaagtaacttataaattatcaataaataaaccatgagtatttttaaatctgttttattaggaggtatgctgctactgagttcttcagtggcactggctcaggtttcgctatcgcaaaatagtagcggatccaacgtatttagtctcgtaggcaagaaggataaagcctgcgtgtactatgacgcacaagattttgaagttgtaaaaacaacggcgggactatttgcgaatgatgtgaaagaggtgagtggacaaattctgggcgttgctactaccaaggaagctcctcagaagaattgtatcattgtcggaaccttgggtcataatgaatggattgaccagatgatttcgaagaagaaactggacgtggaacctttgaaggatcgttgggaaagctatctggtgcaactcgttcgtaatccgcttcctggtgtagacaaggcattggttattgtgggtagcgaccgcagaggtgctgcttatggattgctgtccgtgtcaagaactatcggtgtatctccctggtactggtgggcagatgctcctattgtaaagaaggatcagttacacctgaaagtagataaatatatatctaaagagcctactgtgaagtacagaggcattttcatcaatgatgaagactggggcctctaccgttggtcgaagagaaacttcgagaaagaagtgggtaacttcggtccccggacttacgctaaggtttgcgaactgttactccgcctccaggccaactatttgtgtccggccatgcacgatgcgtctatggcatttcaccgcattcccgagaacagagtggttgcagaccgctttgccatcatcatgggttcttctcattgcgaaccgttattgtttaatacggcaagtgaatggaagcgtgataaaatgggtgagtgggactacatcaataataaaaaaggcgtagacagtgtgctgaatgcacgcgtgaaggaatgtgctccctttgaaaatgtatatacgctggcattacgcggactgcacgacagagccatgaatgcaagcaatgatatgggcgaccggaaagatatgcttcaggaggctctgatggcacaaagacagatgttgattgatgccattggtaaaccgggtgaagagattccccaagcatttactccctataaagaagtgttggatgtatatgacgaagggctggaactaccggatgacgtaacaatcatctggccggatgataactatggttatatgaaacgtctgagcagcccgaaggaacagaagcgttcgggccgttcgggtgtgtactaccattcttcttatcttggtaagcctcacgatcatctttggatgaacacgatttctcctacattgatgtatgaagaacttcgtaaagcgtatgatgcaacggcagatcgcatctggttgctgaatgccggtgatatcaaatcctgtgagttcgctgttgattacttcctgacgatggctttcgatattgattctttcaactttgaaagggcagctaactaccgtaccgaatggctgtgtggtatgttgggcgaccaataccgcaacgaatatcaggatgtggttaattctttctataagctggctttcgcgcgtaaacccgaatttatgggatggggctaccaatggactactgataagcacgggagagaacggaatacggatacggacttttcgcttaccaactatcgtgaggtggataatcgtttgagcgaataccgtcgtattggaagcaccgtagagaagatcctgaacaatatgtcggacgagaaacagaaagcatgcttctaccagacactgtattatccggtgaaagggtgcgagttgttgaacagaatgatactggacggacaaagaaaccgctggtattctattcagcagagagcatcaaccaaagaactggaaaaatcagcgaaagcctgttacgacagtttggaagtaattaccaagggctataactcgttgcttggcggtaagtgggatcatgtaatgacgatgaaacagggatttgccgctgcttattttgaacttccgaaattgagagatgttgaattggctcctactgcttctttaggcgtaatggccgaaggtgaggccgtgttgaaaggtctccagagtttccattcattgccatgtttcaatacttacttgcgccagtcttactatgtagatgtattcaataagggtgctactccgttgaaatggaaagctgctgtaacaaatgactggattttagttagtaagaaatccggagagactgctactgaagagcgtatcgaggtttctatcgactgggcgaaggttcctgccggtgaaagaatacttggaacactggatatcacttctgatcgcggtgagaaggaaagtgtctatatctccgtctttaatcctacttctccttcattggccgaaatggatacgctgtttgttgaaaacaacggatatgtttcgatagatgcggcaagtttccaccgtaaagtggagaatgatgccattaagatgattatgattccgaacctgggatgcgagaatacagctgtacagttgggtaatcctatcgctccggcacaacgtaccgcaggacgtaatacaccgcgcctggaatatgatttctatacgtttgagcagggatcagtagacgtttatacgtatgtgctgcctacattccccatcagcaaggatagaggatatgccggacatgaagcaacaaatgttgaaaccaaatatggtgtatgtatagacgaaggtccggtaatgactccatctacttcttctttcgaatatgcccagatctggtatgaaagcgtattgaagaattgcagaatcaacaagaccactctccatatcgataaaccgggtaagcatacggtgaaaatcatctgtggagatgccggaacagttctgcaaaaggttgtgttggactttggcggtatgaagcgttcctatatgggaccgcaacctaccagaaatgaacaagaggttgctaaataaaagccattgtgaacggtgaatagaattgcttccttgcttgaatagcaggaaattcttaaaaagtattgctatataattgcttaaatggaagatgtaggattcgatagaatcctacatcttttgttttgatacgaatcttctatttattgaatcgtttttaaggtgtcagactgatataattccctatttttgttgtcgttatattacatatagtctaatgttacgtaaagagatatcgaattcagaaaccatttaaaatcaatagtaccatgatgaagaagttgatacttatcctttgcattttgcagggtgtcctgttgtcactgcgagcgcagggtgaacagcagaatattgcttatactgataacaatgtacggtttacggtcatatcggatggaacgctccgtttggagtatgctccggatggaaaatttgtagacgacaagtcttttattgcagtagaccgtttatatccgcaggttgattacaaactgaagacaaggggggcatggattgaaataaccacctccaagatgaaaatgcgttataaaaaagacagtgggcggtttacgaacaataatctgataatcaaagctgtaaagggggcattccccttcacctggaagcctggaatgcaacagaaaggcaatctgaaaggtacatatcgcactcttgatgggatggacggtgatacacagactcaaacttgggtgtctgatacgaagaaaggggataaactgaaactggaagacggcctgttggcaactgatggttggtcgctcattgacgattcccgcggacttttgtttgataatgatccggactgggactgggctaaggaacgccccgctaatgaagggcaagactggtacttcatggcttacggacatgactataagcaggctttgaaagactatactctttttgctggtaagatgccgttgcctccccgttacgcatttggctattggtggtcgcgttattggctgtattctgacaaagagttccgtaatctgattgataattttcatacttatcagatacctttggacgtgttagtggtagatatggactggcattataccgagaaaggtaaggggggctggacaggctggacctggaacagggacttatttccgaatcctcagggtttcttgaaatacctgaaacagaataacgtgaaagtgacacttaacctgcatccggcagacggagtggccgcttatgaagagaaatatccggagatggctaaggacatgggtgtagacccggctacaaagcagacgatcccttggataaattcagataagaagttcatgaagaatatgttcaagaatatcctggctccgatggaaaaagacggagtggacttctggtggctggactggcagcagggaatgttcgactcaaagatgaagaatctaagtaatacctggtggattaactatgcatttttcagcgatatggagcaacgtcgggagacacgtccgatgctttaccaccgctggggaggattgggaaatcatcgttatcaggtagggttctcgggtgatgctgtgatttcatggaaatcacttgatttccaaccctatttcaattctacagcttccaacgtgttgtacggctattggagtcatgacctgggtggacatatcggtagccagatagatcccgaaatgtatacccgctggctacaattcggagcattaagcccgattatgcgtacccactcccagaaaggggctaagctgaataaagaaccttgggtgttcgacaaggaatattgtgatatcatccgtgaaacgattcgccaacgctatgtgatggctccttatatctacaccatggctcgtaaggggtatgacgacggattgtctctttgccgtccgatgtattatgattatccggagaacaaagaagcttacgactttggcaatgagtatatgtttggagatgacgttctggttgcaccggtcactactccagccaaggatggttatgcacaggtacgtgtatggttgccggaaggagaatggtacgaatggcatacgggagctttactggaaggtaaccggattgtagaacgctctttcgccattgatgaatatccaatttatgtaaaagcgggtgccatacttcctttgtatctggagaatgtgatgaaccttaacaataatgacgaagaaatagcggtgacggtgtttcccggtggaagcggtacaacggcgtttaatttgtatgaagataacggaaatgataagaattatgcatccgagtatgccgtgactaagctgacttctgcccgtagtggtaatgagcaaacgattgttatcggcaagcgcgaaggtggctataaagaaatgcctcttgcccgtccgttcacggtgaaagtgctttcatctctgcttccccagtccgtcacggtaaatggagttccagcagaatacagatattcggctgaagactttgcattactggtagatttgccggaattgccttgtaaccaggaaaaagtgattaagatcatttatccgtctgggaaagtggatatgaacggacttttaggggcatccaaaagaatagcccggtctatggaacaactgaagtatcgtaattcgtatattgtctttaaagaagagttcggcaaaatgggaagtctgaatgaggctgtgatgtatgctccgtctgaaatgcccgctttgattgctgatttctggaagagttatcatgaattgccttcggtattggaacggcagggtttgaagagcgagcaagcgatatggttcctgcaatccgtttgctggggtgaaaagtaactctggatatgtctggaataggagttactgaatgatgtatcagtggtttgcttgttgggatttatggaattggatgatactctttgtttcttttgcaactctttgattatcagtaggaaaaagtgctctataatgaggtgacgactgaatagggatgaagtaacgagtgaatggcaatgaagtaacgactgatataggttaaggtaacgactgtttcataacgtaggattgctgtgaatgattctgtaaattaatgatgaaagtgcacatagtgccgaatactaaagctatagtaatagatgaaacgatacttgatgacatttctgaccgcaattatgaccctttgctgtgcaggagctgtttttcctttgccttcttcgggcaatagccatgatattgcatcattgcatgcatgggggccttattcaaaacgctatgccggtatctcgcacatacctgatatgcgtaaagggatacgttttgacttctcggtgatgcccgggtattaccggaaccgtcagttggtaccgcatgtcctgttcgaatcatcctactatccgtgggaaataaatccggagatgacccgcatcacttaccgctatgaactggagtggaaagaccgggtttatacggatgtcacctatcacatattggatgataaccgtacgttggtcgggatacattgcgtcaacaatacgagtatgcctcaaaatctggtattgaatcagatggcatatatagattatcctgagacatatccgcaggtagcggtttcggatacgtccggcctgcaatggtataatgccattgactatattgagaatgaacctgccagtaaatcccctcaatacaaactggtgtatgacggatggcaacggaatgaggagcgcagtacttcatcactcgatggttccatactgggaagagggttcggcaggaatgaaggtgaccggttgagctatctggtaaacattcttccggggcaggaaaatggggcgataggtctccggtttaagatgaagaaaggagagagtgccgtactgtgtctgaaaggactggtggaacaatctgtagaattggaaggtacgggggaattctctttcttgtcagttccttattatggaaagaaggtcggagaatataaactggaacttgtttcgggaagtactgttgcaatcagtttggatggattctttataggggatgttgacggtataaacaatgtaaatgtggtccgtacaccgattcctttcactcctgtaatggaggtgggagaaaccaaacaggattttatactgaaatacaaggattgtgacaactattatggcgtggcctggaactaccaacattcggaagtgagggagatactgaacggtgaattggagtctttcttccgtagaagggtgcatgaacatgtatcttcaagactaattggagacaggaactggcattatgccaatgcttttttgcgccctatcgtactggaacctgactcggaacagaccatttgcatgctggtgtgcagtgggaataaagaacaggtgaagcaggaactgcaagatttccattcgacaccggataaactggtcgcacggatcagttctgcggaaaaagcgaagcctgaagaccaggtgttgccaggcggagagaagtatcttctggggaatcgtttgctgcaagcctcactcttgtcgaatatcgtatatccggtttatacgcagaaggaatacatcagacattttacgccgggtaagaattggaacagtctttatacctgggactccggcttcattgcgttgggactgattgatgtggacccggtcaaggctttcgaatgtatcaaggcttatacgactccggtggggagtgaatcggctttcatccatcacggtaccccattacccattcagatgtatgcttatgctgatttgtggaacaacagcctgtcacaggaagcgctgagattcttatatcccaggctgaaacaatattttgattttatggtcggagctgatccgtattcacctacccgaatggcaggttccggtctgcttcgtacctgggattatttctataattctggtggatgggacgattatccgcctcaacatgcattacgcggtaataaatcgcagtatcaatcggtggctcctgtggtaacctctgcttattatctgcgggcggcgaagattctgcgcctggcagcgaaggaactggggctgaaaaaggatgtgaaggcgtatgaacagatcatcaaacttttgtcgtacgccctgcaaacttactcttgggatgaagaaagcggatacttcggatatgtagtccatgattctctgggaaatgcgacagatattttccggtataaggatcaatctaattttaataagggactggatggggtcacccctttggtagcaggtatttgttctcccgctcaagtgggccggttgatggaacatttattttctcctgacgaactgtggactaaagtcgggctctcaacggtcgatcagtctgctccttattataaagaagatggatattggaacggtgctgtctggtttccccatcagtggatgatgtggaaggctcttttagatttgggtaaaggggaagaggcttaccgagtggcacatacagctctggataattgggagaaagagtgtgaagaaagctatttcacattcgagcatttcatcatttcgtcggggagaggagcagggtggcaccagttctcggggctttcatctcctatattaaattggtttgcagcatactataggccgggtaaagtctccaccggttttgaggtatggattacaaagagtgattttaatgagaatcattccagatataaggctgaactttcttttgatgattcgacaaaacctcatgagcgttgcatgattgtctgtatggatgcagggcatcaatatgaagtattctttaacggaaagccggttcagtataggtctggccatgcaggaatgttagaaataactctgccggctacgaataaaacaggggaacttgtagttcgaactcttgattagattattttctgcgagaggcatattttctttcagattcgatatctctagaacaaaggcgtgttctattaaggatacgcctttgttgttattctgaaactttataaaattgactagtttcgcagcttacagcctatgaataaaatgatagatacgtccctataattgagattattgtgtctattgctgttttaaacctttctaacgcgtgatttgggacattttttctttttttagagataactgtattattgattgcctatttgaatatctatttttgtcttgctttaaagccaagtaagtctttacattttttttaaaatttaatattatgaagcagaaaatttcaaaatgcttttttgatgcaagggttaggatgttactcctcctcctgatttctacaatttatgctcaagcccaatcgggcagaatcgttacgggtgtcgttaaagatgccacaggcgaaacagtaatcggtgtaaacgttactgtaaagggtaatgctgctttgggtactattaccgatttagatggtaagtattcattgaacgttcctgcgcaaaaatctactttagtattttcattcattggttaccaaacggtagaaaaaacgattgatgccaatgcaagaactctgaacgttacattagtggaagattctaagttgctggatgaagttgttgtggtgggttatggtacgatgaaaagaaaggatgtaacaggcgccgtggcacacgttggcgaggaagtgacaaagaatagagctgcaacaaatgctcttgacttcctggttggtacggttcccggtgtgcacatcactccttctactgatgcaggtggcggcgcctccgggcttctgatccgtggtaaacaatcgttgaaggccagtacttctcctttgattgttttggatggtgtggtattctatggtaacattgatgatattaatccgaatgacattgaaagtatggatatcctgaaggatgccagctctactgctatttacggttccaaaggatcggcaggtgttattcttatcaataccaagagaggttcttccgagaagcccattatcaacgtaagtacaaaaataggtgtttcacaagctacttttatgccggagatgcctactgctgaacagtatatgcagagacgtgttgattacttcaaaacaattgattactttaagccgggcgaacaacagcatggtttgggatattatgataatcccaatagtctgcccgatggcgtttctcgtgaacaatgggcaagctatgacagctctttctccggtgattatattgaaacctggatgcaacgactggaattcaatcctattgaggttaacaactataaagccggtaaattcgttgactggatggacctcgtttatcagaatggtttgagacaggattacaatgcctctgtttccggtaagacggcaagaaccaactattatgtgtcgttgggctatactaataatgatggtatcgtagtaggtgatcaattccgtgcttcaagatcgcgtgtgaatttggatactgagattacgaaatggttgaatattggtttgaatgcgcagttcgttcataaaggctcggatgatattaaggcagatacgggcgcggctaaagcagccagcccctttggagacgtttatgaggctgatggaagtatcaaggttagaccttgggatgacaaccgtattgccaacccattactgaaccgttcagtggacgaaaaatactacagaacgcagacatttaattcaagcgtttatggtaagttaactcttccttttggatttacctggcagacaactttcaatgtgcgttacggctggagaaaggattactattttgattctgatatcaagccgggtgtagtagcaggtggtaaagcaaaacgtgtggactattcagactatgaatggagcattgataacatgttgaaatggaaccgtacatttgctaatatacataatttcgacttcacttttgtatatactgctgaaaaatatcagaactggcaaagtacgggaaacaatgaaggtttccagccgaatggcgcactgagttatcatggtattcaggccggtataactcctactgtcagtgcaaatgacgaaatgcagactggtaatggtttgttgtggcgcttgaattactctttgatggaccgttatttgctgacaggttctgtacgtcgtgacggtttctcagctttcggacagaataatcctttcggtgtattttctacagttgctgccggatggcgtatatcagaagagaagttcttgaaggatgttgaatggattaacaacctgaagctgcgtctttcctggggacaaaccggtaaccgtgacatcggccgttatgctgctttctcaagattaactattaccaacgttattcaggatggggtaaactataaaggtgtatatccttcaagtttggctaacagagacttgaaatgggaaactactaccgggttcaacttcggtgttgactttggattgttcaaaaacagactgagcggttctgtagaactttataagaataagacgaatgacttgttgatggaccgtgctatgcctgaaatctcaggatatggtaagatcgcttctaacctgggagaaattgctaaccagggggctgagttaactttgtcaagtgtaaatatcaatacttctaatgtacgttggaataccaccttcacttattctactaataagaatgaaatcaaacacctgtacggtgatatgattgatgtgctggatgccgatggtaatgttatcggtcagcgtgaagacgatgatgtacagaacggttggtatatcggacatgctattgatgaaatctatgattataagtggattggcgtatggcaactgggtgaagaattggaagctgcaaaatatggtaagcaaccgggtgacccgagactactggatgttaataacgatggtaagatcaatgatgacgataagctctggttgggtacaaaaactccgaagcatcgtatgacgttgagcagtgacctgaatttgttcaaatgcatcaatttctcttttgtactgcgtggagaattcggttggatggatattgataacctgccgagaaacgaaactaaccgttactacaatacttcaaactctgtttggaccgagtattggacaccatggaatccgaatagcaaatatgcccgtttgggtgcaaacattgatagcccgggcgtgaacatttacgaaaagagaaactacgtaagaatgcagaatatggcattgtcttatacattcccgaagaagttgatcaacaagtttatgattgataatctaagattcagtattaatgtggataacgcattcgttatttctaaatggagaacttctgatcctttgactaaggccattactccacgcatctggacatttggtgtagacattaccttataatctgatagaacgataattaaataaagatattcaaatgaaaacaaagaaatatatactaaaaggtctggcaacttgcctgatagctgccagtctttctgcttgtgttgatcttgaaccgaaggcgatgtcgttcctgacaccggagaacacttttgttgataaagcaggtttggaaaccatgcttcgcctctgccgtaaacagatgaattttgaatggtttggagacgctttcaactctggaaactgtgaaacctattctgtatatgaatatgcttggtctgacttggctgttatgggaggtcctgaaacgaaggaaatccacaatatggtgactcagttgacccctaccaccaatatgtatctgcaccttcgttactgggttttcggctggaacggtatcaagtatgccaatacggttattacccgtgctcctgaagctgacggtatggcttcggaagaagacagaaacgcttgtttagcagaaggatatttccatcgcgcttattggtattatctgctgactaaccaatttggagatgtaccttggatcggagaagaaattaccggtgcaaaactggactttaataccgtttcccgcaaaactatcttggcgaatatcaagaaagatatggaatatgctgtacaatggttacctaaagaagtaatccgtggtgctgtgagcagagccgcaggtgaacatttactggctaagatatgtctggctaccggtgacttccaacaggcggtagatgcaacaactcgttgcatcaatgattacggattgcgtctgatgaccgaacgcttcggtatcaatatggatgataagagtaaggacgtatacaacgacctattccaggaagagaatatcagtattgttgagaacaaagaaggcattatgatcggtcaggaaatctacggtctggacggatgttcttctccaagtggttcaaaacgtaagcgtaacttcgtgccgcagtggcatgccggaagcaaaatgaagacaccggacggaaagaacggaacaactgatgcatcaggcatttatgatggatacgaacagttggaagagctgggtagaggtcttgccaagatacgtcccaccaactatgcacaatatgagttgtggaaggattgtggagatgatatgcgtcataattccaataactggtatgataagtcacgtatcaaatacaatctgccggcttcaaagggtggtagtgccgcttatttcggtcaaccggttaatcctgcttactgtaccgataccatgcgctgttatttctctttcccgattgtgaaggttctgattgataaggatgatccgaatgcaggaggtaaagtacctgtaggtggtttcacagaccagtatatcttccgccttgccgaaacttacttgaatagagctgaggcttactggtggttaggcaagaacgatttggctactgaggatgtgaatacaatccgtcgccgtgtgaatgcaccagaactctcatccgttacactggaagatatcctggatgaaagagccagagaattgtttctggaagaccatcgtaagactgagttgactcgtattgccttcctgaaagcagaaaagggtatagatggatattcactcaataacttttcagaaaagaactggtattatgaccgcatgatggagaagaataatttctttgcaacagaatattattattcaaccaatgcatttatcatgaagccgtatcacgtgttgtggcccattccgcgtaatgccatagaatccaacactcaaggccgtatcaatcagaactatggttacgacggttatgaagataatatcccggtagaagaacttgaacaaagatataaataagataatatatgagaagtaaatatatattgtttgccttggctctgacaggagccttggcatcctgctcggacgacgataataagggaacagcaaactataagaatccttattcaaacccattgactgattacagcgcagctgaccctacagtctggaaagagaatgaccattcattctatgtatatgccaccaatacatctgtaatccgtaagtcggaagacttgattcactggacggacggaggcaaaatgtttgcaacaaaacctacgtttgttacggaatcgggtgcagcagtctgggcaccggatatcgaaaaggtgggtgataaatatatcttgtattttgccatgtctgccatgggcaagcctgcaactgccggtatcggtattgcttcggctgactctcccgaaggtcctttcacattggatatatcggtagacggaaaaggaaagttgttcacttcaagtgaaattgatgtaagaaactccatcgacccttgctactttgaagacaatggacagaaatggttggtttggggtagtttcaacggtttgtatgctgtgaagctgaatgaagacggtacgagagtataccctgacattgcaacagccaagaaagaaagagtgcaggttgcgggtactgcttttgaagcgccttacattcataaacgtggcgattattactacatgtttgcatctgtcggttcatgctgtaactctatgttgagtacttatactacggttgttggccgttccacttctttcttaggcccgtatgtgaataagaacggagaatcaatgctggacaataaatatgaagtgctgatcagagccaatgatcgttttgtaggaccggggcataactcggaaatcgtaacagacagtgagggtaatgaatggatgctatatcatagttatgacagacacaccccgagcaaaggacgctatttgatgattgaccggattgtttgggagaatgattggccggtgattgccggtaatagtccatctaccgaggcagaagctccggtttgtaaataagtaatagtgaatatatgcagaaaatattgttaatcggagcctttgtcgccataagctgtttgcttatggcgcaagggcccgtcaaaaactatcagaatccggttgtaaattatagcctgcccgatccctctgttatcaaaggggaagatggttattattacctgtatgccaccgaagatatccgaaacttgcctatccatcgttcaaaagacttggtggagtgggagtatgtgggtactgcttttaccaaaggcactcgtccggattttgaacctaaaggaggactctgggctcctgatatcaataaaataggtgataaatacgtgctttattattccatgtctgtctggggtggcgaatggacctgtggtatcggatgtgccactgccgataagcccgaaggtccttttacagatcatggaaagatgttccgcagcaatgaaatcaatgtacagaattccattgatcctttctatatagaggatggaggaaagaaatatctcttttggggtagtttccgggggatttacggcattgaactgtcggatgacggactttctgttaggaaaggtgccaagctccgccgggtggcaggaacagcctatgaaggaacatatattcataaaaaagatggttattattatttctttgcatctataggaacttgctgtgaaggattgaaaagtacttatactacggttgtaggtcgttcgaagaaactttttggaccttatgtggataaaaatggtaagaagatgctggataaccaccatgaaatactgattcacaagaatgaggcttttgtaggtaccggacataactcagagattgtaacggataagacgggtaatgactgggtgttttatcatgcagtcagtaccaagaatcccggaggccgtgtgttgatgctagataaggttgattggaaagacgggtggccatccgtgtctggcaattctccgtcatcagaatccgaaagacctgtattgtaaaatagtaaaatgaagattgaatatgaggttaaaaagattgtttttagggataatgctttctgcgggcattgcaaatattggagcggcaaactatactcctgagaatgtttctgtatctttaaaagttccgggaaatgatgccaaacactattcattaactctccggaaagtgcaggatggtgtgtacgattgtcagccttccgaaaatctgccgctggtcattacccgtcaggttacggagaaagatggaaaacaacgcatcaatgttgtcatcaaagccttggagaatgtgtatttcaattatggagagcagataaaaaccggttataagcatgatgactgtcagttctatatgcccggtttctggtatcgtcgtaacctgcgttcgcccaaagaggcgccttcattccatacttcggatagttggttggtgcgcgaggaccgtttgagcactccgcttacagcagctttcaactctgcaaatggtaagtcaatgtcggttatccgcattgataagtttgacaaggaggcgctggccactcacaaagaaggagaggtcattgtgtccggagaaacatccataggctataccggatttgaaaatgtgggaggtatgactgtgctttcttacggttttccgtatcgggaagctccgaaaacttatattcgtaaattgactttagctccttctgttgaggcttttcagttgcttcgcaaaggagacagcattactctgacctgggagttggcggaaatagatgccgctgatttttctgagtgcgtgcagcgcacttgggagtattgttacgacacgaaccgtccgcagcctgtcgatacaccttatacggtggacagaatgaaagaagtactcagtaatttctttgtggaaagttatgtggacaatacgcctactcattactattccggtgtggaactgaaaacggctacttgcgatcatgtggatgttgctgaaatcggatttgtaggacgtacgttgctcaatgctttcaatgcactggaatatggtgcgttacagaaccgccaggaattgatgaatagtgccaacagtgtttttgatacgtatcttcagaacggtttctctccggcaggctttttcaatgaggtggtacattataatcgtggctttaaagaatccaagcacagtatccgccgccaatcagagggtgtgtatgccgtgctgaattatctgacttacgaaaagcagcagaagcgcaaacatcctgagtgggagaagcgtatcaaaggaattttggatagcttcctgcgtttgcagaatgaggatggtagcttcccgcgtaagtttaaggatgacttctccattgtagatggaacgggtggaagcaccccttcagctaccttgcctttggtgatggcttacaagtatttcaaggataaacgttatctggagagtgcgaaacgtacggtgggctatctggagaaagaacttatatctaaggcggatttcttctcttcaaccctggatgcaaactgtgaggataaagaggcttctctgtatgccgctactgctacgtattatctggcgctggttactaaaggggcggagcgtacgcattatgcagaattgtcgaagaaagccgcttattttgctttatcttggtattatacctgggacgttccttttgccgaaggacagatgctgggtgatattggcctgaaaactcgtggctggggaaatgtatcggtggagaataaccacatagatgtgtttgtttttgaatttgccgatgtattgaattggctttcgaaagaatacgatgaacctcgtttctctgactttgcccaagtgatttctacctctatgcgtcaattgttaccgtacgaaggacacatgtgtggtgtggctaaagtgggcttttatcccgaagttgttcagcacaccaactgggattatggtcgcaatggaaagggatattataataatatctttgctccgggttggacagttgcttccctgtgggaactcttttctccgggacgtgcggagaagttcttattgaaataaaaagatggatataaaatacaacgtgcatgagtcataatctcatgcacgttgcatctatatatcctgcatatccgatctatatatcctatacgtccgatctatatgtcctgcgtgtcccatctatatatcctgcgcatcccatctatagatgctctaaacagctactttctttcgtttcttcatcgcatagccagcgctttattctctgctgcctccataatctcccgttctcccggtcctttatcgttaataccgcaaagatgcagaataccgtggataataacccggtgtaactccgtttcatagtcactgccgaactgttctgcatttgtacgtaccgtgtcgaggctgataaataaatctccactgaggcgattgccctcgcaataatcaaaagtgatgatatccgtgtagtaatcatgttgcagatactggcggtttacttcaagtattttctcgtcagaacagaaaatataggcgatttcaccgactcttttcttgtaagtggcagcaacggctttaatccattctgtggtttggctttttttgatggcgggcatttctacaccgtctgtttgataggaaatcatatcaattaataattaaaagttaaaagaaaaacagatagctgatgatgatggcggcgatgatacctgcaaagtccgctatcagtccgcaggtgacggcattacgcgttttagtaatacccacgcttccgaagtaaacagccaggatatagaaagtggtgtccgaagcaccacgggctacgcaactcattcgtcctacaaaagaatctgcaccatattccttcatggtatcaatcatcaatccgttggcaccgctgccactcaacgatttcatcaatgcggttggtagggcgcctacaaaactggtatctgcgccaaacaatcctactatgtaaccgatgccgcttactaacatatccatcgcaccggaagtgcggaatacggcaatacccaccagaaacgctaccagatatggaatgatgcgcacggccgtggtaaagccttctttggcaccttctacgaaggcatcatatacattgattttcttccataatccccagataatgaacaaaagaatgatactgaacaggataacgttggcaatcaatgtggaatatgtaccgatttcttcacgaccgagttgcataaacaagtaaataagtccagcaaagaaaaggctgatgcaaccgatgaggataaggatgggcttattgatcagattgatgcgttgagcaatgctgacagcaatcactcctacaagggtggaaacggctgatgtgatcagtatgggaatgaatatatcggtaggttgtgcagcgcccatctgagcacgatacatcatgatgctgataggaatcaggatcagcccggaagtattgagcaccagaaacatgaccatcggattggttgccgtatccttctgagggttcaattcttgcagctccttcatagctttcaatcccattggtgtagcggcattgtccagtcccaacatattggcggagaggttcataaagatagaacccatggcagggtggcctttggggatttcggggaaaagacggcagaacaccggattcagccagcgggataatgcgttaatcatgccgctttgctcgccgatcttcataatgcccagccatagagaaaggatacccgtcaggcccagcgatatttcgaaggctgttttcgaggaagtgaatgttgaattgacaagctccgtaaagatttctgtgttgcccataaacagtagcttgatgagtgccacaatgaaagcaattacgaagaatgctacccaaatgtaatttaaaaccataaaataacgcgttgattttcgtgcaaaagtaggaatatctttctatttagcgtgataaatggaaagattattgcatttattagggcaataacactatttcgaatatgaaattctggctatctttgctttctgatattgcgacggaattagagggagaaggagttaaagaggttattaactccggactctcataaaataattaactgatatgaaaaacaaatgtatgttagttgcagctttgctgttgttatccggtacaatctcggccaaggttgtgttgccgccgatgttttcggataacatggtgttgcagcaacaggcggatgcccctatatggggtgaggcaaaaccgatgaaagcggtaaaagtaaccacttcctgggatgggaagacgtatgaaacactggctgataaggaagggcgatggaagctttccgttcgtactcctgaagcgggtggcccgtatgagcttacactgaccgatggtcagaaactggtgttgaagaacgtaatgattggggaggtatggatttgttccggacaatccaatatggaaatgccgctgaaaggttggggcaaggttctggattatgagaaagaaatagccgcagccaatcatcccaatattcgtttattgcatgtggaacatgttaccagtacgcagccggagacggatatcaaaatccgtgataatggctggcaggtatgctcaccactgaccgttcctgaattctcggctaccgcctatttctttggtcgcgaaatctctgaaaaacagaatgtacccgtcgggttgattcatacttcctggggagggaccaatgtagaatcctggataagcggaaaggtgttgcaagaaatgccggacttcagtaaagtagtggaagatattcgtgcaatgcctgataaagctacgatgaaagcggactatttgaaagctttggaagcttggaacaatcgtgttgatgaaggctttgctgccgggaaaccggtacgggctgaggtttctttggatgataaggcttggggcaagctgaacttccccggaatggtggaccagcaagggcttggtgattttgacggactgatctggcttcgccgcactgttgatattcctgcatcctgggcaggtaagaaagtgcagttagttttaggggctattgatgataatgatataacgtattggaatggtcgggaagtgggccgtaccgatggttattctgttcaacgcaattataccgttccgggtaagctggtgaaagcaggaccgcttacattggctatccgtgtgacagatacaggtggtggttgtggtatgccggatgaactttatctccgttcagacaatggagaacaaattagtctggccggtgaatggaaatatcagatagcggccgatgcccggaaagagggtatgtttccgaaggatatgtccgaggaccccaatctgccgacatctttatacaatgctatgatccatccattggtgccttacagtatccgtggtgctatctggtaccagggggaaaacaatgcttcccgtgcctatcagtatcgtgagcttttcccgctggttatcgagaactggcgtaaggactggggacaggattttcctttctattttgtgcagttagccaacttcatgcaagtgtctcccaaccccgttgattctgactgggcggaactccgcgaagcacaagcgcgcacattgtcggtagcgaataccggaatggctgtaatcatcgataagggcgatgccaatgacatccacccgaaagataaacaggccgttggacatcgcttggcgttgatagcccgtgctaatacgtatggagaacaaataccttattccggtcccgtttatcgttcctatcaggtggacggagataagattatcctttcttttgatcatacagatggtggcttaaagagtagtgatgggaaagcattgcaaggctttgccattgccggtcgtgatcataaattccattgggcgaaggcagaaatacagggtgataagattgtggtgagttctcccgaagtaccgtatccggttgctgtgcgctatgcatgggccaacaatccggtttgtaacttatataatggtgccggtctcccggcttcacctttccgtacggatgattggaaaggggtgacgcagaaataatcagtgtgtttggttgtatgacggctccgcttattatcaattgtaaattattgataataagcggagttctttttgatgccacttggcgatagatactgtgaagacgaacgtttgcttacttattggctgttgttattctaaataatgcttattatatgcaataaaaaggtaaaaatcatcaattggtctgtcttgtgagatagggggatgttttatttcatagataaaatatatctttatcatcgtataacatacaacagacaaataacttatgttgaaaaaaacgattcttgcctgtgttcttttgcatttggttgtaggaactatttcacctcaaaagatagattctatcgatattaaaagcatgcgtgcttactataaacagtattttaatgatccgactgatcccattgttctgacagcatcggatacattatttgatatggcaatcaggtgcaatgatacggtgatggctaagatagctttgggagccaaggtagactattactattacggacagggcgagaaccgcacggatagcatcatagccggagtaaatcgcttaaaacaatatgccagaagtgtcggtaacgctgaactttactactgggcatgggctgccaggttggttaactattatattatacagggagaatataacattgctcttcttgaagctgaaaagatgttgcaggaggccaaaggtgagaaaaagcagggaagtattgctgagtgttattatgcattggccaatgtgtatacggctaaaggtttagtaaaaaaatctcaggagtttatgcttaaagagattgatatttttgagaatgccaatgtctttagatataatatatcctgccagtatagtgatgccgcaaagatatacattgatctgggcgaagcagaaaaagctccagaattgcttaaaaaggcactcaaaacttctaagtctacttatcatgaagtgacggccaagctggtttatgtatcactctatcttgcacaaggagatacggcagctgcccgcaaggcattggaggagtgtagacaaatgtatatgggagaaccttcaatgaaacgtcatatacactatttgtatgatgtagagattgattataactggagggtgggcgactataataaggctcttagtgtattggatgaacgggaaaccgaattgaggaagaaaaacaatctgacaactttgatggcattgagaaaaacaaaggcggatattctttgggatatgaaccgtaaagaagaagcagccgggctgtaccgcgatttcctgttggaacagaagaaggagaaagaaaggaatgaagaaatcactaccagtgagtttgctaccatgttgaacttgcaacagctcaatgctgagaaggtacggttggaaaagatttctcagaagaaacaactgcaaaatacccggactattttattctctgtactaggtcttttatgtatcgtcgttatctttttgtggcaacagagaaaactcaatgcaaagttgcatcgggcaaaaaataagctggatgagcagaatcgtacattaatcaaagccgaggaggaactgcgcaaagccaaggaagttgctgaacagagcaattggttgaaaacaatgttcattcagaatatgtcccatgaaatccgtactccgcttaactccattgtcgggttctccggggtattggttgatatgcttgatgaaaaggaagacatcgggcagtatgttgcattgattgagagtaacagcaagttattgctgaagttggtaggtgatatccttgatatttccattctcgacagtgaagttgaaatcaagcataatgctgttgatgtcaatgcctgttgccaggcttcgatagatgcggcgggggcatctttcgatccgggcgtaaggctcatttttgaacctgcctgtgacgagctgatcataaacagtaattataattatatagtgcaggtacttgataacctgttgggcaatgcatcgaagttcactcatgagggttccgttacattagcctatgaggttaagaaagaagagaatcaattgattttcacggttacagataccggaatcggtattcccgttgaggaacaggaacgtgtttttgagcgctttgtgaagttggataactttagtcagggagcagggctcggtttgtccatttgtcgtattgttgccgaaaggctgggtggctacctgaggattgataaagggtacactcaaggtacccgtgttattttctgtgtgtcgatgtgaagaataaaataaaagcgatatttttgtatattattaagttcatattatgcagaaaacaaaggaaatacagcaggagctggaacagtacattgacccggtgaaacgggagtatcttcccaacttctttaaaaccgggaaaggacaatacggagaaggtgacaagtttctcggtattatcgttcccaacacccgtatggtggcgaagcggcataaggatgtgccatttgaggtaatggcggagttgctgcaaagcgaatggcatgaatgtcgcctgtgtgccttgctgatgctggtggaacgctttaaaaagtgcgatgaaaagggcaaaaaagagatattcgacttctatttgtcgcagactgcccgtattaataactgggatttggtagacttatctgctccgggtattgtgggcgaatatctgaaggataaaccccgtgatgttctttatcgcttggccggaaatgaactgctttgggatcagcgcatagcggtggtttccacttatgcgttgattaaaaacgacgatttcatcgatattttagctctttccgagcatttcctttacactcgtcatgacctgatgcagaaggccgtgggatggatgttacgggaaatgggaaaacggaacaaagacttgcttgtgcagttccttgaaaagcattgtaaagtgatgcctcgcacaatgttgcgctatgcgatagagaaatttccggaagaaaaacggaaagaatttatgaagcggtaagcggcagacatacaatgttggccacactttcgtcatttgcgccgcaaaagtccggataagtaatcagtgtgtcgccttcccactaggactgagggtacttcccactaggactgaactggtgttccactgcgactgatcatggtggaacatcaagtgtgttgttatacagtaagttacgacgtatatgaaacatctgttcgctcctctccgctgggatatgaattagttcaccacagagtaacacagagtctcacagagtttaattgatttgaaatcagaaaataggactccgtgaaactctgtgttactctgtggtgaaacttcattactgtatcgaaataaatcaattctgccaacaggtaaaggatcagtagatctaaaatagtgattagtaagattgaaaataaatgatatgtggtaaaaatgccggataaaaatataccggataattttcattttaaatgaagactcttaactttgtcacaatttcaactgactggaagatgaaattccatataacatcatcatgttgaatgggagtttatagtgtatggtaaattgtgatgaagatgaaattaccatttttattgatgtttgttgtggcagggtgtacgagacctgccaccttggatctgcaaatgaacagtgaagccgatagtctttacgaggaagcttgtgcacattatgaaaatgaagaaatagatagttgtacctataaactgacaaaagctttagaactatatcgtgagagtggagaaaacgaaaaggtagctatcacctgtttgtcgttggggcaatcctacaatggaatagcccagaccgattcggcaaggccttatttactggaaggactgaaatattgtgaagagaatacagtgcttgacagtatccgtggaaggttacttactgatttggcaagctgttatatgattgagggggatatccgggaagcaacatcacaatatctgacagctttggatgccacctctaaatccggtgatagtgaagcctatctgaccaattgcagttcgctgggtgtcgcctatcgcagaatgaacctcccggactctgctctttactattacggcaagggacttgaggcagccatgaaaagcaaggattatagtgctgtatccaatctgcatgccaatattgccgtgatgtatatctctttcaaacagttagaaaacgcgaaggaacatgcacaagaagccattacgtatgccctgaaagaggaagatgctttggactggttgcaggcttactacatctgcggttctctgttggtaaagacaggggaatacgatcaagcgatcaattatctgcataaggcttatggaatagcttcccagcaacaatcaccacgtttccggttaaaagtattgtcaacactgttacccgcttttcaggctacagcacaagatgattcggtgcgttactatctgaatgtatgtgactgctttctggatgaattaccagaaacgagccatgaagctatcggtatttatgagacaaaagcccagctcttactaaaggaaaagaaatatcgggaaagtttggatttctatcgaaagttgacgggattgataagtacaaattcgcctaccgctccctacgtgtggtacagccgtatggccgaatgttatcataacctgcaacagcctgatgaggcttacagatatatggagcaggctctcgaattgcgtgattccctggctgcacaggaggtggagaagcaaatgagtgagctgcaagtgcactatgatactcagaagaaagaacttgaaattaagcgtctgaaagaattacaacagcaggaagaacttcgcagccttcggctcacaatttggtttatagcttttatcagctttatgattatcctcttgatcattctcttgtataaacgcaagttacaactcagccgtaaatatattgacggaatggagagcgaacgtgcccgtttggcacgcgaactgcacgatggggtgtgcaatgaacttctggggctggaaatggaacttaaatcgggctttaatagagaagaggacaaatgtgagttgctggacaaactagggcggagtcgtgcgaatatccgtagtatttcgcacgaactaatgcctcccgtattttctgatgctactattgatgagattataacagattatatcgatcatctgaatgttccttcatccatgcatctttcattcgatgcttctacgtccgattggagtctggtatcctataatgtggcatatgaattgtatcgtattgtacaggaaagcatgaataatattctcaaatattcttccggcacacaggtttccatttcactgttgatggatggtgcgcatgtgcggttggagatattcagcaatggagttatgaagcgctcttcttccaaaggcatcgggatgcgcacgatggaagatagggtcagatgtatgaacggtacactccatgtggctgctgatgagaccggtgtatgcgttacagttacggctccttttaaataaagatttattctgtactagttttcatgtacggaaagtatatcataatatttaccaactgtctattgaaaaactacggaaaatgatagtcgatttaaattaaaaatacctttcctttgcacaaaatagtaaacatgataacagggaggactaatatctgaccacaagcatataaataaaagaaatatggtgcaacttccatcggatacatcgaaataccatcttcttcttatagatgatcaccctattgtattggcgggcatccgtaacattcttgaagtctgtccggaaataggtgaaatctatgcggctgacagtgctgcgaaagctttggaacttcttaaatcccacgatatcagtatttgcatggtcgacatagaattgccggacatgtcgggttttgagctgatagaacagatacgtttgctctatccggatatgcgtattattattgaaaccatgcatagtgaagtgtggattgtccgtcggatggtaaaggcggatgtagatgcagtgattcttaaacagtccgatccggagaatctgcaagaggcgatttattctgttctgtcaggacgtaaatatttctgtccccatttccggaaatgccttcggaagcttcctcctgagatgccgcaagtactcagcaagcgcgaacaggaagtgctgaaatgcatatccgaaggcttgaagagtaatgagatagcaacgaaattatatatatcagttaatacagtggagttccaccgtaagcagatcatgcttaagctggaagccaagaatgcatctgatatgttgataaaggctatcaagagtggagtgttggaaatatagacgagtaatagctaattgatatgtattcgaatgaaaaacatagggagaatggtatttttgatatcattttatcagttgtattttacatcatgattttttgtgccccttttgtggatgtggtggtgaacggacaaatcgctgaaacaaagacattggcgggctttttgaaggagcatagtgataatactgtttcgctgattttgaatatttttcctgtgctgactttagtgatagggatattgaaattcactttttccaggcttttctaccattatgtgctggttgtgttagatttgtataatggtttgtttgctctcgcaatggggataggtttatgttgggcagcatccactgttgcaggtcaggcaccggtggacatgatcttctatagtgtcaaatatcaaatgggtttcggtcctcttattctgccttgcctcggcatagggttcttcgtttatactcttagcactttctgtggatattataaatggtatcctttgcaaacactgttttggggagtttatttacctttaatccgtccggccatcgtttcttcattgtatgcagtgatagctgcgataatttcaggtgtcggtacgagcgagaaatcgactatagttgtttctataataatttccattctaatttttgttttcgagttctggttgctatatacttatcgtaaggagtggaatcggaagttaagaagtcgtaccaaccgtggtcaacaggaagctgtacttaccgcgaccgctacagatggggaaccggaaggtggtacagaggtcttgtcgccttcagaaatgattccggctactgttgccgtgcctgttagtgaagagaaacggagaacggagattccggttaggcggaaaacttctttttattacatcatagggttagtcgtattagtggcggttatagcttttatttatattataagaaaaggagaggataggcctgttaatattccggctattaaggaaatgactttaagtggacatgtagctggcaaagaagtacaaatggcattgacgcaaattggagattcgctctatggtagttatttttataaacatatcaataacccaatacagctgacgggaaagaagataggggtggattatatcattgatgaaactgttaacggtaagaaaacaggtacgtttaaattgtttgatggggagtataatggtgactcttttttcacaggagattggagtaatggaaagaggaaatttaatgtccagcttaattatacaaactacaaaatactgccttctactgatgctgaccacccatttgtaggtgagtggaaatatgaaaaggaggatgggacgcaggtaaactgttccttgagtttatataaccgggatattgatgatgattatggtaagataacttcgtgggtgaatgatgactggcatgaatatgagattgattctattctttcgttggaaggtaggaaggcggtagtacaggcgaaatatgataatcggcaaaagataacgctggtgtatgattcttcgaaccggagcctctcggtagatatagatcagcagggaacttatgtgctgagtttgaatcaggaggggaatcacttacgatagtggaaaaagatgagatgaaagatcttaattaagatagaccggatgaaagtcaggaatcttattatgtaacagaagtacaaaagaaatatgataatgagaaagttatttgttttacttacaatgagtttgctggtagttgcagcttctgcccagaagctttcgtggccacctaagagttatcctgtgaaagtgccttttactgtgtccgaagaggtgaagtattattgggatgtacaggggattctttgtacgggtcgtggaaacggaggctataagttcaggatattgggaacagccaatcacgactttacggcaagtagaagtgttaatttttattacataagtacgggtaataagacgacagtggcaggcgcatattattttcctaaggtgaaagaaggacagaagtttagttttgagattgtttccgctttctccgggtatactccggcaggtttcaacgggttttatattcatgatgaattgttgaggattcctaaagaagaagcttctttgaaagaaaaagagacgtctacgtcgcctgcggtagccaatcaagtagatgaacgtaatgtgttggtggtgatgattaatatggctggtcaggtaatggctgggggcgattatatagaaaacctcgggcaactgacagaaaaggtgaaggagtttgttgctaatccttataatgatgagaatctgccggaaaagcagaagaagcgcatcccttattttgatgaaataatggttacttccaaccataagataactgtgcggaaggatgctaagactaccgaacttgattatcaagcagtaatggatgctattcgtgctgcttataaggaattacgcgaagatttggctaacgaaaagtttgggaaaggttttgccgaatgttcttatcaggagcagaaagctatcagtctaatctatccccagaatatagtagaattgggagttcgtgacatctcttctgataaaccagtgatgccaccgccggaaattcctgtcgtgaaggttgatgagctggttgaaagtaatcatctccttgtgcagctaaaaggtgattcagataaaatatatgataaggtggaggaactgcctgcatttcccggtggggaggttgctttgatgcgtttcctgagtgataatatgaaatacccgaaggttgcccgggaatctggtatccaaggaagggtggtggtacaatttgttgtcgggagcgacggctctatctgcaatgcaaaagtaatccgtagtattgatccctatcttgacaaggaagctttgcgggtagttagcgttatgcctcgttggaagcctggtatgcagaaaggtaaacctgttagtgttcagtatacgatgccattgatgtttagacttgaataaaggtaaataaattatgaaagaaaaagtagaggatagtacaatccaacatttaaattggagtaagtggatactctcgttagcggtagttgccgttttgctgctcggaatgtcgggatgcggtaatcagggaccttcattgaaagggcgttgggagatgttcgtgggagaagatcaaagtccgatgggacaggaatatggagtggatgaccttacttactgcatggagttggatttctcggaacgtacttttgatacggagatggaagagttaccaagcggaaagaaaagttatggttttatggatttttccactatgtcccgcatctatcgttactatatagattcggtttcttatataggcaataataaatatcgactggtgtcgttggggagttacgatttgcagctttatgaagatacacttacttttaatcctcaaacgaaagagatcagctataattctaattggaagtttaaatatgtttccggtataaaaccatttatgggcgaatgggaaagttcatatggcgatggcacaagcgagtatattaatttgagtttatacaaagagatcaatgctcctgatgaatatccgtttaataagcaaacatgctatggttatatcatttttgacagtgaagtggatacatcttatatactaataacatcggtactttcggcaaatgccgtggatgcggatgtcttggcagtatttcccgactatccggaggatcagccgcaacaactccatttgacatataactggaaagacggatcgttaagaatggatgatggttctgttttggctaacaagaacgggatgccggcctcggaagaactttctgctaatgattcttcattgtttgtgaaagtaggtatgtggatttttgttttggcagttcttttggttgtttccttgattctgctgaacgtgctggatgttgagggagcaatacgtttttggttacctgctactgtattgttggcaatgagtgtgttaatattgtttcttgtctgcaatatattccgcaccgaagggaacctggatttaggagagtcgggcttgatgagtgttctgaaactttacggagccgttattttggtcacagggagtttcttatttggtttgttcagtattttgttgtggctttatgagggttttggttatttcagtaaaactcccactgtcattgctgctgtgattgccgtagtacttcttgcaatccatatggttacaggaaacatgctattcgatattcttgcagaacgttttattccttcattaatgtatcaggacggactgtttggatttataatggcattgttggtagtagctgtaggtttattatttattgtgcagatgattatattggctgtttctgtaaaaggaatttatcggattgcgatattgttgctatatccggtattctttgcggcagggatagtattgctgatatcatcaatggcagtggtaatagttgccatgattgtctgtgctatcattgcatttgtgttggctcctcggaaggtaagtgagagctcgggtaatactttgcctgaatcttctgataatagcaatgagtctcaggaggaagattgtgatgcgataatcaaaggtgccggtccttttggtggcgatataaaggcgaaagacatcagtttctttaaagacaaaagtctccttaaaggcgaaaatgggaaagaatataaaagaaatgatgaagggaaattagaagagctaaattaataagtaatcaatatattataaatatgaaaaagaatctcttctcatgctcatttctggggaacataatatttatgttgtctgctgttttatgtggttgtaatgaaaccggaacgttttctgagaaaaaatatacaccagtgtatgtgtatttatctactactccttacgttggagaatcttccatgtcagattttgtagattatccgagtgatttggtaaggcttggactgcgggggacggtaaaagaagtgaaaacaacatctgctgcagaaatggttcagaaatttaatgaagacgggaatttgacgtctcaaggcttgtggtttgattcaagtcatcgttttggagatgaatacaagcgggaatacgatgatgaaggcaaactgacaaagctttataatgtaaggaataagtggaaggcaaaagtctatgcttatgatgaatggaatcggttgatagaatgtagagcagacgattacacccgtacttatcaatatactggtgaggatagatcctgttatgtggttaatacagaatgtaaaaaggagagtgaagtagcattgtacttcttttcgggtattcgtgataataagaagttggtgttcgatacatatgataaaccggagggataccggatgatggatggaaacacacgtatgcatttccagacagaatgtcctatgacggaattatgtaagagatttactaagatatactatccggattcccggtattataaaaacaagattgactcaatagttaatacttataatgtttcttataatgataaagaggatatggagcaatacttgattcatagtgtggaatatccttccggaaaaacgtgggattgccagattgactattcttatgaatacgacgagcatgacaactgggttgttttaaagctttattgctcagaactccgcaagctcttgggtgatttcattattatacagaaagatgcggaagggaagacttatacggaagatagacgtgttatttcttattatgaaacagaagtaggaaatgaggaaatccataaagaacaaaaaacaaaatgatgtatatgaaataaatttatttagtgtgtggtatagaatgtaatatttgtacgaaaggaatcgaattatgaaaaagatatttgttttatttgtgatgagtttattggtagttgcagcttccgcccagaagttctcgtggccgcctaaaagttttccaatgaaagtgccttttgccgtatcggaagaggtgaagtattattgggatgtgcagggagtcctttgcacgggtcgaggaaacggaggttataagttcagggtgttgggaacagccaatcacgactttacggcaagtagaagcattaatttttattacataagtacaggcaataagacgacagtggcaggcgcgtattattttcctaaggtgaaaaaggggcaacagtttagctttgagatagtctctgcctttgcgggatatactcctacgggttttcaaggattttatattcatgatgagatgttgagcatacccaaagaggaaaggaaaaccgaaataatagataatatacagcgagtggcgactgacagagcctatgatgattcgatacgtatggtagattcaatagcggcagtggcggcggcagaggcggaaatggctgcagaacgcgccgcccgtgtagtgacagctccaaaatatccgggtggaaccaatgctttgtatgctttcttacgggagaacatgcgtaagcctcagattgcaatagaaacggcaggatatggtacaactacagttcagtttattgtgacgcgcaatggtgaggttgtcggtgcggattataaaagacgttgcaatgagcgtgttgataaagaagtgctgcgtttggtgaatatgttgagtggatggactccggcaacaaaaggtggtaagccgtgtgatgccgtggtacagatttctatgtcgatatttccttcatttaatgcttcagctcaatttgtaggagtaaggtaatagagggagtctctcgctctatttttcaacat

SEQ ID NO: 6377 - DNA, 27314 bp, Unknown
  gut microbiota DNA sequence
atagatgctgcacgtccgatctatagcaccacatgcgaaggaattttctcatgcggtgcttttgtattgatatacggtaaggctgtttgtgaaaagagttaacttatagggattatctcaaaataaattagttattttgcagaaaacaaaaagttgtggtatgaagccactgtacatcaagaactacaaaaatttcaagtaaaaaaactaagcctcattagggataaagactacatgaggaaatattccttgtgcagtcttttttcatgatgtgtgattgcatgtgagccgcagaggcagagtttcttttctgcatgagtaagcggagaaggacggaatgatgaagcgaggaaagaaaattaagtgaaaaatagatagggttcatcagtttgtactatctttgctcaatagaaccaaaatatggagacatggattgcgagaagcagacaaccgaatataagagtcttctgaaaatcaggacaggagataaaggattcaaagacttgtccgtgacctgtgttgctttggcaaatgcacaaggcggaagaatctttataggttacgatgacaagaagaaagcccctttgccggaacagcatgtcacgcccgatgaagtgaatgaggcagtgactaaattgcgtagcctctgtttcaacgttggccttgtagcttctgaaatatgtactgatgataccggcagccaatactttattgtttctgtttctccttctatgcattctgtagctactacctcggacggacgtatttacattcgggtggccgataaatgtgaaccggtgcgtagcgaggacttgcagcgtttgggcgaagagaagggtgcttatcagtgggaattggtgaggaccaaatacctgcttgatggggttgctttggatgctttgcggcagttggcgaatgatattcgtaaatcatcccgtgtgcgtcagcacgtcaagcagatggatgatgcagagttggcagagaactatcatctggttgatgaaggttatttgacgaatttaggtgttctttggttaggtacagcaaagcagagaagctctatctgttatcctgctacggttcagtatattgtttatgatgtgcttgagcggaaagtacgaaaagaagaatggcatgataatcggctgaatcctaaagagctgcttcttgatatagaacagaaggctgttgagttgacttattcgtatgagtttccgaatggtttgtttcgtaaacaaatacggcattatcatcctaagttggtacgagagttgttggtcaatgctttagctcataaatcctataccatttccagtgatataatgattaaagttttttctgacagattagaaatctctaatccgggggggttgccattgggcataacaaaagataatattttgcatgccaagcatcggcgtaatcctaatatgatagagctactgagcgctttggaaatgatggaaggtgaaggctccggttatgatttgatttatgaactgaatgctatggaagcaaagaatccgcctatgatagaatcttcgtacaatgaagttacagtgattcaaaatgcagggattatagatacagaactgcttcctttgctggactttgttttgcagaattatcagttgacgcaaaaagcatttacagcttttggtatcatagcccgtgagaagaaggtgttcagtacgcggctttctgccatacttcagcttcaagaagaagaccgtttgcgcagttatacagataagttgttgaaagataatattatcgggaggaatggtgtgaagaaaggtacccagttttttgtgaatccccagttgataaagaacgcaaaggtaaatttgaagacaactctgaaaacagtagaaccttatgtgttgagaactctaattatggaagacttgagggcacatcctaaaagtaagatttcggagattggggggcggttgccggaaatcgatttgcaggagttgaggaaaatgatttattcgatggtggatgtggaattgataacagaaggggctcgtactgatagacgttatgcactgaaataagtggtaaaaaaaaaaagaaataaaaaagaaatagaaaaagaaaaggattaagtagctgattatcagtcttaattttgttttttattctttttctaaaaagataagaaaagaactaaatatagaatggaacgagaagattttgacatacgcgataatcagttgactagtcgggaacgcgattttgaaaacgcacttcgtccgttgtcctttgaagatttcagcggacaggataaggtggtggataatctgcgtatctttgttaaggcagcccgcttgcgtggcgaagcgttggatcatgtattgctgcatggacctccgggattgggaaaaacgacactttccaatattattgcgaatgaactgggagttggttttaaagttacttccggtccggtgcttgataaaccgggtgatttggcgggagtgcttaccagtctggaaccgaatgatgtgctgtttatcgatgaaattcaccgcctttctccggtggtggaagagtacctgtactctgcgatggaggattaccgcattgatatcatgatagataaaggcccgtctgcacggagcattcagattgatctgaatccgtttacgatggtgggagctactacccgtagtggcttgctgactgcgcctttgcgtgcacgttttggtattaatctgcatttggagtattacgatgacgatgtgctgagcggtattattcgtcgttcggcagggatattgaatgtaccttgctccacaagggcagcgtctgagatcgcttcccgtagccgtggaacgccgcgtattgcaaatgcattgttgcgtcgtgtgcgagattttgcacaggtgaaaggttcgggtagcattgatacggagattgccaacttcgctcttgaagcattgaatattgataagtacggactcgatgaaatcgataataagatactttgcaccattattgataaattcaaaggcggtccggtagggcttactaccattgctacggcattgggtgaagatgccggaactttggaagaggtgtatgagcctttccttatcaaagagggtttcttgaaacgtacccctcgcggacgtgaagtgactgaactggcttataaacatttaggacgtagtctttacaatagtcagaaaacgttatttagtgattaactattaattaatatcagtactactttcatatagaaatggtcaaacaaatcatttccagtactcctcctcttgggaggaggagtacccgaagggggaggtggtaggaaaaaaaagattcttatgcaaaccatcatgaacaaatccgacgtaaccggtaatagaaaggagttacgcaaccatagcacttctgccgaagctactctttggaaaatgttgaaagggaaacaaatagccggtttaaaatttcgtcgtcaacatagtgtcgggccatatattcttgatttttattgtccgcagataaaattggctatagaattggatggtgaggtgcataatagacaacaggattatgatgagcaacgtagttattttctgaatagggtagaagacattgaggtgttacggtttgaaaataggacagtattttgagaatccggaacagataatatgggagatagaggagaagttttcttcctaccacctcccccctttggggtactcctcctcccgggaggaggagaatggagatagtactgttaaccattaataattaaacgttaatcattaaataaagtggcggggttaaaaagtttagcaaaagaaacggctatttacggggtgagtagtattgtagggcgtttcctcaattatctgctagtgcctgtatatacgatagctttgcctgcatcgtcgggtggctatggtgtggttacgaatatatatgcctgggtggcattgatactggtattgctgacgtgtggcatggagacggggtttttccgttttgccaataaagggcaggatgacccgatgcgggtgtactctaccaccttgttgagcgtgagtatcggttcattggtattcgttgctttgggattgttgtttctggaacctattgccggatggctggaatacggcgaacatccctggtatatcggtatgatgatgattgtggtagcaatggatgccattcaaagtattccgttcgcttatttgcgctataaaaaacgccctatcaagtttgctgcactgaagttgctgtttatcttcctcaatattgcactcaatcttttctattatgtcatattggaagggaatgatgtggggtatgccttcctcttcaatctggtatgtacctctgttgttatggtgtgcatgataccggaactgaggggatttacctatgtgttggataaagagttattgaaacggatgcttcggtactctctgccgttggtaattctgggtgtggcaggcatcttgaatcaggtggctgataagattatctttcctttcgtttatcccgatgaggcggaagctaccatacaactcggtatttacggagctgccagtaagatagccatgattatggctatgtttacccaggcattccgcttcgcttatgaaccttttgtatttggtaagagtaaggagaaagacagtcgtgaaatgtatgcccaggctatgaagttcttcattatttttaccttgcttgcctttctggctgtgatgttctacctggacatcctgcgtcatgtcatcggacgtgattattgggacgggttacgggtggtgcctatcgtcatggcggcggaaatctttatggggatttatttcaacctgtccttttggtacaaattgattgatgagacccgttggggagcctatttctcattgacgggctgtatcatcctgattttgatgaatatcttcctggttccaaagtatggttatattgcttgtgcctgggctgggtttacaggatacggcgttgctatgctgctttcttactttgtcggtcagaagaaatatccgatacagtacgatttgaaggcgataggcatgtatgtacttcttgccgctgtgctttatgtagctgccgaatatgtatcgatagacaatatctatttgcgtatggcatatcgtacagttttgctgttactgtttattgcgtatgtcgttaagcgtgatttaccgctgaaccaaataccaatcctgaacaaactcttaaaacactaaatgagccgcatggtaaattgtaaattgtaaatcgtcaaattgtaaatgatatgatagaaacacctgaacaaaaccggaatgtttttgccattaaaaagttcctgagcgagtaccttgatctgaggaaggataaggacaatgagctggaaacagtagactccatccgcaagggagtagagtttaaaggggctaacctgtggattttgatctttgccatctttatggcatcgttgggactgaatgtcaactctacagctgtaatcataggtgcgatgttgatttccccattgatgggacctatcatgggtgtgggactttctgtcggtctgaatgacttcgaactgatgaagcgttcactgaagagttttctgataaccaccctgttcagtgtaactacggctactattttctttcttgtaagccctgttgccgaagggcagtcggagcttttggcacgtacttcacctacgatttatgacgtattcatcgcattgatgggtggtcttgccggtgtagttgccctgtctacaaaggagaaaggaaatgtgattcccggtgttgccattgctacggctttgatgccgccgctttgtacggcaggttacgggttggcaacggggaatctggtttatttcctcggagcattctatctttacttcattaattcggtattcatcagtcttgccacgtttgccggtgtgcgtgtgatgcacttccagcgtaaagagtttgtggacaagaagcgggagaagaaagtacgccaatacataatactcattgccgtgctgactatgtgtccggccgtctacttgacggtaggcattattcagagtactttctatgagagtgccgccaatcggtttgttgccgaacagctttcttttgagaatacacaggtattggataaaaaaatccattatcatggcaacaaagacaatgaaatacgcgtggtactgatcggacaagaagttcccgaagcttcgattgccattgcccgcaacaagatgaaggactataagttaggtgaaacgaagctgatcgttcttcagggaatgaataatgaagctgtggatatttcttctatccgagctatggtgatggaagatttctataaaaacagtgaggaacgactggtggaacaaacaaagaaaattacagtgctggaacaaagtctggcaagatacaaatctttcgatgaattgggcaaaacgatcgttccggagctaaaagttctttatccgtcagtgaaaactgtttctatctctcatgccatagaactgacggttgattcggtacggacagataccattacgcttgctgtgctgaagtttggcaaacatcctgatgcccatgagaaacagaagattaccgaatggctgaaagcacgtactggagcgaaaaaactaagactgattgcagaatgacgcaattggaaagtatatcatactaaattattcaaaatgagagtatgccatgagctaaatctaactaaattctcctccttcaagaaggaggagtacccgtagggggaggtggtagctgaagttataaaggacttattagtcataaaataagtttttttacctaccatcccgccctttgggcacccttccttctcgaaggaggggaagtgagttagatatttcttatatactcttaacttaagatataaattgtaatttaaaccaagtatagaatgaagctaaagtgtatcctaattgtagcttgcagcctcttcacgttgacgggacaggcggacgaaggtatgtggatgctgggaaacctgaataaacagacccgtaagactatgaaagaactcggcctgcaaatgcctgccgatagactatataatccgaagaaaccgtcgttgaaagatgcggtagtcagctttggagggttttgttccggtgtggtagtgtcggaagacgggttggtgtttaccaatcatcactgcggcttcagtagtgtgcagcaacattcgtcggtggagcatgattacctgaaagatggtttcgtagcccgtagccgtgcagaggaattgcctaatccggagctttatgttcgttttctgcttcgtacggaagatgtaaccaagcgtgtgctgggagccgttaaaccttcgatgaacgagatggaacgttccagtgcggtagattctatgatgatggtaataggcggtgaggtatccctgaaagactccactttgcttggcgtggtagatgcttattatggaggcaatgagttctggctctccgtttaccgcgatttcaacgatgtgcggctggtgtttgcacctccttcctctgttggtaagttcggttgggatacggataattgggtgtggcctcggcatacaggagatttctgtgtgtttcgtatttatgcagaccgcaagaaccagcctgccgattactcccccgacaatgttccgtatcaccctgaatatgtagcgccgatttcactggatggctataaggaaggctctttctgtatgacgataggctatccgggaagtacggaacgttacctttcttcattcggtatcgaggaaatgatgaataactccaatcaggcgcagattgacatccgtggcgtgaagcaagccatctggaaacgtgaaatggacagtaaagacagcatacgcattaagtatgcttccaaatacgatgaaagctccaattactggaagaacagtatcggtgtcaaccgtgctatccgtaagctgggaatcctggagaagaaacgtgaaatggaacaggaaattcgtcgatggatacagcaaaacccggacgaacgtgagaaacttcttcaactgtttacagacctggaactgaattataagaaccgccgggaggtaaaccgtgcacaggcttactttatcgagtctttcctatatggaccggaattagtgcagcttgcactgaagattctgaacttcgactttgaaggggagcagaaaacagttattgccgccttgaaagatatcgttgagcaatactctaatttggacctggatatagacaaggaagtatttacggcactgttgaaggagtatcgctcaaaagtggataccactttcctgccggaaatctaccatactatcgcacagaaatataatggggatgagaaagctttcgtagatagtctttatgcaagttcagagttgactactccccgtggtttgaaacgctttcttgaacgggatactacctatcagattttcgatgatccggctatctcgttgggcattgatatgctgacgatgttgttcgatatgaatatgcagatgcaggcacctactacggagatcatccgtggggaacgcttgctgaatggggctatccgtcggatgtatacgtctcgtaacttttatccggatgccaattccaccatgcggctgagctttggaacggtatgcggttatactccttttgacggagcggaatatgattattatacaacgacaaagggggtcctggagaaagtgaaagctcatgtgggtgatgttgattttgcagtacagccggagatactttcattactctctttgggcaatttcggaagatatgccgatgaaaagggcgaaatgaaggtgtgcttcatctctaataatgacattacgggtggcaatagtggtagtgcgatgttcaattcgaaaggtgaattgctggggttggctttcgatggaaactgggaagctatgggcagtgatattctttatgaaccgaagatgcagcgtaccatcggggtggacgtgcgctatatactgtttatgattgagaaatacgggaaagcagggaacctgatccaggaattgaatattctcaattagtggacgggcccctgcttttcgtgagggagacaattacttgcttccggacaagattccggtatcggtatccctgttgttgattcttctgccttggctgttgcgcttctttccgaagtcaaggctgaaggatgcatttaccatgaacaaaagccttaagttcttggaatacgctaactggcggtagggagccgactttgataagttttctatttcctgttcatacttcttggtaaacgggttcaacactccggcagaaaggctccatttctccgtattatatcctgccatgatggtgtgtagcttctcctctttagtcagtgtttcaccccacagagtgtggttgctggtattcatttctgccatcagtacccagttcttgtacattgccatcagactgcctcgcagtcctgcattggtgtgtgtatgcgtgtaggtgttgccatagctgatatagcggttcagaaacggagcgattttaatggagatatactctttgtaaggtcgtatttgtatagctgtctccagattgatccggtggaaacctttatgattctcggtagtgcggacaaaatacccgtcctcgtagtaggtattttccataatcggcttattgtcataactatatcttccaaataaatcgacagatacatacttgctttgccaactggcagacagtgtattggcatagaatgtaacagactttaagtcgggatttcctttgcgtatctgatacttatccattgcttgcgagatgtcgttcagatcggacagggaaggagcataccccgacacgtatccgttgtatctgaaaaaccacttcccgttgatagagtacgacaggcttaaggaaggtttgactatatacttctcggaagaatactgctcctgactgttataagttctcatggctccaatccctactgtgtagttcagagcttttatctttgattgatattcggcaaataggtacgtttcggccgtattcatcgtgattttattctctatattacccgaatatctattttgcaaataggcctgtgtatgcttgatacctccggtaaacttacccgtattgaattgtttttcgtagataccttctccaatgatggagtacttctcacctttggtttctgaatagatatccgtatcgttattggcattattaagggctttctgaataaaagtccgttcattcttgctgtccagataagaagccactatatctgcatagattgtctgcttgtttttcagatttctctggtaatagatatccaacgaagggataactactttggaggtagaaaggtcggatatggagtaagaggtgtctccttcatacaatgtactgattctgtccgacatggaactgggagtatcgctgtattgatttctgagagcaatattgagaagttgtttgtcattatcctggtaactgtaattgaggttgaagttaaggttatcatactttactttggtaggttctcccacttctctgttctcctgataagcctccgggaagtggaaactttcatcgttttcgcgtgtccacttcagatctctctgtccccaatatacggtagtgctgagctctgacttattgaagtggtatttggcggcgaggttatgttcgccatatcccgtatcggatactccgttggtgagatcggcagagatactccctcctgattctcttctctttacaatgtagttcaatacagctcttgcatttccataacgtgcgccgggattgtctatatattcgatgcggatcacatctgtcgggcggatggcaattatttcagcttgagtcacttctacgccgttaatcctaagttgcacattgtctcctccgggaatcgtgatgctgttgtctatcggattgatcaggatgcgcgacagttgtagatttctcagtaaggaaactccgttggaagcggctttagtctgcatttcggtcgggaggataatttgccggtcggtctttttgatgatggggctggctgtgacgataacaccttccagcattacattgtcgggcgataagggtagttctcccagattcagattggcttgcaggttgcggatggagagataggagttttcatatccgacgcatgagatacataagatataatctccatcgtttacttctttcagcaggaagcctccaccgttatctgtggcaattccggtgataaatgttgaatcctgagtcagcaggctgacattggcatactcgatgtgctgattgttactctcatcgatgattttccctgtgattttgtttgccgccatcagggaggtacataggaataatactcctgaaatgatacttagtctcttcattttacttattatttttagtgattatttctgttctttgaacatgacaaaggtagggggatcgggggagaaaagcggtttatatgtggcactaaataaagtgcaatgggttttgcaactatctgataattaaagtgttttgaactgaagtttgtagaaaagtttatatcttcctatttcaagtttatatataaagaaaagtgcaaaaaatgggatgccgtaacttccgttaattgataaatatctatctttgcaaagacttaaagcaagaaggaaggacggcatgaaagcattgaaacatggtttgataggttgggtatgcgtgttggcattggcagcatgtgcagaagccctgccgtcgcaacgtatccagatagaaaaggcggagcagatgttacagcagaatgcagaggaggcgattgctctgcttcggtcggtgaaagatcccgaaatattgccggattcattgcgggcacggtttgcattggctatggggcaagcccactataatgcgcattgggtgatgaatgaagactctttgctattatatgctctggattattatggaaggccggatgtacgcgacacattacagttactgcgtacctataaactggcggcgcattacttctacgatagcgagagatataaagaagccactgagatgatggccgaagggaatcgcattgcagccctgcgtggtgatacggcagcctgtcttgatttgctgcggtccgtagcgaatataggggaaggtaatgatgactttgaaggtctgatacgcttgcagaagcaattgatagctatagagcctgattccacccggcgatattccaattacaacagtctggcgatatcatactactgtgcaaatcagaatgattctgcgctgctggctctccgtaaagctaccgaatgcctgtatacatccgcagactctctaaaggcgttatactatgtgatgcgcaactatgctgatatattgagtgactccgggaagaatcaggaagccatcaatttgcaacgccatagtttacaagagtataaagagacgaaacatcctttcgagtccttatcttattatgctctttcacgttatttcctgaatatggggcaggtggattccgcccgctactatatacaaatgggggatagtgtgcgttcgccctatattgaccaggacttatcgttggctaacttttatttggtacagaaaacgttgatgaattatatagatagccgttcttttacaatccgggatgtggcgttcttctcaaaccggttgtataacaactttatccgtgaccaacgggtgatagcccaaaaagggaaggtgcaattgttactccaacagcagaatatgaatctgcaactggaaaaacagaaagaacggaccttctttgtcggagtggtggctctctgtattttgttgttgctgactgtcgtctggtatttgcagcggagaaagcatttactcgtggaaaaggaagaagaactggaggccttgcgccgtctgctgcatgagacggaaggcgatgaaagcggcaataatgataagtttgtcaagaagatgctgcttcagcagttaggtttgatacgtattgtggctacgaatcccagttccgatcatcaggagctattggtacagatgggacggatagccaataaagatgtagcggtggatgatttgctggtttggagtgatttatataagactatcgacatggtacatgatggcttttatacccgtatcagtcagaagtatggaaatatcctgaatgaaaaggaactgcaactctgctgtttgttaaagtcggacttttcgacgaaagagattagcgtggttatccagcaaagcatacggacggtgtatcaacgtaagacggtcatacggcagaaattggacatggcagaaaaagaggatatcgttgaattcctttcttgtaaatagataggtagatgattgacagtactatcttcattcccctcctcctcgggaggaggggaatgaagatactctatccgcgtcgtccgcgtacctattatgcaattccccggatgcggtcatcaaatgccgacagtgccgcctttgcaccttcacccattgcaattactatctgtttgtagggaacgttcgaaacatctcctgccgcataaactcccggaagtgtggtgcggcaaaaagcgtcgatcttgatttcgcctattggagtcgtttccagcatgtcacggaaaggagcgctattggctgccaaaccaatctgtacgaagataccatccaatgggaaatcccgttcttcactacttacacgatctttgacgcggatagctgttaccttatcaccgtttcccactacctttgtggtctgtgaagaagtgaagatttctacattcggcaagcttttcgccttttcttgcagtacttggtcagctttcagcgtatccgcaaattcaaagacagtcactttccggcagatacctgccaagtcgatggctgcttctataccggagtttcctccaccgataacggctacgtcttttccctgatagaacggcccgtcgcaatgcggacaaaaagctactcctctgcctatatactccgtttcaccatccacattcagtttgcgccagcttgcaccggtggcgatgataacactgggagatatgaatacttcaccgcccactactgaaatcctcttttcttttccttgaagctccgccttctctattttacggtcttcaaacaagtcgatgggataatgattgatatggcttcttaaattgtctgccaactgtgcacctgtagtctgcggtacggaaatcaggttctcgattcctacggtttcctttacctgaccaccgactttttcagctacaatagctacccgtaatcccttgcgggctgaataaatcgcagctgaggcacctgccggcccaccgcctaatacaagtacatcataagtccgtgagataggttctgcatttcccacaggttcggagccgaacatttcttccagcttttgcagaagttcgcctaaggtgccgcgtcctacatgaagcaatttaccgttggcatagacggacggtacgccttgtattttcaatgcatccacttcttcttggaaaagagcaccgtctatcatttcgtgtgtgacctgtccgttcagcaaagccattatattcagggcctgcaccacatcggggcagttggtacatgtcaatgatacataagtctgcaatgaaataggtcctttcaacgcctggatgcgtcggctgatggcttcatcaggaagatttttcccctttccatcggcattcagtactgccagaagcaaagatgtgaattcatgaccgttcggtattccgcggaatttgacaccggtttctttcccgtttttcagcaaagagaattccaatttcggttcttcggtttcagttacctcacaggagagtttatcggaacatcctgctacatctttcagcaactctgtcagttcctgtgcgctttcgtgccggggatggcaggtgatatgaaaagtgtactgcgcttccaggttttggaagacgctgcgtacttgatttaaaatgcttgtttctaacataacagtctatattaatgtattccgttggcgggattaattcgtttctgtacggttttgagggaaagttgacgagttaacaagttgacaaggggacaaggttccatgcggcatagaagcattgcgcagccccttgttcccttgtcaactcgttaactcgtttccttcctttcttttttcgatataaactaatctcgccaacgggtactaatgtaagataaaagaggccccctctatgtgtgcaatggataaaggggacctcgctaataaaaaagggatgtgaacttaaattttaccaaccaaatctatacttggtttcagtgtttcgccgcctttcttccattttgcgggacatacttcaccgtcgtgcgttgcaacgaactgtgcagcttctaccttgcggagaagttcgtcggcattacgtccgatgttattgtcctgtatttcggcaatcttgattttgccttcggggttcacgacaaatgtgccgcggtaagccataccttcttcttcgatcattacaccgaatgcgcgagtcagcacgcctgtagggtctgccagcatcggatacttgatcttacgaatactttcggatgcatcgtgccatgctttgtgcacgaagtgagagtcggtacttactgagtatacctctacacccattgcctggaattgctcgtatttttcagcgatgtccaccagttcggtagggcatacaaacgtaaagtctgcgggatagaagaagaatattgcccacttgccttttacgtcttcgttagttactgttttgaaacttccgttctggaatgcctgaactttgaattcaggaagctgagaattgataattggttccataatcttttttgttttaaaaggtttagtactttgttttttcgatgatgcaaaaatatagcatcttttgccgatagaacaaaaaaaacgattgaaaagatttatgggccgatagacgaaatctatacaacgcactgagttgcccgcagggacagcatttcgcggggtacagaggcttgtatttcttttgtgagtacctccaataaagtggttcgtatgaaatgttcgttggtgatgagaatgatctgccgggtaggagtgggaatggcaaaggggcgcaccaactctttctgtgtatcgttgagctgatcgattgcaagttcgggaatgaaggtaacacctttaccgctttctaccatacgcatgaatgtctccatgctacccagatgataagcgatctggctggcttgtgccgccttcatctgacagaagcggactaactggtcgcggaagcaatgtccctcgtcaagcatccaaagctgttcgtcgctgagatcggaggtacggataatcttattatcgaacagtttgctttcgcgcgcgatataagcatagaattgttcgtagaataaaggtatctggcggaagtcatccttttcaggtagggtggcgatgaggccggcatctatctctccttttataagagcctgtttgatgtccttcgtcttcatctccgttacgcggatatccaatttaggatatttcttcatcagttgcggaaagaagcggggcaacaggtaaggggcaatggtggggagtatacctaacttaaagacacccgataaggagtgcttctcttcttcaataatatcctttatatggcctgcctgttccaatacgatacgggcttgctctattacaagttgtccgactggagtaggacagatgggctgttggctgcggtcgaatatcttggtgtctaactcgtcttccagtttctgtatcatggcactcagggtgggttgagttacacggcaatgttccgcggctttggcgaaatggcggaactgactaacggcaagaatgtattccagttgttgtaaagtcatgataaataaggggtttgaacgggttatatagattctgtctatgcaaagatagaaattatctgtttgacaagcatgggtttccgccttatctttgtacaaaaaacgaagaaaggctgcatctcagcataatcaagcaagcttgcttctgccttcgatttgcactttctttgcaacagaaaaaagaaaaacagtataaattattaaaaccatagaattatgaagactttaaattatatcaagttaaatgaatcgggagtagctaacgtagtatctgcattgcatcaacttttggcagatttccaggtatattacacgaatctgcgcggtttccactggaacatcaaggggcatggtttcttcgtattgcacgagaagtttgaaagtatgtatgacgacgcagccgagaaggtggacgaaattgcagaacgtatcctgatgctgggtggtgtacccgaaaacaagttcagcgaatacctgaaagttgcaaagatcaaagaagtatctgacgtggcttgcggcagcgatgcggtcagcaatattcttgaaacttacggatacctcattggtgaggagagaaagatcattgaactggctaatgaagcaggcgacgacgttactgccgacctgatgacaggctatctgaaagaacaggaaaagatggtttggatgctggttgctttcagcacaaaaggatgcacagacaaataatatataggtttaggtgataaatgatggaaaaggtgatgaagtggtggaaacactgcttggtcaccttttctttttttctaaaaatactacctctcaatagtagatgtagtggcagtcttaacagatagccctaatccacgcaagtattggcgtgtattgaaaacacgcctaaaaaagaaggcagtgacttctccgcactattcaatctattccatcgcctaaggcagaaccttttaagttatggatggtgcaagtggctgtagaatatcttgaccaaatgcaaggccccgaactttccattaaccaagcattaatggactacagagtgtcggcatttcccgctttattgaaattgtacgcgtattcggaagaagactatcgcttgactatggtcggaaaacaatactcttttcttccgcagtcatcggctaccaaggttttgaaatggatcagaaacattcgcctcgccctcaaagggataagcctgatggcggcttgtgctctgattgatatagcgttgaatctggaagatatattgagtttcttcgagtcaggaggaagatcctattttcagtatgatgtggcgcaggatttcttggcgcctatccttgttacactgggtgtattgataggtgatatcatgcatttggccggattgtatggcatggaagatttgtcgggaagcgaagatgcgaaagcgatgacgaaggtgcataaaggcttctgttcttttgttgataggtgatattattccgggtgtaggctcagtgatatcattgataggatatgtgatatattatctggcgtggaagaataatatttgcaaggcatcgtttgtggaagtgaagtaactgtgccctaatttatgcaaatatctcctttctgtcggtttttgagagaaatgctctttccgttctttcagtctttcagccctcccgagctccctgttcatcggcattccggctgaaagatgcctgaaacaacattcaggtcggaagtttcagccggaatgccgatgaacagggagctcgggaaaaactgaaagactgaaagaagaaaaagtttttttatgacttagtaatgttaaaaaataaatagagggggataaacgatcatttatgtaccaagctgttttatgaagaatgattaagttcttttttgaagaatatttgacctgaaaacaagtaatgatgtgatccggtacaagtaatgttgtgggtgattacattgcttgttctcatccataacaagcaatgtaatttcaggcaatgatcaccccatgactatgcttggatttactttacacttttgttttgatatatactgcttttcttcacagttaaaaatagtcttcctgtttaagtttacatcttggattttacgttcctgataaactttacacattcccttgccggttataaatatatacatcttctatagatgtgtatttttccatgacccaattagccattaattatatatccgacaaggaatattatgaaaaacaccacggtggtttgccttagcggctggaggcgtgaagcctccaaagagcgttaagctgctgtgctaaccctcatttccttgggtgttttcatattattactcctgtgtgggcgtatattattgtagaaatcaataatccgggctatcctgattcttgcttcgacaatattcccgggacgtttctccctgtatagccactcctgttttataattccatttaccctctcggcaatcgcattgtcagtgggattcccgtcttctgtcatactaatggagatattcatttccttgagcctgtccacatatctattacaacaatattgtgcccctctgtccgagtgatgggtcagtcgtgtgaaatcagcctcgggaaacatggttatggcctggttgagtgcttgcagagtgttctccgctacaagactctcggacagggtccagcctactatctcatgggtaaacgcgtcagtaagcaagtggagatagcagatgccgtcgtccgtttcaatataggtgatgtccgccacccataacaggttcaaggtgggaggcttatatacttttatacggttcttgtacatccggtagttatggttggagttggtggtatgacggcgttttaaggcgggaagcatgagccccttgcgacgcagcaggcggtagaagcggtcacgccccatcagcttgccttcatatatatcccgcaaaatgagaaacagcttgtaagcgccaataccgggtgccaatgtgcggatttcctgcacaagcccgatgacttttacttccgtgagaattctctccgaaagaaccctggaacttaccgaataatatccttcccggcttttgccaaacagtgagcacaggcatcctatggaggtcttgggatgcctgtgacgaaggctgtttactgcttggcgccagctttttttaataaatcgacgccatattcttcacgaccgattttgagaacttcattcagagcttcattacgaagttcggaatattccagagcctggcgtaggcgaaggatttcagcccgcatttcttgctcgcgcgatggggggcatgccttttcaggcttgggggatttcttctgacgcatcttcgatagtcggattagtaactcatccgacaaagataaatctttttcagacaagacaaaggctttttcccatctgtgcatcgtgccgcagtgcagaccatatttcttttctatgaaatattttgtcgaaccgctacggtagtagtctattaatacttgatgcttaaaatctaagctaaacgtacgtttggagagtgagtcttttttcatctttacagctttttagtgttaaaatggtgtaaagtaaatctgtattaagacacaggatatgtaagaggcacgtaaaaaaacaagtaatatatgtgtacgaatgcccttttgtacaagaggaaaatcatctctgattatcaatatgttacaaattcccaatttcttgtcgacaagaagttaggagaaatgactgattttccggtttccttacactgcatgaacctcgtgattgacaggatgaatggcggattaccagaaacttccggagcctgcgtccaattatctgtatcggaaaggctgaacgcatttctttcatcctgttcttttagcatctatatatcggtggtattggatatatagatactgcatgtccgatatatagatgcgacatgttcgatatatagatgctatgcgtccggtgtatatagctaatattcagaatatgagttaaatttctattggttatgttttgtgtatttttgacgggttatgaattaattcaccacagattacacagattgacacagattctattttactgattattagattaataaatctgtgtgaatctgtgtaatctgtggtgagtcttattcattcctataccgttatgaattaattcttttaacttctaaacgaagtgataactcctttaactcctgcgtatgaattatgtaggctaacccaaatgttttttcctgtattccgtaggagtcaccccataaatctgcttgaagcatttgctgaaatgctgtgaatctttgaagccgaccttataagccacttgggtaaagttatccgacccctcttctatcagctctgccgctttcttcaaacgtatgtttttgatgagctccatcggtgagatacctatgagcgtctttatctttttgaatagggcggagcggctgattcctgcttcttcaacaagcgtatctacgctcaagtccggatgatccagatgtttgttgatgaaacagacaatcccgttcagcaagtctttatcggcttgcggaagtgagcgaagctcttcttgctcttcggaatcgatattgctttcttctttattttgtatgagttctgaataatacagtgcctgaatccgctttctttgtctgatgatattccatatcttggctatcagataactcgcactgaagggcttggttatgtaatcatccacgcccaattccaaaccttcattttgattttccacatctgccttactactcagtaaaacaatcggtatgtggcaggtataagtattggcttgtagcttcttgaccatttcgatccctgtcatttccggcattacaacatcgctgacaatcatattcggcaggtacttgattgccttttccaatccctcttttccattggaagccgtgatcacacgaaactcttcggaaagaatcgtatgtaagaagaaaagaagctcctgattatcatccaccactaaaatggaactcttgccgcagtccttacaagtctcttcttctgcttcgtaatcgtctctcagaaagagagtatcattctgggatagctgaggccgttcatcataatctgatagaatgaactccgtttcaggtgcaaaatgctcttttcctttacggaagtagatggtgaaagtggaaccctcgtttattttgctctgtaaagtgattttgcctttgtgtaactctaccagttccttgactaaagacaaccctatgcctgtactttgtttcttgaagatgtcggaactcacgtaattctcgaaccgattaaagatacttttttgtttttcctgactgatgccatatccctggtcggatatttgcagaatgatattggtatcagtttcctgaacagacagatgtatgactgttcctttgggtgaatatttaaaagcattcgtgatcaggttgaagagaatgctttccaatttatccggatctgcccataaaaatagaggcgattctttagattcaaaggtgatttcactttcccgttggatggcaattgactggaaattatttataatatgttcgatgaatggggctatttctattctttgtactgtaagtttggattcattctgtatcttctgcaaatcgagtacctgattgatgattttcagtgtatgtttggtgtttcgttttaccagagccaggtcttgctgaatgacaggactcaagtccttttgtgagagcatgtggtctatgggggctacgatcagtgtgaaaggggtacgtagttcatgaatcatatctgtgaagaacttggtttttatatctaagatatgcttctctattgcaacccggtttctgagtttatagataacaaacagaatataggttgaaatggcgacaatgaggataaatataatgaaatacaatatggtaccgtaaatggattcccagaatgaaggcaatatggtgatggaaatctcctttatcttattactccatactccgtcactgttggttgatttaacctggaaacaatagttccctttaggaatgtttgtatagactgccatacggttgttttttacatagttccagttgtcaaagcctttcagacggtaggcgtactctatcttattggggaatttcatgtccagcgtttcgtaattgatgctgaatgagttctccttgtggctgagggttatgccggaagaccggtaggagggttcctttttttctccgtttatgtggatatctgtaatgatgaggttggaggtatagctgttcctcttcatttgctgagggattattgataataatcctctgtctgttccaaacagcatttcattgtttgagaggcgacaagccctgctgtccgtcagtaggagcccttcgggtagaaatctgttatcatatatttcagttgaatcattctccagaaacagacggtacagtccgttttccgatggaatccacagattaccttcattatcttccgctagcgtcagcggaacgttggagatcatctgtggagatgaatagtttttgaatatcccgttgccttgttcgtcaaagcccgtaagcttgtcgaggcctccaccgaaggttgctacatagatttcatgtttgctgttttcgaaaatatcataaacattgtcgcagctgaggctattctttgcattaccgttgcgcacgatgggggtataggtcaacttgtctttgctccatctgcaaagcaatatacctgatgtggttgccagccagatgttatccagatgatctatgcagatattcttgattcttgaaaaacgggacggatagtctgatagtttattgcccgaatggataaagcgctcatttccgtttgcatctttagttatctggttaagtccgccacccaatgtacctacccagattctgccctgcttatcctctttcagtgaaaagatggagttacagttcagactgaatgtgtcagccgggtttgctttatagtatttgagttgaaagcttagtttgccttgaggtactaattttatgattccttcattgcgagttcccatccatatatttccttctttatcttgcagcaaagcatatatggcaccaagatactctgcctgatgagacaactttccggtggaatttaagaagccaaggaagtttttatccttgtcatatacttgaatatccccattcttgcctccgacccaaatgttgtggtcagcatcttccattatacttctcaattcgttcgtggacggatatcctttgacgtcaggcaccgagagagtgaaaagatcattcttgaaagatacctttataagtcctttcggctgtctggcaatccacaggttattttggttgtcgaagtagatcttctttattctgggttgccttgattcctggctgtttctgctgatcgagaataaaaggaactcatccgccttttcatcataatagttcagggcttcattcttggagaatacccacagtcttccgttgcggtcttgtgacagggaacgttgcgagttgttatattcttgtgtttttagctgataatgcttatagtacgtgctgaatggtttgatgcgggtaatcattgccgtgtttttgtaggccacccatatatgtttctgattattatcttcatataatgcattaatctggttgcttaacagttgattcgaggtggtatagtgggtaccctctccctgatacccttccgtcagaaagaagccgtcattttctgctatgacaaggaaatgcttggaatcataagctttgattcttattagggggctggtggtattgaacttcagtatggaatgcgtatcttttttagggtcgtagatgtagagttgcccgttgtctgatcccagaataaacataccttcccactttctgaaactataaaagcggttgggggaagataaaataggtgtgagtttgccgtcttctttcgagaatttgtaaatccccctgtcagcgataatccaaatgatatcctgattttgaacaagacttatgatactacggacttgggatgaactatcaagaatttgcagacaatccatcgtttcttcattgggtctgattcttaacaggcgtccgtcagtctggaatacccaggtatctccatcggaaagggtaaatatattttggacaggagccgtttgcgaagcaaaatgatcgaacttgctgttctccggagaaaaacggtaaagcgagttctcatcatctaatagccacagctgattatgagcgtctatctttatattatcaatccggttggtagctaaatcattcgagtctccgggcagtactctgtaagttacaaatgaatgtccgtcgaaacgacagattccgttccaggtggtgaaccacatatatccgtttctatcttttgtgatgccggttatggtttgttgcggcagtccgtcttcaatgctgtagcgggtaataacatgctgtggctgcccgaaaaccggcggacagaaccaaaaaatgagtatgagtattgacaggtataatttcattttgtatttattgattttttaatcggaaaaactgatatgccgttatgtaatagacggacaaacacaattcttgtacgcttatacaaagttaaaaaacattcgttaggtagttttgcaacaaacaacctttaattattaattaatttagaattgatgaaaacatctattaatctgaaaaacatgcgaatattgcttagtatgctattcgttttcctgagtgtcaatgccgtcgcacagaacattacgggaactgtaaaggacaatctgggagaacccgccattggtgcttccgtagttgagaaagggacaagcaatggaacgattaccgatgtagacggtaagtttactttgaaagtttcaggaaagtatcctattgaagtttcatacataggatatatgacgcaggtgataaatctgaaaggcaaaacttctttgaacattattctgcaagaagatacgaaaacactggatgaggtggttgtggtcggttacggtacagtgaagaaagctgaccttagtggttctgtcgtatctataaataaagaggatatcaaaggtactccgacaagcaatgtgatggaggcccttcaaggtaagattgcaggtgccgatattatgatggggtccggtgcagtaggcgaggatgtggacatcttgctgcgtggttcccgttctataaacggcagcaatgaacctctgtttatcattgacggtgtgcagggagccagttacaatcaactgaacccgagtgacattgaacaaattgatgtattgaaagatgcatcgtcaactgccatttatggttcggcgggtgccaacggtgttattattatcactacaaaacgcggtgccgccggaaaggtgactgtgaatctggatacaaagtacagtatctcgggcggagctaactttgtgcatggtatgataggtgatgagtggtatcagtatcagagggaatattaccgtactaagaatggtgattatccggaaaatttctttcagatgtataactctgaagccatacaacaggcttatgagaataaccaatggatagactggattgatgaggctacacaaggaaatgcttctcagaaagatgtgaacttatccatacggggcggaagtgataagatcaaggtctattcttcttttagctataacaatacggaaggtttgctttctaatgaaaatcagacgcgttacggaatgaggtttaatgtggactatgacattcgcaaatggctgaagataggtaccagttcagcgcttacttatacaatcaagaactcgcgaggcaagaatatcttcactaaatcgttgactgcatttcctctgggtaagccctatgatgataacggcaacatcaatgttgaatttatcgaaggagaaacctcgccattcggagatgaaatagagaatcagtatgccaatgaaacccgcacgatttatgccaatgtcaatgggtatctggaaattattccattaaaaggactttcattccgttcgcagatcagtaccacgctgagtagttcacgtaacggacagtatattggcgaacattctttgcaaggagttgaaaacgggtattcgtcaccttatgcatacatcaataacaattatgggtatagctacttatgggataatatcctgacctataactttgacttcctcaaagatcataaagtgacgttgaccggtgtgacttcatggagccatggacagagtgattacaacaatatgcgagcttccggacaaccacttgattcgtatttgtttcacaatatggcttcggggattacgaaacatggtgtacaatcctattactctcagaatcagaagatgtcttatgctttgcgcttcaattacgtatacaaggataaatacattgcttcatt

SEQ ID NO: 6378 - DNA, 11825 bp, Unknown
  gut microbiota DNA sequence
taatatggcttcggggattacgaaacatggtgtacaatcctattactcccagaatcagaagatgtcttatgctttgcgcttcaattacgtatacaaggataaatacattgcttcattcaccacacgctgggatggtgcatcccatctggctgatggacataagtgggagtcattccctgctggtgcactggcatggcgtatctcacaagagccttttatgcagagtacggaaaaatggctgagtaacttaaaactcagattgagctatggtgttaccggtaactccggaggtatgggagcctattcttcacagaccggagcagcgacttattcggctgtttccatcgacggtgtgttgagttctatgagccaacttgtctctccttatggaaacccgtctattggttgggaaaagacataccaatggaattatggtgtggacttggggctgtttaataatcgcatcaatctgagtgtagacttttatgattcaaagacaaaagaccttttattcagccgtacattacctataacttctgctattacggcctggggatctcccatgactacttggcaaaacattggtgaaaccagcaataaggggtatgaaatacagttgtccactgtgaatatacggaacaagaacttcgagtggtcttcatccatatcctatactcacaacgatgaaaagattgtaagtctgcctgacggtgaccttattgccaagaaattgtttgaaggacatcctatcaagacattctatgactataaatatgccggaatatggggaactgccgaagaggaagaagccgcaaaatacgggtgtcaaccgggttatgtgaaaatagagacagtggaacaattcactacagatgagaatggaaaccttgtgggagacggtggagtacatacttacagtaatacacgtgaccttcagatattaggttctaatgtgcctgatggtatcttaggcgtaaacaatacatttaagtatagaaattttgatctgagtgcttttgttatgctaagatatggacaaatgatagatagtaaaactatcggatggtactctactaaaaacaataaccaacccaaaggtactgactactggactcctgagaatcaaaccgcttatttcccccggccgggtattgccagtactacgggaatagagtctttaaggtatattgatggttcttatgccaagataaagaacataaccttaggctatactttcccgaacaagctgtgtaagcgcctgggaattgaaaagtgtagaatttatggaactgcatataatgtatttgtcctgccgtttaagagcgaattgaagcatacagaccctgaaaacaacggttctgataccttcccgctttacaaaacttatctcttgggacttaatgtatctttttaactaataattcaataagaatagatatgactacgaaaataaaaaactggctgactgtaacagtaatggcagtgacgataagcaatgcttcttgtacacttgatgaatataatccttcgggatacactatggatgcgttgtccgtttcggtagagggctatcaaaccatacttaataatgtttatttcggtatggaaagagcactgtatggatatggacagtttatgctcatgactgaagggggaacagacatttggacttcacagaaaaatggtgataacctctacctgaaatatggtatgggttctgactttgctaataacatgatggctaacacgttgaactgttgttatgatggtatctgttattgcaatcaggcaattgtgaaggctgataaagttcctttcactaccgatgaggaaagaaacaaaaaggttgcggaagctcattttatgagagcggtatattactataatctggtggaacaactggggggggtgaaattgcaaatggctccagtagaaaatgtagatttacatcccggtaaagatactccgctggatatctatgagaagtgtattattccggacttagagtttgcggcacaatggttaccggtggaagaaaggactacccgtccttctaaaaaatcggcaatgggtatgctggccagagcctgtctgcaatccatagaatatgattcttctaaaaagtatgcacaacgggctttagaggtagccaaagaaatgatggaagactgcaaagcgggaggagcgactctgggagtatctatgtatgataatatagaggaagtcttcgctgaaagcaacaattttgagaataaggaagccctatggaaacaccgttatgtggtgggaggtgtaagcaaccaggcttggatcatgaaccagaatgatgagcagttctattgtccgcttacagctttctcagccattcagtttaagacggatttacattccggtaatgaatatgatggtttgtccgattatcagatatggggcagacgtgcaggcggaagctttatgccttcaaaatatctgttggacttgtatgtacaggaagatggcactttggaccccagatatcatgagtattttcaaacttcctggacagggaataaagacaaaggtcaggcatggagcgaatcacaagtgaagcagtttgataagaatctggattctcctgaaatatcagcaatggtacctgatccgataaccggtgagttggtacgtcagtataccaaaattctgtttggtgaagcggcgctcgaatttatccgtccgggagatgacggatatgcggaaaaggcagcggtaaagaaggactcaaaaatcctgtatgttgactacaaggatttgtatgctgaggacaacacggtgattatggattatcacagagattatgataatacggatgtagtcagcccttggctcagtttctatccgtcgttgatgaagcataacagcagcaattattacgttaataacttgagcaagaagcgtctcggaaatctgaatgctacctttatgatgcgtactcctgaggttttcttaatagctgctgaggccgatatctacgtaaatggcggagcaaatgcgatgcaatacataaatcaggttcgtgagcgtgccggtgccaaggctttgtccggtgcggcaacagtagaaacagtattggatgaacgtgccagagaattgtgtggggagtatgtacggttctatgatttgaagcgtacagggaagttgaccagcacctatctgaagtctacaaatcctgatgtcggtcaatactttgtagatggcaaacatgaggtaagaccattcccgcagtcattcctggagaatctggaagagggtggtggttattaccagaatccggggtattaatatattaaattcaaaaatagataagaacgttgaattggatgttcagggatttcatctgcctgtgaaggtagatgaaatcttgtgttatagctatatatcggacgtgttgcatctatatatcggatgtacagcatctatatatcggacatgcagtatctatatatccaacgccacccatatatagatactaaaaagagcaggctgaaagcaggacattctattttttcagtatgatcaccgtaactgccgaaataatcaatccgatgcctaaggcgatgctttgagtgaaaggttctccaaagatgagaatgcctacacagacggcagtcacaggctccatggctcccaatacagaggtgagtgtggagcctatgtttttaatggcgcgtaccagtgccagattagatattacggtcggtaccaatgccagcatcaccaggtttcccagggttatccggtccgggatggcctgtactcggactcctgtcactgtcattccggtgaaaagaaggattccgccaaaaaggaaaacatagaatgtcattttcagccccttcatttcaagggatttcagttgactgacggtgaccagatagagcgcgtagcccaaagcagagagcagaacgataaaaatacccagtaaagtaacagtccctgtcgtatctccatgcgaaaggaagaaaactccgcttaccgctaaagcgattgctgctatacgccaaggggatttcttttcgcggaagaaaatcatcataataagcgtagtcagcaccggatacatgaaatgaatggtagtagctactccgcttgacatgaacttatatccccagaacagaaaaacagcggaacagtcatacaggaatgccagcaggagaagtggaagtatctctttccggcggatgcggaaagactgcttgtcgagcaacagtatacaggccagtgccagcatggcaaagaggaaacggtagagcagtatggaccagaactgcatgccctgatgcatggcaggaatggtgaacagcggaataagtccgaagctcgccgaagagagaaggccatataagaatccgtttactttgttcacgttaataagtgattagtggttagtgatgagtaattagcagttgcactaatcactcatcactaaccactaatcactattaatcatttcttcttaggtgcccgtcttgcccagccttcttcgctgaaatcgggttctttatcacggaactccttgttgtcgccttgaaagaactgtctccaatcgtctttcttgccgcgggcgtcggtatagccacgctcttcgcggcttggtttgcttttctttttgtcagccggagcactttcagatttacttctactttttctgggggcatcgctacgttttccagatgcatcactacgcttttcgtctttgaagctgcgtttcttgccttcaaattccttcttgccgtagttgttgccctcactcttacgtctgcctttgggagcttccttgccttcttcgccggcaatttctacagatacctttcggccgttccagttcgcacgattcagggctttcactacattacctgcctctttctcgtctacttcgaagaatgagaagttcttcatcaggtcaatgcgtcccagttccacgcgtccgcgggtattaccgttcagtaggcctatcagctcatttgggaagaagttatccatcttacccagattgatgaacagtcgggtgaatcccggatctgctttgcggctgttgcgatcaccggtgcgttcgctgccgcctctgctgttgcgttcgccacggctgtcggtaggcatttctatttcttcgcgattgcggtaatattctgagaagcggttgaattcatgagaaaccatacgcttgatcaggtcttctttgctcaaccagtccagtttacggtatatttcaggcatgaaatcagccatatcttcctcattcaccttcaccttttccaggtcatcgattactttcagcagctgtttctcgcaaatctgtttaccggtaggcatttcaccaacaataaacttcttgctgataatccgttcgatttcacgcattttacctttctcgcgcaggttgatgatggcgatggaagtacccgtctttccggcacgtcctgtacgtccgctacggtgagtgtagctttcggtatcatccggcaagccataattgatgacgtgggtcagatcgtccacatccagtccgcgggcggcaacgtccgtggcaaccaggatttgcagattgcggatacggaatttctgcatgacggtatcacgttgtgcctggcttaattctccatgcagtgagtcagcgttatagccgtcctgcatcagcttgtcggcaatctcctgcgtttcttttcgtgtacggcagaaaatgataccatatatttgcgggtaatagtctacgatgcgtttcagggcagcgtatttatctttggcatgaacggtgaaaaccacatgcttcacattgcttgtgctttcatttttccgtccgatggtgatttctttggcgtcacgcagatacttctttgaaatgcgtgcaatttccgggctcatagtggcggagaataacagggtgttacgctcttgcggtacatcggcaagaatggcgttgatgctgtccgtgaatcccatgttcagcatttcgtcagcctcgtccatcactacgttctggatggtggtgagggataccgttttgcgctccatcaggtcgagcaagcgtcccggggtggcgacaatgatatgtacaccctgtttcagggcgcgtatctggctgtctatggatgaaccaccatatacaggcaataccctcaatccggtgatgtatttggaataatcattcagatcacctgcaatctgcaagcaaagttcgcgtgtagggcaaagtataagggattgtggaatccggttctttacattaattttctggataagtggtaagccgaatgcggcggttttccccgttcctgtttgtgcaagtgctacaacatcattattttctcctaaaaggtaaggaatcacttcctcttgtaccggcatgggacactcatatcccatttcttcaatggcgcggcgtatctccggcgacagaccgagctcttcaaaattcttcattaaatctttgtatatctttatattcgggcacaaagatagaacaaatttagtgattagtgattagttatcagcgataaaattgaataacagtgctatttttttattactaatcgtttttcactagcagaatgctttgcagcttctttatttcttctttggtgagtccgatagctctttgcagatacgtgtctacatcaccgtaccgacgctctatttcctccttggcggcgttcaggaaatcttcccttgccgaatagatggtcgtaatggcttcttgcgagcgtgtgggcaggttgtaggcataactggaagcgctgggaatgttgaagtaatcgttacttaggcggtagtcttccataatgatgtcgctgttcacgccgagggaggcgaggatcagtgccgaagcaatgccggtacgtcctttgccggaggagcaatggataacgacagggtaattagtactgttcagcaagatatcaaatatctggcgatactctttatgatagtgcattaccaattcgcggttcatccgctccaccatccggtagacggtgtcgctttttattttctgttcctgaatgcctttcaggatatcttccatatctcccgtttttatagggacatgtattacattaaatccttgttgcagtggggtgtgaccttttaattccgattctgagcgcagatcgatgatggtcttgatgcctatattcttcagttccctgcgtgagtagcattccagactgtctatctgtgcagaacgatagagcatgccccaacgcaccctctttttggtagggtatgacggatacccacccatatcacggaagttttgtatgccggggatattgacattgcgggtagcaatctttacgcgatatttatcattgaatacgagggtgtagtaataacgcttggtagggtctgtggtgacaatcgtcattcgctgatcggaaatgtttgctatggctaccggagaatcctcggggatattattcggatcagtcgaagcatatacctttacgttccctttgatgagaggggctatttcccatttgacgatactgttcccaacgttattttcttcgcaaacaatggaaatatgaggagctgtgccgctacaagccggtagcagcaatacacatgttagcaagttcaacagatttctatacatagtttttttgtctgagcatatatatgcaaagataatgcaaaccgagagcagaataaaatgaacttgttcatttcttatgccgaggtgcagcttatcttcgctttgttgcaaagatatgtattctgatgacttttgttattccagggcacagagtttcacagagttttttctcctttaacggggatttagttaacgggaggcaactgcttggcaaattccggtgatatagagttgttgaaactccggcatacatctgccgcaaactcgatgccgcaacggataatcttgtcccaggtgttctcgcttatctgtcctaaatcgcagtaacgcacgtcgtacttcaataagccataaataataccggcattaaagttatcgcctgcgccaatagtgctgactgcttccaatgggggaataggatactctttggtgatgctattcgtgcgtagtgagatttctttggctccggcagtacaaaggaagttagggcaataaaaacgaattttgtctttatataccttgtccacttctctttgattgtacatatagaaaaagtcttctatagatccgcgcacaatgtcggcatattccaaattttcgatgatggtggacgtcagcttgatagcctcgcttttatgcgacgaccggaagttggggtcatagtacacgattgctttcttctcgcgtgcctgttccagcaaatccaggaccttttcgcgcagcaccggattcagggcaaaataggagccgaaaaccacgatgtcgtcttcttccagttttgggaaaaccacgtccagccgttgcttgggataatctttgtagaagatgtattccgcatcaccattctcgttaagataggccagtgataccggggattttccatcgggaaatacgttgacatagtcagtagacatgccgctatcccgcatggattgcaggattgtattacctacccggtcgtttcctgtctcactgataaagctgacgggaacgcctgctcgtgccagtgacacgacgccattgaatactgaaccgcccggtacggcagctgtcggctggccgttgcggaaaatgatgtcaagaatcgtttctcctataccaattacttttcgcataattttcttgatttttcacccaaatagccaccgtgatggcgtttggagtagtctccaatagtaaatcctgtctgtttcatgacttgtaccacaaggatgtcgccgataacggtcatcacagtggtcgaagtggtgggagtcatacctaaagcacaaacttcctttggttttcctgtgctgaggcatacatcggactcgtgtgccaacggactatccggatttccggtaataacaataaacttgaggtctgggttcagattatgagccaattgtgtaagttcaacgatttcacgcgtcttaccggaattggaaatcagcaacagcaggtcgttctcctgcaagatgcccaagtctccgtgttgtgcttcgctggggtgcagaaatacggaaggaatacctgtggaacagaatgtcgtagcaatgttcatggcaatctgtccggcttttcccatacctgaggtcaccagtttccctttccgccggtgaatctgttccacgataagttctaccgcacgctcgtaagcgtctgtcacggggatgttcagtacggcttgtgcctctttctgcaaaagctcttgaatggattcaatcattatactatttttgttagtagttaggttatagcctacaaatatctgcaattttccataaatggcaataagttttattgtatttttgctttgcgaagataaggggacctcgtcaaattgcgctatctttgcgccctcaattagtttcaaacgtcagaatgaagaagttagcactattacccttgttgggacaccatcaatatactcttgccaatggtttgcgtattattcaccagccgtcattttccgatgtggcttactgtggttttgcagttgatgccggaacccgtgatgaactggagaatgaacagggcatggcgcattttgtggaacatcttatttttaagggtactcagaagcggaaagcctggcatatactcaaccgtatggagaatgtgggcggtgacctgaatgcttataccaacaaggaggaaacagtgatctactctgcttttcttaccgaacatttcggccgtgcgttcgagttactggcggatattgtctttcactctacttttccgcaacgtgagattgaaaaggaaacggaagtgattattgatgagatccaatcttatgaagacaccccttccgaacttattttcgatgattttgaggatttaatcttccgaggacatccgttgggacgcaatatcctggggaatcctgagctgctgaagacctttcacagcgaagatgccgctgcgtttacttcccgtttctatcatccggggaatatggtgttctttgtgtggggaaacctgtatttcaagcaaatcatccgtttggcagagaaactgcttgccgatgttccggcggtgacggtggataaccgtcgtactccgccgtctctttatacgcccgaaaaactggtggtgcataaggatacgcatcaggctcatgtgatgataggcagccgtggctataatgcgtacgatgataagcgtaccgcgctctatctattgaataatattcttggcgggcccggtatgaacagtcgcttgaatgtttctctgcgtgagcgtcgcggccttgtctataatgtagagtctaacctgacttcttatacggataccggggttttctgcacttattttggttgcgatcccgatgatgtggatacttgtatgcgtctggtgatgaaagaacttaaaaatctgcgtgatacaaagatgacttcgctacaactcgcagctgcgaagaagcaactcatcggacaaataggtgtggcttcggataataatgagaacaatgctctcggcatggcgaagactttcctgcactataataagtatgaaagttccgaagcggtttatcaacgtattgaacaaattactccggagattttgctggaagtggcgaatgagatgtttgcagaagattatctgtcaacgttaatttatcgctgattgtcgtttacttaatgggattttgtgtatcctctttccgagcacaaaaataatctggcccggcgtagccataaatcaaaaatggattagttattttgttcataagcagatgtttatatgtagcaataactttccgcatttccaaaagtttcgtagcaagttagaatgattattatgaatataattattataatttgcaataatctaaagcaggataatcatgaagagtatacaagtgaatccctttatcataggtacctatctatcagtccatctttgcggatttaacggagcgccagcgtgagatactccgtgcgatagctgctgaaaatgttgctgtcaatgtgacttccggtgagtttgtgcgaagatatcatctgaaatcacccagttccgtacagtctgccctgaaagggctttccggtaagggtatagtaggtaagatccttgacggatacgttattaatgaccggctgtttaagttttggataaagcggaatccgatctgatgaagtacataaggtggaagcctcctggtccggtgcaggtaagtctgttttgtctactgttaccgtcaggcgaatactattggccacgcaactcccgtcggcgctgcgaaaactgaggtaggctatcaattcatcgtcctgccagtcggaaggaagttgaagttctgcatgtcgggcggaacgtagggtggcttccgtatcgtaaacagcagtttcttcgtctttgttatatactaataacatggctatgtccgtatcttctgcatttcccgtgccactgttgtcctgccagttaaagtgcatcttatttccgtcttgtgtggctgtaccttcgaataccggcatcagggttcccatagaaaccaatgcccggtcaaaatctattttgatttcttttccactgccagtcacggctcttttcagtgtgtaggacatagcggagttgaacgcggattgctgactttggcggcccgtgcgcgtatatagtagtttgatttccagcggaagcctactatcggtcccactttaccggagaaacctccgagaatgccctggttgataattcccatgatatc

SEQ ID NO: 6379 - DNA, 2681 bp, Unknown
  gut microbiota DNA sequence
attttcagttaaaacaatattcccaatattaaaatctccatgcatcttgataagcatattttgatattgagtatatggtaaatcttcatctttccttataatatgatattgcatgaacttttgttccatactttgctctattagatcatcgtagttggtggttactatatgacaaggagttaattctaatatggcgtcatgaataggattaggagcaatcttaccatacaataactgttctttaattttttcgatatattctttgtaacctcttgagtctttatataattgtgctattttcaagtcatctgtttcatattttaaagaatctggtaactcctttttaagtccatgaattaattcaccccatacaggtaccccagaatttgctgaaacacctgcacccacaaatataacgagtttaccttgcctactcgcttcttgtatatgcaatatattcgatgattgtacgttttccatatgataaaaaaacaaattataaaaatttattcaactcttctaccagcaaatacacagtagtagaagattcttgttgtgccggattatttccaccaaactgtttcatgatagttttagcgtgcttaatggcttgttcttgtttaggaaacaaggcattgaacattttagaacttacgcccgatttctttgtataagcaaatccgagcaaagtactcaacatcttttcatatttggaacgatgtaaagccccttggtacaaattaaagtgaagtaaaaaccaaaactcaaaagcctggttgctataagccacttcaaaaccattttggcgtgccaatagaatggcagaattaaagtcattttcaggaaagtcatctttgtcaaagactacccaattctgattgtatatccgcccctttagcttgtcttgctcttttatattgatagctttctgtactaatgataatgtccccataccttgaccaacagctttcacattagcagaagtcaaacgaaaagcattaaaataatccggctcagtattaaccccttcacagataatcaaaaatgtttgtttgacctcacgcacaccactgatacgggttatctttctttcgatacgcggatttatatttttccttcttatagccgtcataatttattcttcttgtgtattaaacaaacgggttaaatctccgacaattggaattgctccatacttgccggataggtaatctttttcaaacgaggcatcattgcgtactttatattctgccaacgaataaagttcggttgctccataacggtctttttgtgtaaaccaaatctgatcccgtcggaatatattagcactcagcaagtttgtatcgtgagtagtgaatattaattgagcatttttcggattggtttcttttgaattaaacagggcaataattctacatgtaagaagtggatgcatcttagagtcaaattcatctataataagacgctttccattatccaaagcatcaatgatagggtacgccaaagagaaatactttatcgtgccttccgattcgtttttcctgaatggaaaagtaatagctttcacctcatggccttcatcatcatattgcgtatgcgtactaacaatcgtattatctattttttcaatattttcaatacctaaatcagcataacgggaaaactctacaattctctgtttcatcctgatgtcatccagttgggtggttgcagtactccatattttttcatcattggaacctaaaataatagtggtatcgttcaaccacttcatgatctctactgctatcggatcattgaattgcgctgcaacagaaagcaataatgcatttgctctcaccattcgtttacctgccagttctttaccaacgacaaacttagtatgaatgtcgaagctatctttttcccggtagaataactccacctctttagccctctttttattagctttttgatagagccattctgaatgtaccaatgagttatcggcttcaaacccataacgatattgattatcttcatcacagaatattgcttcaaaataactcggttcacccgcagtaagcgagtttaaccgaaaactttctatattaatacgttctcctgcttgaatatccttcgatgagtttatcacataccacttaaagaattcaaatgccttaatgaaattggatttgccggatgcattagcaccgtaaacaactacactcttcatcaacgataatccggtgacgcctacgctaaagattatatcttcagccggaacctgtatttctttcaaagctgatgctgctaatgacaatgtagattgttctttgaaagacaggaagttccctattgtaaattgaataatcatatcttaaccgatttatttgagaaattatcacaaatatatcctttaattttcaaaataaggatttttattagatgaattatattattttatgtctaataacatgtattggaataaaagggaggattagtaattcactaaacttcgtagttccaacgttaccccgtgataaacgattcattatacatatcaaaaaaatgaagtgacggacgaaagaatgtagtacaacattttgcttttttaaagaaataatttatttttgctttcaaatagattactactatgcttttatctaataaatatattgtttgtatctggggaattttac

SEQ ID NO: 6380 - DNA, 12460 bp, Unknown
  gut microbiota DNA sequence
tatcatgcacaaacacccacacggaatcttcaccaactctacttcctgaactggcgcaagcagaaaattgtatgtatacatatcccgacagcgcactacatattcttgaaaaaatgacaccacccaaggttactgataaatatcaatatgcaacgtggtgtctgctactatcgcaagcgaaaataaagaattatgtagaattggaatctgacagcttaatatcaattagctataagtattttcaacaaaaagaagatccacaaagaaaagcacttgcaggatatttggaaggcatatattataatgatgaaaaacacgacgctgaaaccgctctgaaatgttatttagaagctgctacagagatagaaaagacggaagattatcaattggcacacttaatatatgccggaataggtgaaatatatgcatatcgttctttagtagattatgcaacatcagcttaccagaaagcctatgattttgcaaaactatcaaacaataaaatatatattgcctcgtctttagcttatatcggtagagcttattctataaaacctgatatggataaagctattgattactacgaagctgccataaaaacagcaaaagaagcagatgataagcaacttttaataccggatattctcaatgaactcgccagtgttcatacacgtatacataattataaacaagcacttatatatgctttggaagcactacatataaataaagataaagaatccctgccaaactatctaacagtgggagatatctatcgtcagctaaaaatgaatgattccgctcaatattatcttgacaaagctaccacctcagataatatatatacggtatgtggtgcatatcaagcgctatattatctcaatcgtacgatacctcagaattatgccaaagctatgatatattgtgataagttctacacatgcatagattcggttaccaaaataaaacatggcaaagaaatcatagcaatgaaagagaagtatgatcatgaaaagctactgaatgaaaaaaagacattgcaaatagaaaacgagcagattatacgaaacaacttatatattctattatttatagtaataatcatagcatgcctcattttcctctatcagcgtaagctgatacaaaaagaacgtaccatccagatgcaggaagaacagcttcgcatctacagcctgcaaatacatgaaaatgaaatgcagatggcgcagaatagagtacatataatgcaactctctgagcaattggctgcaaacgaaggattgcatgagacaatgatggagcaacaaaatggattggatgaactcaaaaaaaggaatgagaatctacaaaaggaaactattctactacaacagaacatggcggaatattcacaaaagatgcagggaaagctaaaaacacaattaacatctttcgatgctatggcagaagaaaatacacgcttgcgtaaccgtgaagaattcctgtgcaaattactaattccatatataaaaccgttggattctctcataaaatcacccaaacaactcacaatcgttcaatgggcagaagtggaagaaaatataaataagctatacaacaacttcactctccgcctaaaagaacaattcccatcgtttaccaataatgacctgcaagtatgttgccttattaagttgcgcattactgtatctgacatagcaaagatactgaatatttctccggcctctgtctctaagcggaaacaacgaataaaagagcagatcataaaggaacttggagacaacttcgacaaatcacagctcattgatatctggatatgggagtattaaatcatagcatgtccagattcgaataaaagttttttcatacttttctatttattagagagttatcaagatcaatatgtccatattgtgtccataacaattcaataattaaccgctaaatttgtttccagaaaatcaaaagacaaacaattatgaaaaactatgtatgttatttatcaatctgcatgctctttattataagtagcttgccaacgcagccaatacaggcaaaaatcaaaggttcttatactgaattagaggtcgcttttgaaggtaaatggatgtcaaaaacaagaagcctctctcccatccccttcaccgcctccatcagtggtgaccaactaactttggaatgcacctcccctgactatgacgtaaacatcactattgtcaacgccaatggccaacccgtatggcagtgtgatattgcagcacccgaaacatcttttgtttccattcctctcgacagcttacctcaaggtagttacacgattgaaatcagcaatgattacggtggttacttacaaggtacatttcagctttaactatggaaaaggagagacagacttatgaagcctctcctttttcttttctacctcttcttattcaatactaaaaacacaccattatgaaaaatgtcgacttacagaaaatcatttatatgaatacgctgattgcacatcgacgtacaggcacaccggaagtatttgctcaaaagctgaatctatcccgatccgccctcttcgaatatctaactttcctgcgcaaagacttgatgttggaaatactctatagctgctatagccagacatactactatggagagaaggatttctgcgccctgatgggtggagaatgttgcaacaattgccagcgatttcagaatcaataaaaccagcctactatgaaattccctttctataaacaactggacggcatggattgcgggccctcgtgcttgagaatgatagccagatatcacggaaagaaattctccgtgcaacaactgcgcgaacaatcattcatacaacgcaccggagtgaatatgcaaggcatcagtgaagcagccaccagcatcggtatgcgtgccacaggcattcgtaccaccatcgacaagctgaaacagcagtccaggctaccttgcatactgcactggaatcagatacacttcgtggtgctctacaatattgttcagaagaaaggaaaaacctacttttatattgccgatccggcttatggattactgaaatatgaagaagaggaactgaagaaatgctggataagcacctcgcaaggaggtatagagaaaggaatagccatgctgcttgaggtaaccccgcaattctatgacacaactcccatcaagtacgaaggcatatcgctatggcatctgctgcgctacgtacacccttaccggaagatgatagtccagttgattataggcctgttggcaggcagtgtattgcaactcgctttccccttcctgacgcaaaccatcgtagaccagggtatcgggcatcgtaacctgaactttattcaactgatattagcggcccaactgatgctggtattcagccgcacactgattgaggtcatacgacgctgtatcttgctgcacatcagtacgcgcgtcaatgtagccttgatatcggacttcctcgtcaagctgatgcgcctgcccatgcggttcttcgacagcaagctggccggcgacctgattcgccgcatcgaagatcataaacgtatagagatattcctcacccagtccgtgctgagcatcctgtttgcaactatcaccatcatcatcttcggtggagtgcttgccgtgtacaacctgaagattttcctgctctttctccttttcagcatcctctacgtaggctgggtgaagctcttcatgcgcaagcgtgccgacctcaaccggaagaacttcgaacagatgtccgtcaatcaggacaacctgatgcaaatgatatacggtatgcaggacatcaaattgctgggatgcgaacagcagaaaagatgggaatgggaaaacatacaggcttccctgtttcatatcaacatcaaatcgctcaatctggggcaatggcaacaagtgggtgccgtgctcatcaatgaggtgaaaaatatactgattaccgtgctctccgccaccgccgtactgaatggagacatcacattgggtatcatgttatccatacagtacatcattggtcagatgcaaggcccgatagaacagttcgtatccttcatgcagcaagcgcaggacgcccaactcagtctggaacggttgggagagatacacagcaagcccaacgaggaggaagacaagggaccggacagcgacgaacagatatccggcaaccagtccatacaactgcaagatgtgttcttcacgtatggttcggaaaaatcgaagaagattatcaaaggggtatcactgaacatcccggccggaaaaacgaccgccatcgtagggctaagtggaagcggaaaaacaacattgataaaactgatgctgggtttctatccacccacggaaggaaaggtgtgcataggcgggcagtcgctgcaagacctgagcttcaagcaatggcgcaagcactgcggggtcgtcatgcaggaaggatttatcttcaacgacaccatagccaacaacatcgctcccgaagatgacaccgtggacaaaaagaaactgctttatgccgtagatatggcaaatatacgcagtttcatcgagaccctgcccctgaagtacaacacccggataggtaacaccgggcaaggtgtgagccagggacagaagcagcggatactgatagccagagccatttaccgcaaccccgattacctcttctttgacgaagccaccaatgcactggacacggacaatgagaaaacaatccagcggaatctggaccagtttttcaaagaccgtacagtagtaatcgtagcccatcgcctcagcaccgtgcgcaatgccgaccagattgtagtgctaaaggatggcaacatcaccgaacagggcaaccacgactcgctgatatcccaacagggagattactaccgcttagtgaaaaaccaactggaactgaacgcctaaaaggaggagcacgcatggaagaaatctacaaaccggaagacaaggaagcggacaaagtggaactgtacaaccgtgaaaataacgacatactgggcgatatgcccaactggctgatacatacgggaagtcatatcatctacgggcttatcggattattaatcatcttcgccgccctgttctcctatccggacaccgtgaagacaggcgttaccatcgacgacttatcaaaaacagcatggataacggtgggacagtcgggaatcatagaccggttcttcgtggaagaccggcagcaggtgaagcgcaacgatacgttgggtattctgcgtaatgcagcctctatggaggatgtgaagaaattcagccgtgtgctgggagacgtggaggcatattaccgcaccaacgagataaagtacctgaaccgttttccgttcgacctcatcatgggtgaaatgaccggagcttacggacaattcacagatgccgtgcgtacgtgcatgatttatgatgaattcgacatcttccggcagaaagaaagattcctgaaagaggaactggccatactggagaaacagcccgaaaagaatgaaatgaatattctgagtgtcaggcaccaactcttcgacctgagaatggaacataaaaaagaagtggcactaaaccggagaacactggaactggcatacgagaacatgattaacagcctgaagatgtgggaagccagatacctgattaaaagcagcagcaacggaaccgtgattctggggaaaagctggggaataagcaatgtgataaatgaaggtgacaccgtatgctccgtagtatcggaacagaaagggcagcctacaggacgcgtcaagctctcgcaggaagaggttgcggaaatacggaccggagataaagtgaacatcgctttgaagaagtatccggtgcatacttacggatatctcaccggcgaagtggcttccatcgcctacgttccttacagcaaaaactacgcagtggaaatcaatttcccctatggactgaataccacaaccaaagatgaaatagagtatgagataggtctctcggggaaagccgaaatcatcacatcggaccggagcatactgagccgcatattcaccccgctttatcaattaacctctaaataatcaacatcatgaaaactaaaaattccgctaaaggtgacaaccaacgtcagggaacacctcaagatgagaactattctcaagaagaattgctgaatatggacgaattgttcgacctgcaaggtggcatagacgacaagcagttggaaagttgcggactgggatgcttctcaggtgctactttcaatgaaagcaccggcgacaaatccatcaggaatgagtgatgtctatgtgctcaatcctgattacgggctgagagatgatatacatcgtttcattctattttccaaagcaaaccgaaagggaaacgcctcaccgaactggatgtcgttcatacatcccgcccatgcggccatgctcagcttcttcacgcacgaacgaagcctgaatgagaactggccattgctggctctcttttttcactgtgacgcatcgaaagcggaaaggctgatacgccctttcatggagaatcgggaagcattcttcacgacatggcacgaaaagagaatatgtttccccaggcaattgattatacctatggaaaaggcaggaacggaataccgttttcagaaattaccgccctgcactcctacaggaatgaccgtcgacacgtgtaccagacggttatattccggtccgttgctattgacgctgatgctgaccaaccgctgtatgacacactgccgatattgctatgccgatacccgcacgcaagtgcaaaactggttgcccacctcccgcattttagaattgatacgggaagcggcagaactgcctgtgcagcaaatcaacctgataggcggagaaatcttcctgcataaggattgggataccatcttggcggaactggtaaggcacggtatagaaccggaatttatttctaccaaaataccgtttaccgcagaatgtctgcgaaagctaaaacaaacccattataagaatctgatacaagtatcactggatgccatcgacacaacggtattggtacagtctttatccgtcaacaattcctacacctcggaaatgatgcgtggactccggatgctggatcaaagcgggctgccttatcaggtgtcttccgtccttaccacctacaattgtgaccctcgaaccctgaccgatctgttccgctttctatccacattgaaaaatctgcatgactggcgccttacgcctgtcagcaattccacaacaacagagtatccgggttttgcggatttaaaaccttcccatcagaagatcagtgatattttcagatttctgcaggaagcggtcgtacccaatgcgcatttccggattatcctgaaccaaagtgccatagaaaagcaatattatacagatgagggaggaagtatgcacttcaacggcgccgtctgttccgcgctgagcagccatttatttattcttccggatggaaaggttactatctgcgaacaactttactggaatccccggttcatcatcggggatgctaagaaatccggcttaaaagagatctggcagtctccggaagcattgcatctctgcaacctttcacgcaaagacctcagcagacaaagcaaatgcaaagcctgcacctattttgaagaatgcttcgaatacggaaaccggtgttggagcgatatcattaaagcatacggcaaagagtgttgggactatccggacccgagatgcttccttgctccggaaatgaaaaaccggcttgactactgagcacgaaaaaaggctgccctttttcaagagcagccttctattcagtctaaaatcccgtggattattcagccaatttaccgtctgaaccaagcacgttgatgatcttatgcatgtacatcttttccatgttgtcacgagccgggccaagatacttacgcgggtcaaactcagccggtttctctgcgaataccttacggatagcagcagtcatagccagacgagagtctgagtcgatgttgatcttgcaaactgcagacttagcagccttacgcagttcttcttcaggaataccgatagcagcttccagcttgccaccaaacttgttgatagtttcaacttcttcctgaggaactgaagaagatccatgcaatacgatggggaatcccggaagtttctccattacagcgtccaatacttcgaatgccaaaggaggaggtaccaaacgaccagtcttcggatctacgtggcattgttcgggtttgaacttgtatgcaccgtgagaagtaccgatagaaatagccaaagagtcacaacctgtgcgagtagcaaagtcgattacttcttcagggtcagtataagtatgatgttcagcagaaacttcgtcttctacaccagccaatacaccaagttcgccttctacagttacatcaaattgatgagcgtagtcaactacctttttcgtcaaagcaacgttttcttcgtaaggcaggtgagaaccgtcgatcataactgaagagaagcccatatcgatacaagacttgcaagtttcgaatgtatctccgtggtcgaggtgaagaacgatttcagggtgtttgcaacccagttcctttgcatattctacagcaccttctgccatgtaacgcaacaatgtctggttagcatattgacgggcacctttagatacttggaggattaccggagatttggtttcaacagcagcctttacaatagcctgcaactgttccatattattaaagttgaaagccgggatagcgtatccacctttaatagctttcgcaaacatttctcttgtgtttacgagccctaaatctttgtaattaatcattttgtttaaagtttattgttagtgaataaaaattctacgcaaaagtaagcattatccttcaaatggaagaacaggttgggaataaattatcgtattatccccattgaaacaattctattttaaagctattggatgattttaacagaatattgtaatctctatgttacaaactcttttcatctgtagcctttatcagcctcttctgcatacctttatatagataacaaaaaaaccggaaagcaagtttagcttcccggtcttcgtttacacattattatatattactttttcaaataaatgatagtgggcaaatggtcgctgtagccattcaaccaaacacgtccgccatgcgtgcgcaagggagaacctttgtacttgccatcctgctgaaaaagatactcacggataaagacttcattatgatcgtacttcaaacctttcttggctttcagcaaaggacgggagactacaatctggtcgaacaagttccacttgccacgatagagcaatgttcccacgcctttatcttcaagggtttcccaccagggattatagaattcgcccttcttcacctgttttgcatacttgcgtgcgcccagtgtagccatgctttcgtccatgggatcgtcgttcatatcacccatgactatcagtttcagtttcttgtccgtacgcatcagggagtctgtcaatgctcgcacctgcttggctgcatgtacacgtaccggagacttagctccacgggaaggccagtgattgacgatgaaacaaacacgttcgcccgccatctgcccgtctacaataaggaaaccacgcgtcaggtgcacagtgtccccctcaaaaggagtggaaagcaccagtttggaattggtaacggtgaattgttccggatcataaagtaaggcgcaatcaatgcctcgtttatccggaccttcgtaatgcacgaatttatagttggatatagccggttggcttaccaaatctgtcagtacccggttgttttcagcttcggctacaccgataacggcgggtccttcaggtacgcggtcgcgcgatacttcactcagaactttggcaaggttcttcaacttggcctcatacttctcagccgtccatgcataactgccggaaggcaaaaattcaaggtcgttcttacctgcatcatgaatcgtatcaaacaggttctcaagattataaaacgcaacactatacagatcccgctcgttctgctgggcacctgccgtagtgacgcagagccatagggaaattaagaaaagtagcttcttcatgctgaatataaattaaaatactatgcaaaaatctgaaataaaaagcgataaacctattttttgagggaacttttttctaattcggagaaatgcactgcctttaaacaaaggtagactgcaccttaagcaaaaataaatctgaatttattttgtattatctgcgacttgcactatctttgcgctctgaaaaataagaccattacactatttattaccaaaatagtaaccgaatataataattaaaaaaacaaatattgaaatgaaaaaaggtattcatcctgaaaattaccgtccggtagtattcaaagatatgtctaatggtgacatgttcttgtctcgttcaaccgtaaatacgaaagaaaccatcgagtttgaaggtgaaacttatccgttggtaaagatggaaatctctaacacttctcacccgttctatactggtaaatctacattggtggatacagctggtcgcgttgataagttcatgagccgctacggtgaccgtaagaagaaataaaattgacttcttttgaagttaaaaaagggaagactttcacgaagtcttcccttttttattataggaaattccctatcactttgtagggaaaagaacgggaaagagagaaaactctttcctatttttgtatcagcaattttgattgcaagtcaattgtacaaaccataaacgaatccatatgaaacgtcttatcactttcgttgtcctcgccgtcctcctctccacggcaggatttgctgccagacagaaagacttgagcggcccgattgccataaaaggcgaactacaacaacgtatgaggattttcctgccggcactcccgtagtgatccgcaaggtagtgaaaatgaaatcggcagaccaagcaggtcctgacattttctatgcaaccgaaatcaatggtatacaattcgcaataccttcttctgctctgaaaaccattaaactctcacctcccgaaaccaatcaggagttttggcaacaaacttatctgaagcaacatctgtatgagtatttcggcgaacgcggatataagtctaagttgcgcaaggaagtggacgaagaatgtcgggattacctgtacaagctggaagagatcggctatgaggatgatttcatcacttcgtacgtacagaatatctttgcgaaactgactgccaccggcatagatcccaatcgcagcgaacggttgaatgtacgcgtcatccagtcgcccgaaccggatgcttacatgctgcccaacggcacaatgctgattagtaccggtctgctttgcacacttgattcggaggatgaacttgccgccattattgccaatgagatgtctcattttgtgctggaccatcaggttaataacatctaccgtgctgaacgccgtgccaagcgggcagctttttggggaacggttcttgccgtcactgccgaagtagccctggaagtggcatactgggatgacgatgatacagctttaggtgtaggcgctgttgccagcatcggaagcgttgccgccctgctgaatgtaaatgtagtgaatcgcctgggaatgaattacaagaataaccaggaatacgcagctgaccgggttgcacgtgagttattggaattcaaggggatgaatcccgatggattggcgtctgcactttccaaagtcatcggatactataatatacagcaacgcggtcacaagctgcttcgctacggcagcatcgacaacctgaaaaagcgaatagacaaagccggtgaggcagaaaatcaaatcagtcatccttatctcaaagcgacatcggacgtagtgactttcaacgcagccatgaatatagcagaccaacggtatgaagaagctggaaggttaatacagaagaatatcaataacaatctggccaccgaccacgattacgtcatcttagcaaaatcacggatggcgctttacaacacagaagaggtaaatgaagaatgtgccaccctgctttggaaagccaaagaattagcaggagacagtccaaatcttgacatatataaacaagagattctattgctaatgcgcatgaataaacaggctaaagccgccggcacattgaaggaatatctgggattactttcccggtatcaggaacaaggagtgcaaggagaagaggaagaatggacaagcaaagaaatagcctgggccaatcaattattagataagatcaacagactataaaggaaagaatgttataaagtctttttcaccacagattacacggatttacacagatatttatattgataatttaatctgtgtaaatccgtgtaatctg

SEQ ID NO: 6381 - DNA, 20817 bp, Unknown
  gut microbiota DNA sequence
gcggattacgcggatttcacggattaaaagctacgcgctcatccgcacaatccgcgcctaaaatctttaattatcatttttgggtttcatcacttgtttctctaatctctttcaaggcctgttcaacccggttggtcagactgataaattcctgtactgatagttgttctggtcgtttgttaaacaaaacgtcttccgtcagcggacaatctttgccgagtatcggctttatcgaatttctcagggttttgcggcgttgattaaaagtcgttttcactacttgtttgaacagcttctcgtcacaacccaactctttcgtttcgtttcgcgtcatgcgaataactgcacttttcactttgggtggcggattgaatacatgctcgtgtacggtgaaaagatattctacacgataccatgcctgtatcaatatgctcaggatgccatacgttttactgcccggtccggcggcaatacgttcggccacttctttctgtatcataccggtacaacaaggtatcagttctttgttatccaacatcttgaagaatatctggctggatatattataaggatagtttcctgtcagtacaaaaggttgcccgtcgaacaggcgttggagattcattttcaggaagtcatcttcaatgatgttgtcttccagcgacggatattcttcacgcagataggctacggactcataatccaattccaccaccttcaccggacgttcttttctcaccagaaactgggtcaatacacccatgcccggacctacttccagaatggggaggccgggacatgcgtctaccgtatcggctatatcctgtgccactttcagatctttcagaaaatgctggccgagaaactttttaggctttactaatttcatttatcaactaaatcgttacttttgcaccgcaaacggagaccgtccttttgggaaagtgctgtatttgcagcccacaaaggtaatccttttcgacgaagaataacgaattctgcatgaataaactattaaaaaagacactgaagatccttttaccggtcgctttgggcggttttattctttattgggtgtatcgagattttgattttgcacgcgccaaggaggtacttctgcatggaacgaactggggatggatgctgttttcgttgttttttggtgtgatgagccatgttttccgtggctggcgttggaaacagacgcttgcgccgctcggagcttatccaaagacgagcgattgtgtggatgctatctttgtttcctatgccgctaatcttgttttaccccgtgtaggcgaagtttcccgttgcggtatgcttgccaaatatgacgatgtttcttttgccaaatcgcttggaacagtggtaacggaacgcttgatagatacattgaccattcttttgattaccgggattacttttctgatgcagatgcccgtcttccttcgtttttttgaagagacaggtacgaaagtcccttcgctggtgcatctggtgacatctccctggttttatgtcgttctttttagtatcattggtgtattagtattactctatttccttctgcgtatgctttctttcttcgagaaagtgaaaggagtggtgctgaatgtatgggaaggtgtgatgtcattgaagagtgtgaagaatataccgcttttcctcctttacacggtgttgatatggggatgttacttttatcacttttatatcactttctattgctttgcttttactgaacatctcagctttctggcgggtctggtgatgtttgtaggcggcacttttgctgtgattgtccctactcctaatggggcgggaccgtggcatttcgctgtcattacaatgatgatgctatacggtgtcaatgctactgatgcgggagtttttgccctgatagtacatggtatacagacattgttggttattatattgggtatttatggctggttacatttgtcgttggtaaatcgtacgaaacagaatccgtgaggcggagattaaaagacgaaaaaagataaataattctgtttgtttgtcgttctgttcttttgttgtaactttgtaatcaaagaaacggaggcttgatatggagcaacaacagaaattttatccggtaggaatacagactttctcagaaattataggaaagaactatttgtatattgacaaaacgggatacgtctatcgcatgacgcattccgcttctaaatatatgtttctaagtcgaccgcgccgttttggcaagtcgttgctggccagtacgcttcatagctatttcgaaggtcggaaggaattgttcaaagggcttgttatcgagaaattggagacggaatggatgtcatatccagtttttcactttgatatgagtctggcaaaacacgtggatagggaacggttagagagtatgttgaatattcagttgtacagatacgaagaaatctatggtcgactggatggggaagtaatgttgaatgatcgtttaacgggtttaattcagcgtgcttatcagcagaccggcaaacaggttgttgtcttgattgacgaatatgatgctccgcttcttgatgtaatgcatgaggataagaatctgcccatacttcgcaatgtgatgcgtaacttctacagtccgctgaaagcctgtgacccttatttgcgctatgtgtttctgaccggaatcacgaagttttcccaactgagcatcttcagtgaactgaataatatcaagaacatcagtatggacgaaccttatgctgccatctgcggcattacggaagaagaaataaaggagcaaatgagctatgatctgggtttgttggcggaaaaaatgcaaataacgcgtgatgaagtgctggcaaaattgaaagagaactatgatggttatcattttacctggccttcaccagatatttacaatccttttagtctgttcaatgcttttaacgatggcaaatttaactcctattggtttggcagcggtactcctacttatttgatagagatgctgaataaatttggcgttcttccatctgaaataggcggaatagaggctgttgctgcggagtttgatgctcccacggagcgtatgaccagtattactcccttgctctatcaaagcggctatatcacaataaaaggttatgacagtgttttcgacatatatacgcttgatattcctaataaggaagttcgtattggattgatgcgtaatctgattccttcatatatcacaaatgatacgttgactaccactactatggttgtagacctggcacgtgctttatctcgtggcgacatggatgctgctttgcgtttattacagaaatttctttctacgattccttattgtgataatactgattatgaagggcattatcaacaggtctttttcatcatctttaaccttttgggatattatgttgatgtagaagtacgtactccccgtggtcgtgtggatatggtgatgcgcagttggacgactctctatgttgttgagttgaaacttgataagagcgctgatgcggctatgcagcagattgacctgaaaaattatcccgaacgttttgcgctgtgcggacttccggtagtgaaggtggggataaatttcgacacgaaacgacatacgctggctgattggaagatagaacccgttaaataaattgtggggctacaataccttgtctacaagaagttaagagtttgccgacaagaagttaactccttgtcgacaggaagttaactccttgtaatcctctgataatcagtgcccgttttagcctctgattttgcgtttttttatccttgtgtgcgtgccttgttcagtgctcctatcagatatttccctttgctgttcactatactccacttggttgcgtgtattattttccagacttcgtttcccagccgtccgtagtcggacaactttaatatcgctttcgtatcattcggatcgttgatatgtagcccgtccagtgcgagtaggagacattccaggttgtgggtattcttgttgtaggcatatcccggaaactcaatgaaagaatatttcctccataccccgacatcctcccccggcgggggagttagagggggaagttctctattttcgtttgctttgttttgttctgttttgttttgttcgggattgtcggcattttcggtgaaattgtctgcatcctgcatgcaattttgagggttttgcataccatcggtctctttatcggctttgccgtctttaccgcccttatcactttcttccgtcttcaccagcatgtagggcagggactctaagtcccttttcctacgtttggttgcttcgagccatactctctggatctctacggaagtcagtattccgtgttccttataggtttctttgtcgaagaaccccttttccatcagtgtctccacaattccctgcatctcttctttcgcaatttcccttcccactttgttggtgaagagtgtacactgttcttcattccataccatgtagtatccgttttctttgtatatcttgcacactaatttcatgactgccgtttccgctttcattccatacctggcttctatcagttccatagccacttcttcgaagaagctcacctgagtaggaaaataaggtatgctattgtatatcattgccataacttcattctttaattgttaatcattaattgtcaactgtcaattgatcggtctccattccagaaagttttccagttggaagcttctccacgcctgtagttctacatcccagtagatgatgtgcccttctatatgatgtatatcgtatttccgacggaaacatttttcgtatggaagtagtgttgcttttacaaacttgaaggttccgtcctgtttgtagtatgccacaagtgcatatccatactgcatgtggctgatgaggctttcaattctgtcggtcatccatagtgctgcgtcttccgtgtaggctttttcgagcatgattcgtattttccatttctttctgagtgcttcatagattgaagcgggtttctttagttttctcattgtgtttaattttaaattattaattcttagttctttagttggtgtttatgtcgggcataaaaaaagagaagatatcactttggggataaagcgacatcttctcgatttgcggggcttaatctttgctaaagcgggggcaaagatatagtagattgtatatagggtgtcaatatttaattgttgtccatttatttcttatctttattcttgtttttactcttcttctccatcactttttgtagatgttcacctctccagatttctcccaattctatttctattgtcttggctgatagtggagtattgctgtcggagagaaaaagtccccattcagcacccttgtctgccaattcgtgaatggatatgttttcttttttaccgaaaaatcctttgtctctccaattgagcagttctatcattccttcttttcgatatttgggaagtatcccttttaccactctacctttagggcgtccgggttttctcttaatctctgatacattgcctcttaaaggtgaattttctgcctgtttcaggcctttttttcaaggcttttagccatctctttttgtttcataatttcacttatttaacgtaataattaaatatatattaaatgtttgatttgaaaaacgggcaaaggtaagcgtttcttttgtttacaggcaataggtgtgatagaaaaagtttttttgccaataagaaatatgagggtaatttgttgtataatagagtaatacgttgtatctataggggtgtccaaaaaacgttcgtttaatgggcacaaagataatgggtatttttcgaatgtgcaaaatgtttaataaaaatatttttatgataggctctttttactgctatatcgctgattatcagtctaacttttttgtcgataaatatatttaatatcctttcatttttgtcctttttgaatttcttatttttctcaaatcttgacgcccattaaacgaacgattaaaaaatacttttttgagtttaatgtcttcgtttctatcttattaagttaaaaaactatttgtttcggtttgaaagagaatatgtctcgttcaaaccgcgaagcgcacccggaactatactgaaattctcaatagttttcttgtaagtggttgaaaatcagaaatattggtttgccgcccgtactcgtgataagcaagagtttgctgtccgaaaatccctagataagtttaaggcagaagagggtctggatcttgattactatcttcccacgcgaactgtggtatctcagctgaagtatcgccgtaagcgtactgaggttcctgttattcgaaatttaatctttatctacgctaccaagcaaactgcctgtgatctttccaatgtttatggtgttcggctttattatatgaaagaccttttcactcattccatgttggtggtccctaataaacaaatggaagactttatatttattatggacttgaatcccgatggagtcagttttgatagcgaaccctttgctatagggaataaagtaaaggtcatcaaaggggattttagcggcattgaaggtgagattgccacacaagccaataaaacctatgttgttattcgtattaagggtgtcttagtcgcaagtattaaagtccccaagtcttatctgaagctaatcaactaattatatattaatctccatgaattctttactttcttgtgcttttgagcttcaacatgtcgctcatgagctgatgtatcttggtatggacggtgaacctatctattccgatactttttgtcggttgaataaggaagttctcgttaagtccaattctcttttttcctctaagagttccgatatcgaagaagaagccaatctgtgtctggcacttttgatgggttacaatgctacgatctacgattatggagataaagagcagaagaagcaatctgtattagaccgcgcttataacattctggaacaacttccagtttccttgcttaaagttcgtttgttgacttactgttatggcgaaatttatgaagagggtttgcttcaagaagctcattccattatggatcagtgggacaaaggaactttaacttccgaacaagcggaagttatggaagaattgaagaatattgaagagaatcaatatccttttgaaatattacaatgacaaaaatacttataccgtatggaatctatggaacaaaatgatcattttattcctgatggaatgaatgattttgaacgcagtgtaaaacgcgttggcgattgtttgctggcttttattggtcttattattttttcgcctttatttttgatttgttatcttgcagtaaagcatgaagatggtggtgcagccatattcaaacaggaacgtattggacgttttggtcgtcctttctacatttacaaattccgtagtatgaagttggatgccgaaaagtatggtccggcactttatgccggtggtaaagatgaacgcttaacaaaaatcggtaaatttcttcgtgaacaccatttagatgagcttccccaactttggaatgtctttcttggtgacatgtcttttattggtccccgtccggaacggaagttctatatagatcagatcatggagcatgatcctcgttatcgctatttatttcagatccgtccgggagttacttcgtatgctactttgtataatgggtatacggatacaatggagaagatgttacgtcggttgcggtatgatttgttttatttggaacgtcgctcatggttttttgatttcaagatactgtttatgacgtttatgaatattgtgtttggaaagaagttctgatagtttaggatttgtaaaaaaaatatcaatagtgactcgttcgctaaaaaaatagaactgttcgtgaggttatctggagctttgtgtgacaatattgttagttctggtattacattttgggttggcctaatattagctcgtatactaactccagaagaatatggtattatggcaatgattgttatatttgttacaatatccagcttgaactcagtcagatggagtcttgtaggaattatgggatcccttttatttgttatagcaaatcggcatggtgagaatataggtactgtttacaatggatactacatctaataataaaagaattgccaaaaatacattgtttttgtatattcgaatgttactacttatggcagtgacattatatacatctcgaattgtattgaaagcattgggtattgaagattttggcatttataatgtcgttgctggtgtagtagctatgttcaatcttttagtgaatacattgtctaatgcaagttctcgttttattacttatgctttaggaaaagaaaatgagatagagttaaaacaagttttttccacagtttttgccattcatcttctttttgctgtggctttattttttttgggtgaaacaatcggtttatggtttgtatataataagttaatcatacctaatgagcgtctgattgctgcattgtgggtatatcattgttctatattaactgcagttgctatttttgtgagtgtgccttttaatgctttgattattgcacatgaacgcatgggggcttttgcttatttttctatagtagaggctgttttaaagttattgatagctattggtttaatttatgtgccgtatgataaattagtagtttatgcaatctcttatttctttatacaagtttttataaagtttatttatgtcggatattgtttgttgcatttttcagaaagtaaatttcgcttttcttgggattcgaggttagtaaaaaaaatatttgtttatgtagggtggacattgaatgggagtttggcagttatcggatatacgcaagggataaatatattgttgaatatgttttttggacctatagtaaatgcagcacgaggtattgcagtgcaagtacaggctgcaataaatacttttattgaaaactttcaaacagctatccgcccgcagattataaaaacttatgcatcttctgaattccattatatgcatacattggttgttgcatcgtccaaatatggtttttttttgacacttgtacttgtttgtcccataatgctatgcattcagcctatattgatgatgtggttaggaacggtacctgcacatacggatgattttattcacgtcatattaggggttgctttgttatggccattgagaggggcaatgatagatgctattcacgcaacgggtgatattaaaaaatttcaattatatgaaggtactgtacttttgttaatagtacctattgcgtatctcctgttaaagttttggcatgtagaagcggaagtcgtgttttgggtctattttttgatagagtttgttacacaaatatttcgtatatggattgttttacccaaaattaaaatgtctttctcattctatcttaaagaggtctttaggcctataagtttattatttttgctttcgtttatacctttgttttttataaaagtatcggtggaagaaacattttggtatgtgacattatatctgttgttatttggtggttatatacttctttgtgtttttttttgtggtttacgaaaatcggaaagaaacttgattttcaaagttgtaagtaaacagttttctgtgttcaagaaattgtaagtcttcaaattaggtcttattaatagttatttatattgtattgaatttatgcaaaaatggactgtaagaacatctagtatatataaatgctttttatggttatactgtatagtgttgggatgtagagatttgtttcaatcgatgggactgcctgtctttattttcctagcattactattttttattccttttgctttgttagtattggaatttgtacttaatttaaagttttctgttggtacttttttgtttttaactctgattgccttttatctatttatatctcctgttaatgttaatggatttcagttctttttaccattgttctgtgcaggtctagcttttagatatgtagattacaaatatatatcaaaagcctttttaataactcaaatggcgtgtttgactattcgtttttatcttattaatattggactgattgtggaaaagaaatttggcgctgcttggaaggtagaagatggtcgttccgtctatgatttaggctatggcaatgccaattcagcaggtatgattttttttttcttgtgctgtatgattcattgctattggtataatagtaaaaagtggttgtcttttgtgttaatattatttatatcatattttgcttattattatacagtaagtaggactgcttctttttcttgcttgcttcttctattgacctattttattcctaaaaaagtatatgtgcttgttgctaagaaaagaatactattactggtcccattgatagtagccttgcctctgttgttagtgcctttttcatcaaaccttgttttccttgacaagtttttgtctaataggatttactatatgctttatatgttaactctttttcaagattcgttttcgttgataacgggtgtttttatagaagaaaataataattttccgattgataatgtgttttcttacttattagtatatggagggataatggctgtttttattttttattttttctatgtgtctattgtatggaaatcacaaaagatacctttttatatcttagccgttttgatggttataatactttctggaataggagagtcttcatgggctgtttttggacgtttgggctcttctttcttttggttgattttactaaataagacgataattttagcaaatagatgttgattgcaaaatagaactgtttaaatactagtataagtggataatattttattttttcatcctcaaaacgatttttcagggagtactcgtgtattggctaatgtgatagaaacagaatatattggacgaaaaatttctgttattactctcaatcgctctgagggttttttatcaatgttgtctaatgtacaaattattcccattcggcttttgctgcttaaagggcggaaaattccaattgttacatcagtagcttggcggatatacgcctgttggttatcttgttggtatggatggaattttgatgtgttttatatcaatactatattgccatattatgcggctgttgtgggatgtctatatcgtaaacaagtgatttttcatatacatgaaaaatttcttgttcgttcattagggataaggtgtgcagaatatgtctttcgaaatgtgccagcaaaacatatttttgtttcacaatatgtgaaacaaaaatactctccattacggggttgtgaagacattgtgaagtataacaaattatctccatcttttctttctgaaatacaatttgttccgatagagcaaaggaagagaaatacaatactgatgatgtcttctctttcaaaggcaaagggattgtttacttttattaaagtagcccaaagaatgcctcatttttctttttgtttagtgattagtgccaataaagagtctatagtagatttttttgattgtgatattcctgctaatgtaaaattggtttctgtacagagaaatgtacatccttttcttcgaacatcagatttaattttgaacctttcaataccatctttgtgcatagaaacatttggcatgacaattttggaagcaatggcctatggtcttccagcgattgttcctaatgtgggaggtccggcagaagttgttatagatggttataatggctactgtattgatgtaacaaatgttgcgttgataattaaaacaataggtgatatgttgaatgaatcggaatatagacgacttgcggaaaatgctttgattcgtcttggaaactttgtttgatttttgtgttttaatacaaattaaaatcaatgaataatcgtgaaaaaattcgtgcaatagccttttatttacctcaatttcatccaacaaaggaaaatgatgaatggtggggaaaagggtttactgaatggacaaatgtggctaaagcgcgtccattatttaaaggacattatcagcctcatataccagcggacttaggtttttatgatttgcgtttgtctgaatcaagagaagcgcaagcagaattggcaaaaaaatatggtattgaggggttttgttattggcattattggtttggtggcggtaagcgtttgctggaacgcccttttactgaggtgttgagtagcggaaagccaaattttccattttgtttggcttgggctaatcattcttggaagaaaaaattatgggatccaaaggctacgtttaaggataaactattagtggagcagacatatcctggagatgaggatattaaagctcatttttatacagtattgccagcttttaaggataaacgctatattacgataaacgaatgccctctatttttgatttatgcaccgttggattataaggaggtaagtcattttatggaaatgtggcgtaaattggctgtgcaaaatggcttgaaaggtatttattttgtaggccaaggaaatatggtacatcgtaaggctatcttggctttgggttttaatgcgttcaatgatgcatctgtttttggtattcaagagaataaaaatggcctatatttggttgctcgaaaaattgtagctcgtttgtttaaataccccatttcttatcgttatgcagacgcaatgaagtattgggtgcattcagaggctaaatttgatgatacgattcctactattattccaaattgggatcatagtcctcgttctggtgctaagggggtgattcttacaggcgctactccgcaactctttcgaaaacatgtggaggaaattataaatctgataaaagacaaaaaagaagaagaacgtattgtgttcgttaaatcatggaacgaatggggagagggaaactatttggaaccggatttacaatatggagatggacatttaactgcgtttaggagtgtaattgagagtctaaaatactaaaatgataaaggttttattgcttcgaaacgtctcgccaactaactatggtgggataaaaaaacattgcatagaattatcttctctattcaaggacgatatggatatatcattcttacctatcaaggatttacctcaaaagaagatacctattattggaaaaactttttttgttttttcggccttgtataagtatttaaaacagactgaattcgacattgtgcatattcatgggtttgctacattagatgttgtacaaagtttcttgatagctcattggttgaagaaaaaaattgtatatagtcctcattatcatccgttcaagtatttgcaacgtccattttggggtagattatatttttatggctgtttgcgttttctacttcgttttgcttctgcaatcgtaactattactgataatgatactgctttttttaaaaaatatcataaaagagtgtataagattcctcatcagtttgaatcttcaagagaggtatatcgtatgcctgatacaaaacagggaaatatgatattatttgtagggaggaatgataataataaaggaattttctatttgtacactcttgattctaagtacgagatacatcttgtaactaaagggagggttaaaaggaaggattttattgtgcataataacatatcaagcggagagttaagtgctctgtatgaaagggcggctttagtggtaattccttctcgttacgaggctttttcttatgtcgctttagaagcttttgctcatggtacacctgttgttatgtctgatagggtgatgattgctgattatttgaaagattgtaaaggctataatacttttaagttcggtgatataaaagactttttacaggctgtagagaaaactatagggcaatctgtagatatggataaaatattgccacaatttgaaaaggtaaagataaaagcatcatataagaatgtatatgagcgtgtaattaataagtaaagttatgaccctattaaaaacgaatactttagtttcaattgttattcctgcatataatgtagggcgatatatagaagaatgcattctgtctgttgtaaatcaaacttatactcatattgaaatattggtagtgaatgacggttcttctgataatactcctgatgtaatagataaactggcgattcaagacaaacggatagttcctatccatcagcagaatgcgggtgtaagtgcttcgagaaatataggaattaaagcttcgaaaggtgaatatttgatatttgtagatggtgatgactatatagctcctgactttgtggaatatatgttgaaacttgtgaaaatgacaggtggagagttatgtttatctttggatagttttacaaggacgagagagaaacaagtacgtcatgaagttgttgaagttttagatccaataaaagcgacagctttattattatctcctcgaataatagtgggaagttggaataaaatatataaaaagagtatactcttggataataacttagagttctcaacaactcttttttatggagaaggtctttttttctatacaacattttctcaactatgcactaaagttggagttggaaacagaaaggtctattattataggcgtaataattatgactctgctactacaaaatttaatattagaagccttattaatggtgatctggcgattgaagagattcgtaagaacttaaggataaattctactattatcgatagaatgttagagctacataaatgtttgtttagtatgggagctgtagttagaatcaaagccaattgtaaagaaaaggaatactcccaagagtataagaggtttaaaacttatttgcacgagcatgcaccaaaatttatttttagccatgatgtttctctttatcgtagagggcttttgcttggaacctatttttgtcctattttaatggcttggttggatttactaagacgtaaacgtattgcatcagttagtgtagaataatttaagaaatcactatacttcaaatgactgcaaatagtccagaaaaaatatttctgtggagtgaagaaattaattaaataagtactatataaaattagaaatagatgaaggtgggaattctatccatgcagaaagtgatgaattatggttcttttctacagagcttcgctttgaaaaaaacaatagaagaatttgggcatcagtgtgaatttatagatattgagcagggaagaatctttcctgaattaaagcgaacattgctattcttaacaaggaaggtattagaacgctattgcaagtgggatgtgttgaggcgtattcgttatacttatatttttcaacaacgctttttgcatgagttttttgagatgcttggcacaaatattcatacgattaatttttttgatgtagtggtaatcggaagtgatgaggtgtttaactttgcgcaacgtgtgccttggggctatactttacaattatttggtaaggtatctaatgcaaataaggttatttcatatgcaggttcttttgggcatactaccatatgggatattgaacattatggagttaaggaagagataagtggtactttgaattcgatgcgggcaatctctgtacgtgatgctaattcttgtgagattgtggaaaaattaaccagaaatgagcctcaaattcatgttgatccggttttgatgtttgattatttgccctacgtgaagccaatcgataaaaaagattatattataatatatacttatccaaaccgcataagaaataaaaaagagatagatgcgattaaacgttttgcacataaatataataaaaaactcatatctattggattctatttctcatggtgtgatgaaaccataattcctgaaccatttgaagtattagggtatataaaagaagctgattatgtggtaacagatacctttcatggttctgtaatgtctttgaaatttaataaacaatttgcagtattggtacgttctaccaacaaacagaaaatgatttcattattatcgcaatttcatttgactgatagaattgtagattgttctgatagtttggagaataaactcctgcttcatagtgactatgaatttgtaaatagtgaattgcaaaaagagagattgcgctctttagaatttctcaggctgaatcttcaataattagtaaatatatatatgtcacttcagttttcagtattactttctttatattataaagaaagtccaaccgctttgtaccaaagtttagtgagcatatttaaacaaacattacttcctgatgagattgttttagtgaaggatggacctttaactaatgaactcgaaaatgtgttggaggaatttttatgcaagttttcgattttaaagattgtctctttatctcaaaatcaaggacttggcagagcattgaatgaaggattaaaatgttgtacctatgatttgattgctcgtatggatactgatgatgtggcaaaacctgatagatttgaaaaacagttaatcgtatttgaaaggaattcaaatattgatgtgtgtagtgcatggattgatgaatttgagaatgatatttctaatattatatctactcgaaaagtaccagaacgacactgggaaatatttcattttgctcaaagtaggtgtcctgttaatcatccagtagttatgtttaagaaatccgcaatagtggcagttggtggttataagcattttccattatttgaggattattatttatgggtacgattattgatgaatggggcaaacttttataatattcaagagagtttacttttttttcgtgcttctacgggtatgttcaaacggcgtggtggctggagatatgcgctggatgaagtgcgatttcaacggtgtatactaaaaatgggattcatatcgcaaatacgctttgctataaatgttttgactcgctttcctataagaattgcacctaatagcttacgaggttttatatacaaaaaatcattgaggtaataatatagtatcctgtacttttttacgcttattaattgtaatttagacgataaggtgattacatatgaaatttaagatatttgttttttcttatgaataaaataaaatctaatatagatgaagttgtgattcttgagccacaaatacatagtgattctcgtggctatttttttgaatccttcaatcaaaaagaatttgaagagaaagtctgtaaaactacgtttgtgcaagataatgagagtaaatcttctttcggtgtactacgtggtttgcatttccagaagccaccatttgctcaaagtaaattagtgcgtgttgtgaaaggggctgtattggatgtagcagtagatatcagaaccggttctccaactttcggtcagcatgtttccatagaacttacagaggataatcaccgtcaatttttcattcctcgtggttttgctcatggctttagcgttttgagtgaagaagttatttttcagtataaatgtgataatctttatgctcctcaatatgaaggtgctattgcttgggatgatccggatttaggcattgactggcatattcctaaagataaaatgctactaagtgaaaaagacaaaatacaccctaggttaaaagaggcggaatggttatttgattattcagatatgctttattgtgttcctgaataattgatgatcatgagaatatagaaatgcgaatataatttattagggaataataatggatataaattataagcttattgatacccagcgaatcattgattatattatttcttttcctaaaggtgtttccgtagaggagatcattcaaaattccggtgctgaaaagttacgggtatatcccgctctttttgaattggaacagagtggattcttggaagtactggagagggaagagcttggagcaccattaatcgtacgtaagagaatacattaaaagaaacgacaggtaacagcggttattttgttttaggcagcagccgggattactccgtaataaggagtggttccggttgttttatttagttgtgacataaaataaatataaaacggatgcttacaattaaaggaagcatagaatacattagtagctgtatgtatttgttgccgatgactatcggtacttttaataatatggcaataaatcttgctcgttccattttttttttcgtcctttgctaaaaatgtagatgtaagccgaatggagaaagtttgtataaaagggtataaatcctttcaagacataacacttgaattggggcaaattaatatacttattggttctaatggttccggtaagagtaatttcttgtcgttttttgagttcttgaataaaatatacgaacagaagatgactgaatatgtagcgttgaacggtggggtggacaagttctttcataaagggagcaaagtaacagatgttattcaggcagaagtgttttggaaaactaaccgttatcaaattcagttgaaagaaggagacggcagatttgtggtggctcatgaaaaattgggctatgctgctggaagtatgatatattataatgatatagccaactataccaatgaagcaggcatcaaacaatacaaagggctgaagcgtggagactatatcaataactatctgatagaaataaagaaatatcatttccatgatactggcaaaacctctccgtttacaaaagaaagccacatacagaatgatcgttattatctgtatgaaaaaggagataatttggcagctttcctttatgccattcacgaggaaactccaattgtgtacaatcgtatcgtgaaagtgattcaaagtatcgctccttatttttccgatttttattttcatccgacagccgccaatacgttgcgtctgcaatggagagataagtatagttcaatggtgtatggacccactgacttttcggatggtaccattcgctttatagctctggcaacattgtttttgcaacctactcctcccaaagttatcattatagatgaacccgagttgggattgcatcccgtggcgatacaaaaattggcaggtatgatgcatgtcgcagcttcaaaaggtacacaaattattgtggctacacaaagcaccgacctgctctgtcattttgaacctgaagaagtgattacagttaatcaggttgaaggagctactcagatggttcgtctcaatagtgaagacctgaatcattggctggaagattatactttgggcgatttgtggaagcagaatatcgtgaaaggagggcaacctgaatgaacagactcattatagtatgtgaaggtgagacggagcaggaattttgcaaggatgtgctggcgtcctattttcgagaaaagaatatctatatagaataccccacaattaaacattctaatggtggcattgtgccttgggctactttgaaaagacaattgattaatcatttgcacgaaggagaggtgtcagtttccatgcttattgattattatagaatcagggattcttatttgtttcctggttgggaggaagcgaaacaaatagagaatgtctatgataaaatgaagtgcttgttctgccggatgaagaatgatatgccggaagaattaagagatcgttttataccatatattcagttacacgaatttgaaggactgctttttagtgatatttctgtatttaagaataattttacttccgatgaactgcaatttagtgaattagaagaggctgtaaaatcggctgatacaccggaagaaataaataatggtccggctactgctccatctgtacgtttgatgaaggcgattgcgggttacaacaaagtggtatatggggcttgccttgcttcggagatcggcttaacttctattcgtagcaaatgtaagctgtttgatgaatggattactctgtgcttgttgtagataaataccttacccataatactttataataaactttggaataaccgtcctggttatccagttttctttggctattcctgaatatatcctcacctttgcattgttggccaacacaagaatacgtaaaacgaagttgaactaaaatgtaaaaggaggaagattatgcctttattgtattatgcgagacaatcgcagttgaaaacgaaagatggggttaagcagtggcacctaacattgaagaaagtaggaagagctgtaagtttgcaacaattgggagagatggtagctgagaagtgctcggcaacgccgggtgatgtacacaacgtaatcaggaacttgatgtcggtgatgcggatgcagctgctgaatagccgtacggttcgtttggatggtttgggaacatttacggtgattgcgcggacacgtggcaaaggggtggataaagagaaggatgtgaatccgaatcaggtaacatccttgcacttcatgtttactcctgaatatacacgtccggcggcattgggaaccacgcgtgcattgtggcaaggtgtggaatttgaaaagtggacgggtggaactactactgatggaaatgaaggttccgatgatggtaacggaggaaattccggtggtgacggaggcctcgatgagaatccacttgggtaagtggagaattgaggctgcgcggtccatttattattaaagcacaaagtaattaacatgaaaaaagtggtttggaataagattctgaaaattgtaatagcagtggcttcggctatattaggagctttgggagctaatgcgatgaatatgcgataaaaatatcgtgattataaaaatgaacggtgggaatatggtttga

SEQ ID NO: 6382 - DNA, 17510 bp, Unknown
  gut microbiota DNA sequence
tacttgtatatcaatagtatgtaagtatttcaattatgtaataattatccgggatatattcttcttgctgcttctgtgtgaataatataggtgatgatatcaatcatatataataaaatatctcccatattatcattacaataatatgggagatatataaaaatcctattgataaagtctgttgtatgatgttttatatattctttttccaatgaagaaatgaattcttgtcgactttatcttttcctattaattgcaggttgtaggagtttaagcccgcatagcggtattcgccataattgatgccacccagcaaatctatgttcagaaatgcgcggacaagcttcaagccgcatttctctattttttcgactatacattttcctcctaaaaggttcattagtagataagctgaaacttcgtaagcacaccaaccgcattcttccagatacagatggatgcagctttcattagattgttctttttcaaatacttcagaaacttcttttttcatgataatctatttatttatttaggtctatattatatggtacgatcaatcggaacttattttccctatatttaaaacaaacttcccgctctactgttttttcaagagttgaaactattcagattattaacagtataaaagagaacataacaaaatgctatgtgtctcaatactaacgcatgaacaaggacttcaggccatcaaacatacctggaagggctattgtaccatgcacttcgtccgggaactttttgtatatagtacgcagatgttggctcttcatctctggaatgattctttctcctaaactgtcagccaatgcgaactggtccaacttcacattaggacgttggcgggtagcaaaggcaacatagagttgttttcccgaaaagtccttctgaccaacttctttctcggcttgcttcaggaaaactccccggtcccaccataagctgggatctattgccatgaaggtatcaaacgactcaggatagtcgagtagaacctgtagggtaaataaacctgcgtatgaatgtcctactaagaaattacggccgttggcagaaacttttttttctatttccgggcgcagttcttcagttaagaaacgatagaaagccttcatccctccaccttttggagtatcttcaggctgaatactgccatcccgtcgtgcagccgaactggtaggggtgaaatctctggtacggtctgtattcaaaacagcgactacaacacaagggggtaatgaagaaacccttgaagaagcaaagaaacgggtaaaacctactacggaatggaaaaatacatctccatccaataagtagagaaccgggtagtctttttcttcttcacccggttgtttttccggttcataaatccagtacatcctttcttcattcagtatgttggagaataaagaatggcgggttcctatattaatagagtcctgcccttgtaccggtagagaagacgtccaagttatcgtaataagcaatactatataaaaacttttcattttatctgattcttgttacaaagttggaagaaaatattggttttatcaatccctacttgtgggtattttgggtaggattattcgccaaagttggtcataaatctctatctctttcttcttttgttacaagcttctgccattaccccaattcaggctttttctttttgacgaataagtcgtttgtaatcggttctatttcaatcgtataataaggctacaccctttgctcggaatggctacacccttttgtgcttagggctacaccatcctgaccaaagggtgtagctatcctgatgtttggctaatgagacaaagtcatagcctctctttgaagtaaacagtgtgtgatttacttttacatcgtaattgaatgaggtacataaaaatagaaaatccccggaactgattaaaattccggggattctctattctattctctctgttacttctttatctttatcactttttctatttcttccaaattataccgggctgcttcgttaccattccgggcagctttggtaaattcaacgatagcttgatccttattgccactcagcaggtagtagatgccgttattatttgcatattcggctgtctgtttattggatttatccagatacttccgggcatcgggcaaatcttttttagacaaggctacagcggcagcattcaagttggctacttcgtcatcaggatacatacgtacagcgatgtcgaaaaccttgataaagtcgtcaccacctttgggatagctgttggccaccagatacatctcgttcaaactgagatactggggctgtgtcttgatgatctcttttccttcgtctactttgaaattggcaatcgtatagtctatgcggcaattcactttacggagtgcagggtatagttccttcagcattgtacgatagggagcgccaccacctacacgttttatttcctctttccggcgggctatatcgctggtgtttcggatgatattgaggaattcggttttctctttcgtgttagaggcttccagagctttttccagtccttcccaattttcaccgccaaaggagacattgtagagattggcaggaatctgttcgtgtacggacaggtatttcttcaacgcttcggcacggctcttagagagttgctcattgagtttaagcggtccttcgggggaagcaaatccttcaatgtaaataccggtaatggtcaacttcttgtcattctgtaccttattgaacatctcccggatattccgcaactccgtctgattgttcatgaaatctggtagaataacggacttgcctacggggaaatcgagatgagcttcatattgttcgctacgtgcttttactacttctgctttcggctgaatgtaagaggggacaggttgcagtgcagccagacgtttggtttccgtagaaactccgttcataatcatttcctgtgtcagtacctcctggtgtcctccgcatccgcataaatcttcttccagattcagataagcattttccatccatggttcgtaagggatgacttgtgtgtagttcagaacttcctgagtattgtaaggtatctccatattagttgctttatccaaagccatggcgcggagataggccttttgccttctgcgtccgttgataacgatttccggcaatacgacattattgtccggacctgtcagtacgggagttagcgtcagggtgcggtcattgctgactttcaggttccgcatatccatctgcatatttatgtagagcgactctccctgttgccatagggaggcattggtgatgttgatggcatctttatagaatttttgcgcgctgaccggaagtgcggctatgaggcacaaaacagagtatatcagtattttcttcatgactatattattttatgacgtatatgatgtttaatgctaccttggtaggaccaatgtagtttttgtgtccgctgtcgagtttgctgccgcacttgccgcagttgtacttatcgtagtctatgcgggcatagcctacaccgatttccgcttccatgctccagtgcttgttcaatatccattgatatccataagaaatgccggctccatagatattgccctgatagcgttcgtgtcccaaacctaatatattcaggttgcttacattcgcttctgcataatgggcgtgcagaccgaagaaatgtccgtagaagcgctcgcacagccagtaacgaagttcaggctgtaccagccagtgcttgatttgtttgtgatccgagaatttccagggattgtagttaccggatacatcgagggtcagcttcttggagagtccgacctcaaatccaaggttagctgtagtggtagcccaatacaatgcattggtctttattgcaaatttaggcatgtagtggcttttgtcctgtccgtacgtactgatggtgtatgtgagcatcagggctgccaataaaaggaatttaatcgttttcatattttcattacattatattatcgtaaaacaatagccggattttgcagtaactcttccactttatatgtggcggaatagttataattcctcagagtgaaagtaaccacatcattcaatttggctccggcgtatatagtagttgaataagtgctggtgcgactgacagtaaaaccagatgcaatgccggtatctgatgaggttaccgtatagcgggggatattgagcaagccgttattctgataaacctttatcgtattacccaccgttattgactgcgccagaatattctcaaagccaatggtcgtaggactgaatccgggagcggatattatcagcttttcactgcttaaagctttcttagaggtaaacgtgacggtttgtcctcctgaaggctgcgaagcgtaagtccgttgataaccacctgcaactgctgtccatccgctttgggtggtttgcagattttgggttgcaataaacaccgttaacgggtatgtgggcggataatccgggtatgatggaatggtaaacataaagctggctgtattgttcacaccgtaatttaccgtattgtctccgttgacggaaacattggtaaagtggcgcgattttacttccacgctctttgtctggaagatttcattagctatcagaacggtttcatcgctgttttcaagactggtacggaagttcaatactttggttccgggaccggtggcccaatagacatactgataccctccgttagtgtactccagttgcaggtttttgttaggctctaccggatagaggttgcctgtggtaatggtacacttcaacggatacaaatagtagggtattgccgatggaatagtgaagctcagtgctacgtcctggtcacgggcagtgtatatttcgggtgataagccggcgggatcaaacagatataacgcactggatatgaccgtgatggtacgtgaaagtacacctgccttaacggtaattgtagcctcatattgtcccgtaatgatgcgggatacatcggcagaaatattcccatttccgtcataagagagattatgaagtatgcttccctgatcttcggctatggatacgctgattttagagttatcagtcacgccgttggccgtatattgggctgataccttcaaggtgcctgcctgggtgaacaggaagtgcagtctgcttactgtcagcacattattgttattgtcggagatagaaggagattccttgaatatctcggcatagatattattggaaggttctgaggttttagcatcggcaaattcagtacttccgtttgcactctcgctgaaggattttatcacaaccttgtagtggtaattcctcatgacggggtagggcttcttgtccgtatcaagaagctgtatcttgtaataaagctcttcggtctttcctgtcagttttcccttaatgatgatgtaggtctgatcgttggaatagttctcattctcgaacatatatttggcgtccatgttacagtctgtttctgtctgatcgattttggagacgggactgcgaggcaaggtcggcgtgccgtctatcaaggtgaacggggtagcgggggcattcgggttgaatggagccaccgttccgttacttgcatagttacagagcgcatatcctgttacttcgaaattcgtagcttcggtttctacagtcactttggccaggttgcggtaaagtgtgacattgggagtgtcattggcggaagagattgtttgtcttccccagaatactaaattggtgctgttcaatgaaggtatgatctccctttcatctttctgcatggcggcacgttcgtcaaaactatcccattgggaatagttggcaatgaggtggatgattcttgcgtcatcgggtatatttgcctggaatgtcccggtaccattactgttactgcttaggagcgaggcatgagcccgccctatgaatagtccgttggcatcgaaggtcatcaaccacaggtcgttaacagcattctcatccgtggcggcacgggtgagtgccggtgtatattcaggcatgtttaccgagaactgaaaggcggtcttatcgtcatttccagtcgagggagtgccgagagtagcttcatctgtacacgaagccaaaagaagaccgaggagtgttataaggtaggttaatcgtttcatacttttctaattttaatccatcaatactgtttaccggatgtcgcggacgcatcggacggatgcattcagcggactgaatttaccaccttctccaacgcggggatccatgaagttaacagcaccggaagcattcgaactccaataataatttccttcaaggatgccttttacttcacatatccgtatgttctgtaagacatctatcaggtagatttccgcttgcgtgggcatacgccagtcggaataggtttctccggtagtggcatcccgctctacataatcccggcatttgattctggatgcggtgtatgtgcttgccgttgtcgtaccatgttgtgaggcaagcatgaagtgcggagagattctccggttgttttcttccgtatctatggctgcgtgttcactgtctgtcagcggataaccgagtacggcattgtcacgtatgtacgaagcgtaagatgcgcctaatgcgggattggctgcataatgggaatatccgctaccgaagtcttcgtcaaactcgtccggattgggaagagtagagaagtcggcgacgaaggaattcattatatacatcttcgtattattttgcccctggcttcctccggggacatcggctgaaatgtcagaaccgatgtagagggccggatattgggagacagtgacaggttgtgtaagtccggcaccattgactacctgaaaggtgatatctttggctaggaagttttcaggaagaggactcgttatggttatgttgccggactttacattcggggtagcggtgatggttatctcttttccaccgttggaaaccgatacaccatttacagtaatcttctgtatttctacatccggtgtggatgactggaaggtagtggtgaactgcgtactgttgggcatcgaaatcttggtgtcttttacatagatgaagttgattccttctacggaaacaagtacttcgtgggtgctccaatcctgtatggtatatccggcattcagcggaactgcggaatgcgggtcggtatcacctttcttgtctatgttcacgcggatatcatacaggcggttacgttccagtttatagagatttgcagtctggcccgtgcttccgttcgatagccggtagtttaccggtattttgtaatagttctgagtagtagtgttaccatcagcgtcctttacagggacattgatgagtacataactttccctgttcgtatctttggtccaatcattggcatacgaatagaggatgaattgattgctattgcctgcacctgtattttgttccgtaaatgagttcatgctttgcagagtgggaacatttacactaccgtctgcaatggatgagccactggcggcatagttgaccatcttttttgaaggtatattattgtctatgggggtgaaaccgtttacataattcaggcttattctgatcttggcggccgcgcgtttaagaacaacgggaatctctttgttgacgatgattccgtcattcagcaccattgtatgctttccgtccattaaaaatgcatcttgttttttatctgcatccagagtaggggcggtgagcgccttcagttccggaagagataatcccgcagccggaatggttgccgtatggttggctactacataaatggtatggttgatgttctgatcgaatttctcctgtgcggcatctagggtagctgtatgttccccggttccggtcagctcgggagagaacgcaaaatgctggtagaacaggcattcgtctgctccttcacggtaaacgaaaacatctaatgattttatcgtattttcattgagcgcttcttcacccggctcttctacggcacgcgaagccacggagctgggcatagacagtttcagggtaattccgcttaccgatcctgttcctgccgattcgatggaggaatcatcctcgcaagaggtgagcccccagaataatgagagtatcagcgggaggatatatagtttatttcgtttcataattcatcttatttatattcggtttggcggattaaaatatccgtgtcgttgtcgcccggaaactggcggttgccattgctttgcttcggattgatcttgagtttcacgcctcctgcggttatgtagaagtaagtgttcttaggattcccactccagcgtttggtggctcctacctgtatcgtatatgcttcatcacgggctattcctttggaaacgttgagaccgtcgttcatgccgaacgtaaagtcaagtccattggtcagagtagcggtccagatggcaccggcaggggctgtcagactaaaactgtagttggcgtaggaagtctcattatgggcttctccgttcgctatgtagggaaattgcacgatgcctgtagtggcaccggcgtcatctccattgtacggttgaagctgatagtcgtcctccgtgatctcttgtccgatttcagacgaggtaagctcccatggatagggagtcgtttttattattaactggttgtccggatggtcgagcatagccatgacgcggtaaactgtattatgcagcagactgtacttatgggttgtctgcccctgatcggtaagatatcccctgtacgtataactgatcccgttgaacagcgcctttatgcggatatagggagtgttagcgtcaggtgtagcgtcaggaactatatttcgatatgtatagaatgaagcatgtgcattctccggtactatttcagataaatcagacggcataagttgcagagttgttcctccaagaaatacctccgaaacattcttcttgctaatgggcgtcggcattgatgttacctccggactactatttgtattaagtatctgattgacaaattctatggagttgacaactacactcgaactctccaatccctgattcttgaacatatagatgtccagccgtgctaccaggcgttccataggaacttccgctactacatattcactattgattgcaacttccttttttccgaccatcaggatattgctgtcagtaaaagcgttgccggataccgtcaggctttccaattgctgcaatgtaaggtcgggagacaccggaacagaaaaggtcttatcgggatcgttataattagcaatcgcataaattacttttgtctgtggcgacacattgacagaacgtgaaaactcttccagtctctgcggggtgaattccggaatcagttccgaatattcacagtgctggtctgctttattgaaaatatagagtgccagactggaaaagctgccatcgtctccatgaatcaaagctttgtttgtaggagccgttttgatcagaaagtttagccgggcctgattatcggttgtatcggatatcggcgtctcgttttcactgcaagagtacagtagcagtgccatggcaaacaactgcaaacagaaccggtattttaattttagcttcatatacattgggggttatatccccggtctgatcacttcctcgtcccagggttttactgtgatggcggttccattgaaatagatgcggatgcctaccgcagcttcattgatgccatttacagtaatattattatctttcatgaagtcctttaattgcatggtgtataattcttcattgctctgaaggtcgcgcaatcgcagatatacttcattatcatcattaaatcgtaatacgttgaattttgaaccaaacttttgtacgttggagtcaaaagttaccaacgggaaataagagacgcgttcgtttgaaaacgttttggtgaagtccactgttgaacttaatttccccatttctatactgacgggggaagtggctgcacgtgtactgccaacatccagtccttccagctctatttgcatttttatatgcgcactgctgaaataaacggtgtcaaccttatagctttcattgacaattgtaatctctctttctccaaaatacagactgtcattggtcgatatcaactctttcgtaaaataatgcggggctccgacaaggttgttttgcaaggatgaaccttcgtttatccgtgtgtcgttgagggagtttccccagcatataatgtgatattgaccgcttggcaaattcaaggtagtgccgcgttggcggttgagctctttccggttgagaactgttttctgtacaaatacattgttctgattgtatatatacatatctaccttttctattttctgaggaaagatttcctttgttccatcacccaggtagctgaagtacaaagttgtctcacaatcatcaaggttttcttttatacaccctgtcactgttaccagtagcaggatgtatagaattattgcctttttcatatttcagggtttgttgagtctgaaacttattgttccagatcaaatcccggagtgattgtttcttcattccacggagcgactgtgacgtgtaccagtacgttgtattgtacatttcctaagtcattgtcgagcattggaactaactctatctccatattataaagggtaccgggtttgaagtcggctgctgtcagttcagtgtttacttctttataatacttcaccaggttggcaaagcgtgcgccatttgctaagtccgggttaaatacttccgtatcggatgacttcaggccggtaatgttcaaatcagaaagatctaaatgcaattgcggtatggctgtgcccgggaagaaattgaaagcataacatttgccggctaaatccagtggcaggttaccgtaggttccgtcttcattatatataatgtagctggcaaacggagctgcgtctattatcggagtcgtgtcaaaagtccacataccatcatggatatgtccttcgaaagttgagttcagaagcaggttgtccattgttcccggatttttgtaagtgttatagaagttattcatatagaagccttttacatttcctgagaatcctgtccaactaactgttgctttcttatctgttccgtcaatggttcgcgtaaaatcgaagttacctgaattcttgaatgaaatcttggtaatttgcagtcgggctacaataggggctatggtcacttgtgccgtataagtcttacctgctgtcggagtcggatctatcggttcattaacgataggtttcagatcatcgtccataccatagtaaagcacttcgctaccctgttgattagctaacttggtattaactacattgttagttacggcattcccgggatttccataaatatacactttagaaacggattcgggaatgtttatgaacttcaatccttttgctggatcggtcaatttattccagtcggagttaagcacttcatctttggtgacggctttggaagttatgatttttccatttacgtcagtcagattgattaatacactgttcacattcttaatatccgatgtaatgatatctgttggagaagaagctcttgtcttgatcccgcctaatgatactgaaatggattttatttcgtcctgtgaaacagaaacatcgtctttgtcactgcaagagaataatgctatacttacgactcctgctaataataattgtttaattttcatgtcttataaaaataattgtttataaaatttcccaatactaattttggttgcgtacgtcctgttgggatcataacaacaacagttgcataggaaagttttgagtgcaggtagtattttctacaggaaataatcaaaacaatgatatttttatgaattttatccaaaattgtatcgattacaacttctgttaaccatattggagagcgtgagcttcgttataggatgttgtattgcgcaactgggctgtttgataaataggctctaaacttgatttcatgagatagaatatgaagcaatgttatgtcgcatataaagcaatgcttttgaatagaacattgcttctttcaggacagaacattgcttcttctaatactattgatatagtattggaaatatatttactaaatcaatcctgatcggcaaggttctggcgagtgaataggtgtcatttttggtgtcagtgtcacctatacacgtattttggagagtgtgtggcttgaatttattggcaacttgttgattaatagtgtattatttttaatttgtattttgtgtttatacttttttatgtcttttagcatgttcttccattctctttcttctgcactgcaagagtagatacttagattgtgaaatatgtatacatgtaccgtctgtgcggaattttttgccgtaaattgagcttgttctctttttatcttaaatataaacatatcgatacttcctttttctgttttttgcttccaaatgcgtgtataggtgacactgacaccaaaatgacaccaatatgatgttttttctcttgcttaatatcttgaatatcagtaaataatgctttccttaattcttccattcaggatttgtctataaatggttttatatcaaaaacagagctgaatatttccatgctaatgttatgaaaatacattacttctatttactcttttgggtaatcggttgaaaatgaaattttctattttcatataattgatacggagcgaagcggcacagatgtgaaccgcggtatcgccgggcaatgcgttaggttgtggcaacgattttaccggctaactcaataagcaattttatagaaatatactgtagtttaagattcatatgtttaataaatataattttattaattttctccattctttattgtctctattctttttttatttaattttgtctgcactattttatgtgggaatgtaaactcaaaccataataaataacaaatcgataatgacacaaatagttgaattaaaaggcacggagaaacggttgtatcaactggtcgctccattggttatgaatcctgtagtattgaaacagaactataattatccttttcgcacttcagaaaactttatatggtttgttgcggtggaaggaaaagaaatagttggctttataccactggaacataagaaatcggaagcaattattaataactattatataaaggagaataatgcagaagtattaaaagctcttttggagaaagttatagacagcacggatgaagataagcagttgagctcggttacatttattgagcatcaaaaaatattccaggaattaggcttttctgtggagaaagaatggaaacgctatgtaaaaatgaataaggagaaatagaatgggggaggttcagaagaatgtatatgaattagcacaagaacggttacacattatatttaaagaatttgataatatctgtgtatccttttcgggagggaaagatagtggtgtgttattgaatttatgcattgattacatccgccgcaataatctgaagcgtaaactttctgtttaccacatggattatgaaattcagtatagcatgactatcgattacgtggaccgtattctggaagctaataaggatattctggaggtatatcgcgtgtgcgtaccttttaaagtaaccacctgtacgtctatgtatcagaattattggcgtccttgggatccggaaatgcgtgatatatgggtgcggaacataccggaaggcagcatgaccgtagagaacttccctttttatacggatgcaatgtgggattatgaatttcagatgcattttgccaaatggttgcatgcaaggaaagatgcggttcggtcctgctttctcataggtattcgtacgcaggaaagtttcaatcgctggcgcagtattcaccttgcccggaaatatcagatgtatcataattaccgatggacttctaaaattggaaatgatatattcaatgcttatcctgttttcgactggaaaacgacagatatctgggtagccaatggaaggtttggctgggattataatcatttatatgatttatattataaagcaggtgtaaacattgagcgccagcgcgtagcaagccccttcctttgtgaagctcaggaaagtcttcgcctttataaagtgattgatccaagtacatggggcaagatggtaggccgtgttaatggggtgaactttaccggaatttatggcggaacccatgctatgggctggcaaaccgtccgtttgccgaagggatatacctggaaagaattcatgcaattcctgctttctactttgcccgaaactacccgacgcaattatttgaagaaactgactgtcagcattgaattctggcgtacgaaaggcgggtgtcttgctgaggagaccattgagaaactaagaaaagccggtgtgtcattggaagtggtgaatacgaccaattataaaacgaataaaaagcccgttaaaatggattatctggatgacatagacatttctgagtttcgtgagatccccacgtataagagaatgtgtgtatgtattctgaagaatgatcatgcctgcaaatatatgggttttgccttaaataaggaggaagcatacaaacgagataaaataatggaacaattcaaaaatatgatgttatgagtgtagatcaaagtccggtatatgctgtaaaagctgtgccgttggagaaaatagtggcgaatgattataatcccaacatagtggcaccacctgaaatgaaattactggaactttctatttgggaggatggttttacgatgccttgcgtatgttattatgataacgaaaccgaccgttatatactggtagacgggtatcatcgttatagtgtattgagaagctccaagcgaatttatcagcgggaaaacggtttgttgcctgtagtggtgattgataaagaattatccaatcgaatggcatctaccatccggcataaccgtgcacgaggttcgcacaatatcgaactgatgtgccacatcgtggccgaactggataaagcgggtatgtccgaccaatggattatgaaaaatataggcatggatcgtgatgaacttcttcgtttgaaacagatttccggcttggcggatttgttctcggacaaaagttttagtattccaaatccggttgaaacgccggttcccgaagaataaaatgcccgtttggggcatttttgtttctattatgttcttttgttatcattaacaagtgaaatatcttgttacaaacttgcataagttaaccaaatctcctacttttgccatcataaacaaacgaacaggtttcataagccttcggacattataaaaaacttacatgaaaaatatattggttagcggtggtgctggttttatagggtcgcacttatgcacacggttgataaatgaaggacatcatgtgatatgtcttgacaatctatttaccggcgcggaagcaaatatcgagcatctgaaaagcaatcctctttttgagtttgtgcatcacgatgtggaatttccctatcataccgaaactcttgatgaaatatacaatttagcttgtccggcatcaccgatacattaccaatatgatgcgatcaaaacgataaagacttctgtattgggagccattaatatgctgggattggcaaagaagacgaatgccaagattctacaagcttctaccagtgaaatatatggtgatccggtagtgcatcctcaagtagaaagttattggggaaacgtaaatccaataggcatccgttcttgttatgatgaagggaagcgttgttctgaaactttgtttatggattatcaccggcaaaacaacattcgtattaaaattattcgtatctttaacacgtatggcccacgaatgctgccgaatgatggaagagtggtttccaattttgtggttcaggcattgcaggatcatgatataactatctatggaacaggagatcagacgcgaagctttcaatatatcgatgacctcatagagggaatggtgagaatgatgaacacggaggatgaatttataggtccggtgaaccttggaaatccgaatgaattttccatcctcgagttagcggaaaaagtgattcagttgacaggatcgaagtcgaagttggtgttcaaaccacttccgcatgatgatcctaaacaacgtcagccggatatcacgctggcaaaagagaagctgaactggaagcctgccattgaactggaagacggtttgaagcggattgtggaatattttaaggaatatcgtaaatagattatatagataaacgggaaaacaatattgtataagatgaatatggaaattaatccttctgagtacaaaattctcatcgtcgacgatgtgatgtccaacgtattattgttgaaggtactcttgacaaatgaaaaatttgcaatcgctacggcaagtaacggtcggcaagcattagagcaggtagataaggaaaacccggatttggtgttgctggacgtgatgatgccggatatgagtggttttgaggtggcacaacatttgaaagcaaatcccaaaaccgcagatattcctatcatcttcctgactgcactgaacagcacaacggatattgtaaaaggtttccaggtgggagcaaatgactttatctccaaaccttttaacaaggaagagctgattatccgtgtaacccaccagatttcgttggtagctgccaaacgtattattttgaataagaccgaagaactgcaacgtaccattgccggacgtgacaaactttattcggtgattgctcatgatttacgttctcctatgggctctatcaagatggtgctgaatatgttgatattgaatttgccgtccgagaaaatcggtgatgagatgtatgaactgctgacaatggcaaaccagacgacagaagatgtgttctctttgctggataacttgctgaagtggaccaagagccagattggtaagttgaatgtagtatatcaggacattgatgtagtggaggttgtagatggagtgattgacattttcaatatggtagccggtatgaagaagattacaatccgtgaagagaaaccggagaagttagctgtatctgccgacatcgatatgctgaagaccgtagtacgcaatctgataagcaatgctattaagttcagtaacgaaaattctgaggtgctggtgaagctggaagcgaaggatggcatggcagtagtcagcgtgcaagaccacggttgcggtattgatgaagaaggacaaaagaaattgctgcatacagatactcacttcagtacattcggtactaacaacgaagaaggttccggcttgggattgttgttgtgccaggactttgtggtgaagaatggtggtaagttgtggtttacttcgaagaagggtgaaggttctatattcagtttttcagttccgttgaaaaaataaatgatacaataaagaaaaacaaaacgaggttgtgtcaaaatgctggca

SEQ ID NO: 6383 - DNA, 18697 bp, Unknown
  gut microbiota DNA sequence
atcacttggtgtaggcaaatttgcctacacttctttttatttgctgccaccaccgctctaaccccgatgaataaggcgatgcaagatatgagtgcaagcgtgcatgtaaaagtatgtgtaaacttataggtaggcactttaaactccattgctataactcacatatccgcctaactatcccgagcaaaacgttaacgaacataaaatcatttattttacactgcattaaaaaaagtttcatctattgatattgagcaagatagaatacaaacatcgcatatcaagacgaatctattaaatatattttagtgatcagcaacatgttttacacacatttccttcaataaataagcatggaaaacgaaattaattcatagctttgcctaaaaccttgatagatcaacctataaatactataataccatggctaccatcgctctcgacataggcggcaccaaaatagcaagcgctatattcctccctgacggaagtatgttgttcaaccgaaagcgtctgctgaaaggaagaacgggacacgaagtaggcaaacttgccgcagaaatccttgctaaactcctgactgttgcccgcagaagccgtatccagattgacggtgtcggtatatgtgttcccggcattgtctattcgcagacgggacgtgtatgggccccgaacatccccggctgggaaaactacccgctacaagaagtactccgtaccgtaacggcaccggatatagaaatctacatcgacagcgaccgtacttgctatatgtatggagaaatgtggcagggagcagccaaagattgccatagtgcagtattcattgccgtaggaaccggtataggtgcaggaatcattatcgacggacacgtgttgcacggtgcaagcgacatcatcggtgctaccggctggatggcactgcaacctccctataaagaagaatacgatgcctgcggttgtttcgaatattatgcctcgggaaatggtatcggagccagagtgcgggatgcagtccgtgcaaataaagcttataagggacgcttacgtcaaaaacctatctgccgcatttccgcttatgatgtattcagcgcatacaatgaggaagatccgattgcagtttccgtactgcacaaagccatagaaatgtggggaatggcctctgccaactttgtcagcctgctgaatccgcaaaagataatctggggtggaggtgtattcggccctgccggtatcttcatagatgatatctacaaagaagcctgcaaatgggcgcaaccgctcagtatcaaacaggtggaatttgtagcctctcaattgtccggtaatgccggactgataggagctgcttttctcgctattaaaaagcacctgtacgagtaatctggccaccttatcttttttattaataagaatatgagtagttacaacaagaatctggttttcacggctgcgtgcatcggtatgtgcttctttggcatttcgatgatcaccctgggctcggtactaccgtccctcactaccaaactgggtttggacaatctccaagccaccgcactggtgacgttcctgcctctcggtttattgggaggctccctgttgttcggccctattgtagatcgcttcggacacaaagcgttactgctgctcagttgtctggtcgtgttgctcggactggaaggaattgctttctttacaagtatcccattgttgcaactttccattatcggaatcggcctgggaggagggattctgaacggtgaaacaaatgctttagtagctgatatttccaacgaagcggagaaaggttcacgccttagtctgttgggtgcattctatggtatcggtgcgctggggattcctgtattactcagtttcctgtccggatattattcttttgaaattatactgcaaggtacgggcgttgtaatgttggcaggtatcctgttctgtctcggtgtacgcttccccgcacccaaacagccgcaaggattcccaatcaaagaagggctggggttattaaaagaaagtagcttattattactcagttttatcctctttttccaaagcggtatcgaaggtgtatgcaacaactggaccacactctacctgggacaaaccaccaacatccccgaaaaccgggcgctcatggcactgacttgcatggtggccggactgactgttgcccgtctgttgctggtagttctcttcaaaaagataaaacaggaaactgttctttgcgccagcctgattacggccgcaataggttttgcactgctgactttttcaccggactttgcacgtgctgccataggtatggtgcttgtcggtgcagggctggcatctactttccccgtcatactcagcattgtcggcagccggtacgcttctctgtcgggaacggcattcagtgtggcccttgttatagctctgatcggacagacattactgaacagtctcacgggaattatctcgcaaggatacagtatcgttgtgtatccttatatgatgattgtctccctgctcatcatgcttctattgtttaaacgctcactcaaataaaagaaattatttaccccctaaaaatcaaaaaaattatgttagcacttgaatggttaaaaaacgcgcatggcatcatggaaaaactggaagccacgcaattggagaatatcaaaaaggcagccactgctatggcagattccatcgaagccggccgttgggtacacacgttcggatgtggtcacgcaacaattcccgttgaagagatgtatcctcgtatcggtagttttgtaggttttcacccactgtgcgaacttccgctgacattctttacacaaatcatcggccaaatgggtatccatcaattcctgtttctggaaagaacagagggttacggacaggcaatcatgaagaattatgatttcgattccaaagattgcatctggattttctctcacacagggatcaatgcagtaaacatcgacatggcactggaagctaagaagcgcggtatgaaagtaatcgtttacggctcagccggagaaactggcgacaaagcaagccgtcattccagcggtaagaacctgttccaacttgccgatatcatagtggactcctgcgtacctttggtagatgcttccgtgcctttgaagaatcacttcgacaaggtggggccattgtcaaccctgagtttcgttactatggtatggatgaccatcactaccgttgccgaaattctggcagatcgcggcgtacatctgtatatccatccgtcacataacgtaccgggcgacacaactgctcacgaacgcctggatgcagctattgccgaatatcaaaagaaagtaaaaatcctctaaccaaaagaagccccaatcatcatttatgagtgacggtagcccgcctcagctttgcccccacaaagctggacgggctttttacaattaggaaacataatttatctacactttttcagtttttatccctatatttgccctctaaagaaatcaaacaggattatgaaacagataagtattgcaattcttctttgcctctgcacattggcaggctttgcacaaggcggtcagcctcttgatttaaaagatattgtatcaggtaaattccgcgctgaaaatatttacggagtcattcccattcccggagacggggaacactattcgcaaatgaatgcggaaggaacgcagatcatcaaatactctttcaagacaggaaaacaggtagaagtattgttcgatgctgctactgcacgcgaatgtccgtttaagacgtttgacagctacagtttttcacctgacggcagcaaattgcttattgctacagaacagactccgatttatcgccgctcttatacagctatacattatatatatagtctgaagcgaaatgtcaacggagaaatcaataacatagtagaaaagctttcagacggcggcccgcagcaagcacctgtattttcaccggacggaacaatggttgcatttgtacgggataataatatctatcttgtgaagtttctctacggaaacagcgaaagccaggttacagaagacggcaaacgtaatgccgttttgaacggtattcccgactgggtatatgaagaagaattctctttcaaccgtgctctggagttcagtgccgacagcaagatgctggcttatatccgctttgacgagacggcagtaccctcttacagcttccccgtttttgcaggaagcaatccccatatcactgcttttgaaaagtatccgggagattatacctataaatatcccaaaacaggagaagcgaattcaaaggtcagtgtacataccttcgatatcaaatcgaaagtaacccgcaagatgcaggtgcccttggatgctgacgggtacatcccacgtatccgtttcacacaagatcctaacaaactggccattatcaccttaaaccgccatcagaatcgtcttgacatgtatttcggtgatccgcgttctactgtttgcaaacaggttctgcgtgacgaaagtgatgcttatatcaaagaaggcgtattcgataatatcattttctatccggaaaacttcagcttcgtgagcgaaaagagtggttacaatcatctgtactggtacagcatgggtggaaatctgattaaacaggttaccagcggaaactatgaagtaaaagaattcctgggctgggacgctgatgataacagtttctattatatcagtaatgaggaaagcccgctgcgccaggctgtataccaaattgaccgcaagggaaagaaaaccaaactttcttctcaaccgggtctcaacagtgcacagttcagtacgaacatgaaatactacatgaatcgttattcaaacctgaatactcccactgtcattactctaaatgataatacaggtaaagtattgagtacgcttgttacgaatgataatctgaaacagactttgtccaaatacagtgtaccccagaaagagttcttcactttcaagaccggagatggtgtaagtctgaacggttggatgatgaagcctgtaaatttctccgcatccaagaaataccctgtacttctgtatcaatacagcggacccggatcgcaacaggtactggacacatggagcattagttgggaaacctatatggccagtcgtggttttatcgtggtctgtgtagacggacgtggaaccggcggacgtggtgcagacttcgaaaaatgcacttatctgaatcttggcgtgaaagaggcgaaagaccaggttgcaacagcccaatatatgggtagccagccgtatgtagacaaaaaccgtatcggtatctggggctggagttatggcggatacatgaccatcatgagtatgagtgagggaacgcccgtattcaaggccggagttgcagtagcagccgtcactgactggaactactacgacacaatttatggcgaacgcttcatgcgcactcccaaagagaatgctgaaggatataaaggctcttccgctttcacccgggcagacaaattgcatggcaatttattgctggtacatggaatggcggatgacaatgtccatttccaaaactgtgcagaatacgcagaacatctggtacagttgaacaagcaattcgatatgcaactctatacaaaccgcaaccacggtatctatggcggaaacacccgttatcacctgtatacgaagctaacgaatttctttgaaaaaaatctttaagatcataaagttcaccacagattacacggattaacacagatttctttatttctctttttttatctgtgttaatctgtgtaatctgtggtgaacaataaatcaatatcatgaaagacagaatacgcaaacccgaatggctcaaaataagtattggagccaatgaacggtataccgaaaccaaacgtatagttgaatctcactgcctgcataccatttgcagtagcggacgttgccctaatatgggagaatgttggggtaaaggtactgccaccttcatgataggcggtgacatctgtacccgttgctgcaaattctgtaatacacagacaggcaaaccgcttccattagatatggaagagcctacccatgtagcggaatccatagccttgatgaaactatcccatgctgtcatcacctccgtagaccgggatgatctaccggatctcggcgctgcacattgggcatgcaccatacgcgaaatcaaacgcctcaatccggaaactaccatcgaggttctgatccccgactttcaaggaagaaaagaattagtatcccaggttattgaagcacaaccggaaattatctcccacaatatggaaacggtgaaacgcatcactccactggtacgtagtgcagcccgctacgaaacaagtctggaagtaatacgccagatagccgacagcggaatcacagcaaaatcaggaatcatggtaggattaggcgaaactccggaagaagtggaagaactgatggatgacttgcgccgtgcaggatgtcaaatcctgaccatcggacagtacttgcaaccttcacataaacattaccctgtggcagaatatgttactcccgcacaattcgcttcttacaaagaaaccggtctggcaaaaggattcgatcaggtagaaagtgcacctttggtgcgttcttcttatcatgccgaaaaacaggtacagttttacaaaaaagaaacgaagtaaaaaccaattgctctacttatttgttatctatgagataacgacagaataaagtttgcaatgtcaaaaagaggagttctatcatctaagtttaatatgtctttgggatttatcccggttatcgtatctattatattgtgcgaatttataacccaagacatttccatctacattggtgcaggtgtaggggtcctttatagtttatataccttatggggaaaaggagcaagaatccccaacttcctactttattgcactaccggaatgctcttgcttttgagtctgaccactttaatcttcggtgattgcagttcccgcgaaatgtttccactgacattggagatcagtacgctcatacccgtagtcattatcttcctgaacaggaaaagatttctcgctcaccagatttcccagtcacagaaatgttgcaaacaactttttgcgcaaggggcagagtctgccattgtaacaacacgggtagttgtcatcatcgcttttcttcatttcctgggagtcttcatcacaattctgttacccggtcccttaagtgaaacttccagggatgttttattccggtattgtccgccagctgtatttattctgagtatattattcaatcagttcggaatcctctatttcaatcaagtgatggagcacacagctttcgtgcccattgttaataccaaaggggatgtgatcggcagaagcctggcagtggatgctatcaacaagaaaaatgaatatatcaatccggtagtccgtatcgctgtatctcacaacggtatgttgtatcttcgtccacgcccccaacgctgtattctcgaccgggggaagactgatatacccatggaatgttaccttttatatggagaaactctggaacaaggcatcgtccggcttgtgagacaagcttttccacaagcaccgatacaagatttacagttcaatatcatgtatcactttgagaataaagtgacgaaccggctgatctatcttttcattcttgatgtagaagacgacaatcttctacgggacaaacaggtaaaagacggaaagctttggactttccagcaaatagagcataatttaggcaagaactttttcagctgctgctttgaaaacgaatatgagcacctgaaagatgttatttgtacaagagaaaaatacaaggaattttagaaagatcgggcacttttccctgccactccttcactgtcttggttttgatatattctccctcacacgtaatgttcgcagcaatacagagtttggtttgcggacgacaattttgcaagatgtcttccaccattttattattacggtaaggtgtttcaatgaatagttgagtctggtgttcggcataaacccgctgctccagagtccttatttttttggcacgctcgcccggctcaataggaaggtaaccgtggaaagcaaaactttgcccgttgaagcctgaacccatgacagaaagaataattgaagaaggtcccaccaagggcactactttcagattcttccgttgagcaatcgccactacatccgctcccgggtcagcgactgccggacagccggcttcggaaatcactcccatagacaatcccgccatcaacggtttcagatatcccgaaatatcttcaggtgatgtatgcttgttcagcgggtaaaaagtcagtgtatcaatatctatttcccggtccaccttcttcagaaagcggcgtgcagaacgcacatcctctactatgaagtgactaatcccaagtatgatctccttattataagaaggcaacaccgtttcaatcggtgtatcacccaaagtgacgggcaaaagataaagagctgtttccacgttgataagtgataagttattagtgataagtgataaatgaaaaaagttagtgatgagcggttcattttgctatgccattatactgcatagccactaatcactcatcactaaccgttaatcactatatattacccatagataatgtttccattctcatccatatattcatccagtcctttttcgtaagtagccatggcacgcaagctcatacccacactggagaaaccaccgtcatggaataagttctgcatggttaccttacgggtcaggtcggagaacattacgatgcaataatcagcacattcgtcagctgaagcattgcccagcggagacatgcggttggcaaaatcgaacagcttatccatccccttcacaccggaaccggcagtagtcatagtcggagactgtgaaatggtattgacacgtacattatgttcgcggccatagatataaccgaagctacgcgcaatggattccagcaaagcttttgcatctgccatatcattgtatccatagaatgtacgttgtgcagccacataactcaatgcaaggattgaaccgtaatcggcaattgcattcagctttttggcagcctgtatcatcttatggaaagacactgcggaaatatcgagcgtcttgcccagcatatcataatctaaatcatcatatgtacgtttcttgcgaacattcggagacataccaatggagtgaagcacaaagtcaatcggtccgcccaaaacttccatggagcgtttgaatacattttccaaatcttctacgctggttgcgtcagcggggataacttcacatttcaatttatctgccagtgcggaaacttcgcccatgcgaactgctaccggagtgtttgataaggtgatcgttgcaccttcttctactgctttttcagctactttccaggcaatggactgctcattcagagcaccgaaaataatgcctctttttcctttcaacaaattgtaactcatacctataatattaaagttgacgggtgtctaataaacaaatcaacaaggaaattgctcttattgttcgccccctcatcgacttgcatcttatcaccacgtttactattttgaggctgcaaagatatgaactttctgcataaaaagcccgtaagtgtgcaaagaaaaggacaaaaccacaaaaaatccacctaaaccaacaaattgtgcacatggttttagctaaagcccgatacatttgcaaccggtaattaagaggttttttcataatatttatttaaggttagaattaggttaacatgaatcatttattatttctttcgcaggccactcgggagagccgcttgcgggaggataataaaaaaggaaagaaaatgagaagttgaagaagcctgttagttaacaacgaataactgataactaataacttataactaaatatagtatcacggatgaacacatttatcaaaaaactatgggtgcttgttgcactggcccttccgttgttacctgcacaaagtacggtaaatgcccaaaacggaaattatatagatgaaagtatctatgagaatttacccttcaatatgccgaaagtggaacaacccgcttttccggattatacagtcaatattgtagattttggcgctaaaggagatggtatcgtactgaataccaaagctatcaacgacgctataaaggctgtaaatgccaaaggtggcggtaaagtaattattcccgaaggcttgtggctgaccggccctatcgagttgctgagcaacgtcaatctatataccgaaatgaacgctctggtgttgttcacagatgatttcgaggcttatcctattattaaaacatcttttgagggtttggatacgcgccgttgccaatctcctatttcagcatggaatgctgagaatatagcgattacgggacatggtgtattcgatggttcaggtgatagctggcgtccggtaaaaaaaggaaaactgactgcgggccaatggagtagcctggtaagttcaggaggtgtagtcgatgcatccggtagcatctggtatcctactgccggtgcactgaaaggcgctatggctactaaagatttcaataacccggaaggcattaatacggatgaggagtggaatgaaatccgcccgtggttgcgtcccgtattgctgaatatcgttaagagtaaaaaagtattattggaaggtgtaactttcaagaactctcccagctggtgcctgcacccgttgtcatgcgagcatatcacgattcacaatgtgaaagttttcaacccttggtactcccagaatggtgatgcactggacttggaatcttgcaagaacgcgttgattgtcaacaacatattcgatgccggtgacgatgctatctgtatcaaatcgggaaaagatgaagacggtcgcagacgtggcgaaccttgccagaatgtgattgtaaaaaataacaccgtattgcacggccacggtggtttcgtagtaggtagcgaaatgtcgggtggcgtaaagaacgtctatgtaaccgactgtactttcctgggtacggatgtaggtttacgcttcaagagtacccgcggacgtggcggtgtagtagaaggtatctatattcacaacatcaatatgattgatatcccgcacgaagccttgctgttcgacttgttctatggcggtaaaggtgccggtgaagaaacggaagatgacttggaaggcagaatgaaatcatccgttcctcctgtaacggaagaaactcccgctttccgtgatatccacatcacaaatgtgacttgcagaagcgtaggacgtgccatgttcttcaacggactgcctgaaatgcctatccgtaatgtacacgtaaaggatgtagttattacggacgccaagcaaggtatcgttatcagccaggctgagaatgtttctatagagaacgtgaagatagataccaaaggcacagcattgcaggtgaagcaagctaaagacctgaaagtaaacgggaagacttataataattcggcaaccaaagctttgaatatcgatttataaggtatataataccgctggtgtatgaagaaaaaagtaatcatactgatcgctctgtgttgtctgtttatccaagcagcacagagcgatactctttccataacagaccttcgtacggaacaactgactaatcctttaggtctggatacccctcaaccgcgtttcagctggcggctccaaagcgggcaacgcaatgtgatgcagacaacttaccgcctgttcgttgcgtcctccccggaacttctaagcaagaatcgggcagacgtatgggattcaggcgaggtacgctctgatgcgtccatttggataagctaccaaggtccctctttacaacccaacgagcgctattattggaaagtacaggtaacaaccggtacaggtgagagcgcctggagcgaacctgctttctggggaatgggactgatgggagaaacacgttggaaaggacgttggattggtatggacagacctatgccctgggatagtgaaaccatgttttcacgtctgtccgcccggtatgtacgcaaagaattcaaactcagcaaagcaataaaagaggcaaccctgcacatcagcggactcggagtttacgaatgcctcatcaacggcgaacgggtcggtgaccttgtactggctcccgctcctaccgactaccggaaaaccgtactttacaacagctatgatgtaacaagtctgcttcgctcacaggcggataatgccataggtattacgctcggaaacggacgataccacttcatgcgccagaactaccgtacttataaaatccataacttcggctatccaaaagtccggatgaacctgatcgtagaatatacggacggcagccgggaaacgattgccacagatacgaactggaaactgacagccgacggtcccatccgcagtaacaatgagtttgacggtgaggaatacgatgcccggaaagaattaggaagttggtcggaaaccggctatgacgacagtagctggttgcaggcagaacgcgtttccataccttcgggatatctgcgcggacaaaccataccgggtatcaaggtagtggagaagatcaatccccgaaccatccgtaaatcggccaatggctatatcctcgacatgggacagaacatggtaggctggctgcgcatccgggtaaaaggaaatgcgggcgactcagtacgcctgcgctttgcagaaaccctgcaaccggatggagaactatacaccgccaacttacggtcagccaaagtaaccgacctttatatcctgaaaggagaaggcattgaagagtgggctccccgctttgtatatcatggcttccgctatgtagaagtcagcgaatttccaggtactcctgcccttaccaactttacaggcgaagttgtaaatgacgacatgcctctcaccggaacatttgaatgtgataatcctaccctgaaccaattagtgaaaaatgccttctggggaattcgtggtaattataaaggaataccactcgactgtccccagcgtgatgaacgccagccctggctgggcgaccataccaacggtgcactaggtgaaagtttcttaatggaaaacggtccgctttatgccaagtggatggacgatatccgcgatgcgcaacgggaagacggatgcatacccgatgtagtgccggcctattattactactatacagacaacgtgacctggccgtcaaccttcattttcatcagtaatatgctgtatgaacaatatggaaatccgggagccatctgcaagcattatcccgccatgaagcaatggatggagcacatccgcacagagttcatgaaccaatcgcatatcatcacccgcgaccgttacggcgattggtgtcttccgcccgaatctcccgaattaatacattcgaaagacccggcccgcattaccgatggtaaactgatagcaaccgcctattactacaagctgctgcaatatatgataaagtttgcacagcttcagttagatatgcctcacactccggatattgccggacagttgcaccacctgcagttagctgaggatattcaggaatatcaggaactggcagaacacgtaaaagaaggtttcaacaagaccttctggaatcaggaaaaacaatattacagcaataataccgtaacagccaaccttctcccactggcattcgacatggtaccggatacggaaaaagaaaccgttgcccggcaaatcattcataaaacggtagactattacaatgccaccattcaatgcggagttattggcgtacaatggctgatgcgcgagcttgtaagaatgggacgcacagatgtagcatacgttctggctacccataccaaatatcccggatggggatacatggcagccaacggagctaccaccatctgggagttatggaacgggaacacagctgatccggccatgaacagcggtaaccatgtcatgttactgggtgatttcctcccctattgctatcaacatctggcaggcatccggaatgcagctcccggtttcaaggaaatccagatgaaacctgctttcgaactggaagaagtaggatttattcgtgcttctcacattacaccttatggcaaagtaacgagtaactggtcacaaacagctaccgggtattcctgggaaatcagtgtacctgccaatagtacggctactatatggctgcccaatgcggatacctccgccctcaccgaaaacggaaagccattgaagcaatccgaaggtttacaaatactccgccaggaagacggatacacagtttgtaagataggttcggggaagtataacttccagattaaaaagaacatatcatacggaaaaggaagaaaaggcctgctggaggatgactttatctgtcggaagccttccttcccggagagccatgcggctactattgtagaaggacgtcgcggaatagtggcagcctggttcgggggaaccaaagagaagaatcccgattgttgcatttgggttagccgcaagacaaaaacaggctggacagaaccacaaatggttgcggacggtgtattggacgaaaccaaatacgcctgctggaatcccgtactgaccgaaacaccgaaaggagaactacagctttattataaaataggtgtgaacgtagccggatggagtggtcatgtcgttacttcgaaagacggtggaaaaacatggagcaaatcccgggcacttcccgaaggcttccttggtcccatcaaaaacaagcccgtatggatcggtaagcgaatgatctgccccagcagtacggaagatgagaacggttggcggattcatttcgaaatcagcgatgatgaaggaaagacctggcgaaagattggtcctataactgcttccgaaattgtggaaacagatcaggtgaagttcagtaatcagaagcataaaaccatacaagtgatacagcccaccatcctgacacataaagacggaaagttacaagctttatgccgtacccagaacaacggctccgttgctaccacctggagtgaagacaacggagaaagctggagtccggtaacattcattgacttgcccaacaacaattccggcattgatggaatcacgctgaaagacgggcggcacttgctggtatacaaccactatcgctacatcaaaggaaaacggaaagaacgtactcccatcaatgtagcaatcagtgacgacggtatgcattggaaagcggccgtggtattggaagattcgccgatcaaccaatattcatacccctcagtcattcagggcaaagacggaaaggtacacattgtttatacctggaggagacagcgcatcaagtatgcctgcctcgatccccaacaggtggaagtcacctcttttgaggaagccggttggaaggaataactcacaaaggcgacagtatttatatcaaaatggaaaaggaattacggtaggtttgcactacttttgtagcaaattagttatatatttaaaaccatgaagaagaatatctttacagtattgctattattgtgcggtctttctgtcacagcagaagcacaagaaacccaaaagagtttcaaggtggaagtaagtaacacctggaacaaggcaaaagcggacgaaccggtagtaatcaaactcagtgaaatcaatccacagttccgggtacgttcggcagtagtcatgaacggaagcgaagaaataccttcgcaactggatgacctgaatggcgacctccgtccggatgaacttgcatttgtcatcgacctgcctgccaagagcaagaaaacagtgaccgtcactctgtcttccgccaaaagcgacaagacttatcctgcccgtgtatatgccgagatgctggtaagcgacaagcgaggcaagcatgtccccgtacattcggtaaccattccgggaaccagtaacatctacaatcagatgcatcaccacggtccggctttcgaatctgaactggtggcatatcgcctgtactttgacaagaagcaaacagtcgacatctatggcaaattcaataaaggctttgaaatcaaagaatcacaattctatcccaccgatgaacaactggcacgtggcttcggtgacgatgtcctgttagtaggcggcagctgcggtttaggtgcgctgaaaggctgggacggcaagaaatccactcatatcgaacctgtatccacgcttaccgagcgcatcattgcctacggtccggtacgcaccatcgccgaaatagaagtgacagactggcaatatcaaggttcggaactacgcatgacgaaccgctacaccctctacggcggacaccgcgatgtgtttgtagaaaccttctttgaagaaccgttgaaagacgaaatcttctgtaccggtgtaatagacatcaaaggctctgtatcttactccgaccacaaaggcctgataggttgctggggaacggactggcccgtaaacgacaccgtgaagtacgctaaagaaaccgtaggactgggtacatacattccgcaaaagtacgtaaaggccgaagtgaaagacaaggctaattacctgtacaccatcggtgccaaaggcagcaaatatttcacccacaatatcacattcacttccatgaaagaaaccttcggctataaaactcccgaagcatggttcgcctatatccgcgaatggaaagaagaactggaacatccggcagtggtgaaagtgatgaagtgatagggtgataaagtgacattcgtaaccaatcactaataactaatcactaataactaaaaacgtatcatgaaagcaagaaagaccttgatgagtctatgcctgttgctcgcccttccgctggcagcacagcagaaaaattatgtttccgaggtatgggtagccgaccagggaaacggtaagtacaagaacccggtactctatgcagactattccgacccggatgcctgccgtgtaggagatgattactacataacatcttccagtttcaactgtttgcccggattgcagatactccactccaaagatttggtgaactggactatcattggcgctgccgtaccttacgctctgcccccaatagaaactcccgaacgtcctgaacatggtaaccgcgtatgggcacctgccatccgccatcacaacggtgagttttacatcttctggggagatcccgatcaaggtgctttcatggtaaaagccaaagatccgaaaggaccgtggactgagcctgtactggtgaaaccgggtaaaggcatcatcgacacttgtccgctttgggacgaggacggcaaagtgtatatggtacatgcctacgcaggtagccgtgccgagctgaagagcgtaatcaccatttgcgaactgaatactgaagctaccaaagccatcactccgtcacgtatcgtatttgacggacatgaggcgcaccagacctgtgaaggaccaaaattctacaaacgtaacggatattactacatcttccatccggcaggtggtgtacctacaggttggcaggtagtgctccgttcgaagaatgtatacggaccgtacgaatggaaaaccgtgcttgcacaaggtaatagccctgtgaatggccctcaccaaggtgcatgggtagataccccaaccggagaagactggttcttccacttccaggatgtaggcgcttatggccgactggtacatctgcaacccatgaaatgggtgaatgactggcccgtaatcggtatcgacaaagacggtgacggttgtggtgaacctgtaatgacttacaagaaaccgaacgtaggtaagacctatcccatctgcactccgcaggaaagtgacgagttcgacggttatactttgtctccgcaatggcagtggcatgccaatatcaacgagaagtgggcatactacgcaggagaccaaagcatcgtacgcctgtattcttacccggtagtgaaagaatacaagaatctgttcgatgttgccaatctgctgttacagaaggctccggcccccaacttcactgctaccatgaaactgactttcaaaccggtagataaatacaaaggcgaacgtaccggattggtagtgatgggtatggactatgccggactgatcctggagaatacagacaaagggctggttctctcgcaagtatcctgtctgaaggcagacaaaggcacaccggaacaagtaaacggtacggtagacctgacagacaacaccatctatctgaaagtaaaattcagcagcgatgccaacaaaaagatttcaaagagtgaaggcggacatgatctgctggttatgtgtgacttcagttatagtcttgatggaaagaaataccagcctcttggcaagtcattccaggctaaagaaggaaaatggatcggtgtcaaggtaggtactttctgtacccgtcctgcaattactaccaatgacggtggttgggcagatgtagactggttccgcattacgaagaaataagatttttctaagcgtgcaagttacgctataatacagagcctccggatgtataagtgtatgacatccgggggcttttttgctcataacggaatggaaaagaacaaaagtgattagcgccattcggtatattattttttagacgcggatgaca

SEQ ID NO: 6384 - DNA, 82924 bp, Unknown
  gut microbiota DNA sequence
cgcgtctaaaagattatttatcatttaacccataaccctacagaaatgaatcaactcattacagattgtttgaacgaaatgccttatatttgcgttcataaagaaaagaaagtaagaaaaatgaagaaactcgtaatttttgatttagacggtaccctcctaaacaccattgccgatctggcacaaagtaccaatcatgcattagccgccttaggatatcccacacatgaagaacaagagtacaacttcatggttggaaatggtatcaacaaactttttgagcgtgctctgcccgaaggagaaaagacggaagaaaatgtcctgcgcatacgaaaagaatttgtaccctattatgaccaacataatgcagacaaaagccgcccctaccccggcatcacggaacttctaaccgaactacagaccaagggagtccaacttgcagtcgcttccaacaaatatcaagcagctacagagaaactaattgcccactattttcctacaattcgtttcatcgctgtctttggccaacgtgaaggggtaaacgtaaaacccgatcccaccgtcgtatacgatatcctgcaaatagcaaagacagccaaagaagatgttctctatgtaggagactccggcgtagacatgcagacagctatccatgcaaatataacctcctgcggagtgacctggggattccgcccacgcgctgaactggaaaccttccatcctgactacattgtggataaggctgaggagattatcgagagcgtcttgaaagactaaattcagcctctactgcctgaatcttgccaccgtatcagcaaggtcttgccaataaataggcaaacggtatgcatcatttttactcctttttaaatagatattacccctgaaagtgccgaaaactgcctaaccttgcaactgaaatacaaaaaatgaaaaacaatgatgaagaaatggttatcgacatgctttgccgcaatctgcataagcagtagcttgcaggcacagctggaaaatgaaactctcaaattatggtacgatggacccgccacacaatgggtagaagctttgccactgggcaacggacgtataggcgccatggtctttggcgaccctgtacacgaacaattccaattgaatgaagagaccgtatggggaggttctccttacaacaacaccaatcccaaagccaaagacgctttgccacggatccgccaactcatctttgagggcaagaataaagaggcacaagagctttgcggccccaccatctgttcgccatccgccaacgggatgccttatcagactgtaggttccctgcatcttgactttgatggaatcagcaattacaacgattattatcgtgatctggacattgcaaaggcaatagctaccactcgcttcaccaccaatggggtaacctatacccgtgaagcctatacttctttccccgatcaggtcctggtaatccgcttgacagcttcacaaaagaagagcatctcattcactgcaaaatataccacgccttataaaagtaatgtggtacgcagcatctcctcccgcaaagaattacagttgagcggaaaagctaacgaccacgaaggtatcgaaggcaaagtggaattcaccgccctcacccgcatagagaacaatggtggcagtctggaagcaacatcagacagcaccctgcaagtcaaaaatgccaatagcgttacattatacgtatccatcggtaccaacttcgtaaactataaggatgtatcgggcaatgcactcagcactgcacagaaatacctgaaacaggtcaacaagaactatgcgaagaataaagccgcccatatcaatgcatatcagaagtacttcaaccgagtatctctggacttggggcgcaatgctcaagccgacaagccgacagatgtacgcgtcaaagagttcagtacaagcttcgatccgcaaatggctgctttatacttccaattcggacgctacctgctgatatgcagttcacagcccggcgggcaagccgccaatctgcaaggtatctggaactaccagctacgtgctccttgggatggcaaatatactactgatatcaatgtagaaatgaactactggcctgccgaaagtacctccctgcccgaaatgcacgaacctttcctgcaattagtaaaagaagcagccatacaaggacgcgaaagtgccgccatgtacggttgtcgcggttggacattgcatcacaatacggatatctggcgtagcaccggtgccgtagacggaccaagctacggagtatggcccacttgtaacgcttggttctgccagcatctgtgggatcgttacctcttctccggcgacaaaaactatctagccgaagtataccccctgatgcgtggtgcctgcgaattctacctcgattttctggtacgtgaacccgagaataactggctggtagtagccccctcctattctcctgaaaacagtcccgtagtaaatggcaaacgtacatttgttgtagttgccggaaccacgatggacaatcagatggtttacgatttattctacaatacgattgccgctgccggtttaatgaacgaaaacaccgctttcaccgacagtttacagactgtagttaacaatttagcccctatgcaggtaggccgttggggacagttacaggaatggatgcacgactgggataatcccaaagaccgtcatcgccatgtttctcatctctggggtttgtatccgggacgccaaatcagtgcctacaactctcccatcctgtttgaagccgccaagaagtctttaataggtcgtggcgatcactctaccggttggtcaatgggttggaaagtgtgcctgtgggcgcgtctgctcgatggtaaccatgcctataaactgataaccgaacagttgcatcccactaccgatgaaaagggacaaaacggtggtacttatccgaacctgtttgatgcacacccgcctttccagattgacggtaactttggctgttctgccggtattgccgaaatgttcgttcagagccatgacggagctatccatcttcttccggcattgcccgacgtatggaaacagggaacattgaaaggtatccgttgccgtggcggctttacagtgaaagagatgaagtgggaaaacggagaattacaaacagccgttatcacttccaatattggcggtacactccgcatacggacccagactcctttgtatctgaatggggaaaaattgactccaagtgtccaagaggtatctgacaacccgctattacaatcacagagcatccgcaaaccactgattgctgccaatgcaccggtttgcataccggaatatgcacagacttatgtgtatgatatcgaaacaaatgcaggaaacgaatacattctgaccgcaagaaatcaataagaataaatagtaaccaaaactatagggataccggcaaaagtcagtcgtcactatgttaaaacgtcaagaggggagcaataaactcccctcttttctgttatataacatcatttagataactcacaaaaacattatagacagtaaataacaaaaaataccaccctaaaaacagatattacacatatatattttcacatccctatacatttgcagcaacgaattaacagtgtgcccgaacacacataacgaaaaaaatcatacttaattaataacatgcaaagaatgtctaacaaaatgaaaaacatgcgcgccgcgctactattctgtttagtagccgtgatatcgcttagcgtatcagcgcaaaatgtaaccgtaacaggtactgtgacagacaagacgggagaaaccgttatcggtgcttccgtagtacagaaagggaataccagcaacggtactattaccgatattgatggtaatttctcccttagtgttcccgccaattccacattggtattctcttatgtgggtatgacttctcaggaaatacccctgaaaggcaaaactaaagttgaagtagttatggaagacgatgcacaggctttggaagaggttgtggttatcggttacggttccgtgaaacgtaaagacctgacaggctctgtggcaacagtcaattctgaggtgctggcagctgtcccggtagcctctgcaacagaagcactgcaaggtaaaatggccggtgtacagattactacaactgaaggttcacccgatgcagaaatgaaaattcgtgtgcgtggtggtggctccattacaggtgataatactcctttattcatcgtagacggcttcccggtagagtctatcagtgatattcctgcttctgacattgaagatatgactgtactaaaagatgcctcttctacagctatctacggttctcgtggtgcaaatggtgtaatcctggtaactactaaaagtggaaaagaaggcaagttaagcgtatcttataacgcctactattcctggaaaaagatggccaagactttgaatacactgagcgcaaccgattatgtgaaatggcagcgtgaatatgcgttgttaagagataacgaaagcaaattcaccagcctcttcggtaattggcaagatgcggatctttatgaaaatgctcctaccaatgactggcaggatcaagtgttcggacgtacaggaaacactttcaaccataacctgacaattagtggtggttcagataagacaaagttcaacatgggttatgctcacatgaatgataaagccatcatgttgggttcttctttccgacgtgacaacttgagtttaaaactcaatcataaagtgaatgataaagttagccttgacttttcgatgcgttatgcaaataccactgtaaacggtgccggtgccaacgaaagcaagtctgaggtatcttcagctgactcccgcatgaagaatgtaatgatttaccctatgtttaacttccccgacttgagtgacagttatgaccctgactttcagttgacgaatccgattacatctgtatatgatactgaccgcaaacaaaatcgtcagactttcaacatgaatggaagcttctcatgggaagtcttcaagaatttcaagttcaaaagtgaattcggtttagactggtattacaatactgataaaaaatattatggaacttctacctataatgcacgcactaacagtgtagatacagaaggcgttcatccaatggcttactttgccgatacccaacgtaaaactttccgtaacaccaatacggtgaactatgattttaaaaatatcatcaagaataaggaccacagtctgaacgtattggtcggtgaagaaacccttaacaagaaaagttcattgaacgatgaccgtttgagcttctttcctatcagttttactgccgctcaagcttgggctttgtcttcgcagggtactccttatagcgtaaacaaatatactaatgccgacgataacctgctttcattttttggtcgtgtgaactatgattaccaaagcaagtatctggttagcgccactttccgtgccgacggttcttccaagttctctaaagacaatcgctggggttacttcccatcagctgccgtagcatggcgtatctcttctgaaagcttcatggagaagactcataattggcttgacgatttaaagttacgtttctcctatggtactgcgggtaataacaatatcccctctgaccagacttctccggtatggtcttctagttccactacctggcttaatcaatttccctcttattggactagcggcattgcttcaggccaaagcggatcttatgcatctaatcccgacttaaaatgggaaacaaccattacccgtaatatgggtctggattacactctgttcggcggcaaactgaccggtagtttcgaatactattggaacaccactaaggatttgctcatcgcattcccagtttccggttccggttatgactatcaataccgcaacctcggtgaaacagaaaacaaaggtttcgaggtctctctcacttggaacgctatcaacacgaaaaattatggattgacattcagcggtaatgtgggtttcaataagaataaagtaaagagccttggctcattgacacagtactcagcatcttcgggatgggcttcaacccaaattcaagatgactacattgttaagcccggtcattcggttggcgaaatttatggttatataagcgatggtcgttatgaagtaagcgactttgaggattactacgccgctggtgaaaaatgggtattgaaagaaggtgtggttaataattcaagtgtgataggtaccagctatcttcgcccaggtgctctgaaactgaaaaacatgaatgacgataatgttattgatgcaaaagaccgtactgttattggtaacaccaaccccaaagccagtggtggtttcagcctttcaggtcgcgtatatggcttcgacttgagtgcaaacttcacttatagcattggtaatgacgtttacaatgccaacaagattgaatatacttcgtcttatcaatattattaccgtaatatgctcgatattatgggcgaaggtaaacgctggacaaacctcgatgctaacggtaacctggtaaatgatcccgcacaattagctgctttaaatgccaataccactatgtggtcaccttacaccagttatgtattgaccgattgggctattgaagatggttctttcttacgtttgtcaacattaacactgggttatactttaccattggccttaaccaagaaagtaggcattaataatttgcgcttctacgctacatgctacaatgtgttctgtctgactggttattcaggtttcgaccctgaagtttctacccgaaacaagacagctcttactccgggagtagactactctgcatacccaaagagtcgccagtttgtaataggtgttaacttgaacttttaaaaacgaaagaagaaatgaaaaatatattatttaaatctttagcagctgtcgtccttctgggtgggctgtcttcatgcagcgatttcctggatcaaagttctccttcatccttggatggcaagaacattttcagtaactatgaatatgctcaaggaaccatagctaatatctatcaagaatttggagagcagaactatcgtgcacgtgccatttggtatggatacaatacggatatagaaatcttcagtggttcagacaaagcagacggaaaagctgatttggcaacatacaatgccggagtcggaaatgaccagatgaacgttactacaggtaccgatctttgggccaaaatatatgctgccatcgaacgcgccaatctggctattgaaggtcttcgggaaaatgcagacctgacagatgtaaatatgaagcaactgctgggcgaagctcttaccctacgtgcattgcactacgtggatcttatcaatatgtggggagatgttcctgcccgtctgacttcattgaatgccgataatatgtattcaggacgtgaagaccgtgatgtcatctacaagcaacttattatcgatctgcaagaggcacaaaacctctgtgcatggcctaacgaacttgatgccacgaaaacagtggaacgcgtgaacaaagtcttcgtaaaaggtttcctggctcgcgtttgtctgcaagcagcaggttatgctcaacgtcttgacggtgcaaaccgcctaagcacagacccggaactcagcaaagaaaaactttatcctatcgcactacaggcatgtaaggatgtaatggaccaagagggcaattatgtagctttgaaatcaaacttcgaagatatcttcaacaacaatggtatctctggtgatatcatcaatgcaggtagcgaatctttgtttgaaatcggttacagcaataacccggcacgtggacgtatcatgtataccttcggcattaagcacactactgccgacaatatgacaacaatgcttcaaggtagccaggtaggccctacacctactctatacttcgactattcagtgaaagatttacgccgtgatgtgacttgttgcccattccagtggacaaagggcgtacaaactcttcagtccttcaagagctggagtttcggaaagttacgttatgaatggacaaaccgtatgattccttccggaaacgatgacggtatcaacaagcactatatgcgctatgccgatattgtattgatgcgtgctgaattagagaacgagctcaatggtcctgctgctgccgctccttatctgaccaagattcgtaaccgcgccttttctactaccgaccgcgctacagaagttacagcttatgttgcggaggcatctcaaagcaaagagaaaatgttccaagccattgttgacgaaagagctcttgaatttgcaggagaactggtccgtaaggccgaccttatccgttggggaatgctgaaaagcaaaatggatgaaacaaaagataagatgaacgctatcgtaaatctgacagactatgactccaagcatccctatagccagctctcaggtcatgtctattataaaatgagtgcatacacttggacccgtaacggcatagcaactaccgagcccaatgccaaactgaacttctatggtttgaactatggtgaactgaatcttgatccggaaggctataccgaatttaccaatagcagtggcgaagcctcaacctggattaaggatactgcattagatgatgttattgactatctctacgtgcgcgatccggataaatatcaatattggccaatcttcaacgtcaatttgaacgataatcctaatcttgcaaattacgagtggtattaattaactaaatgattaaacaacgatgaaaaaatatatattatcaatttgtacattagctgccatttgcataggctgtgttacagtaacatcatgcagtgatccggatgatcttaatgatttggttcttgaccgcatattgtcgcctaccaatattactgcacgcgtctctcaggacgtaaatatcattgttagttgggatgaaatgaaaggagcttcctcttacgaaatcgaagcttatgccgatactcccgactacggtcagcgcacaccggatgtgtcagatgctaccactctcactcagactactttgactaatctgattggtgagacagcctattacattcgtgtaagagccattgatgaagacaactcatcacgcacatctaaatggatcgagatcatgcgtactaccaaccctgagcaaaatatgaacaaagtaaaggccggtgacatccaaagcacagccgttacagtaacatggacgccgggcattcaggctgatgctatcgtatgcactcctagcgctgcaaattcttcagctaagacggtgacttacactctaactgcaacagacatctcttccggatctgctaccgtcacaggacttgaaccggagacaagttatagagccacgttgaagttaggcgagaaaacccgtggttattctacctttactactaatttggatttacgtgacgctatccaactcaccccgacagatgactgggtgactgctattcaggacgcagcggcaggtagtaagtttgcccttgcagccggtgaatatacattgacatcagccaagctgcaaatcaacaataatgtgaccattgccgctcagaactccggtaacctgccggtgattaatacttgtattcatatcaacaacggttcttcactctatctctatcaggtagtgatggatggcaccggtacagatggaagtcaggctattgaatacaaaacagccggaggatttggcgatcttatcatcagcggaagtgaaataagaaattacgtgaaaggacttatctacatcaacgttgcagctgtagccaatacaatcaagatagaaaactccatcattcatgatatcgaatgttccggcggtgactttatcgatagccgtagcggtggttggaacaatcttatcatctcaagctctacattctatagctgttctgctaagcgtgatatcctgcgtgctgacgatgcttcaagcaaggtgagtgcaagtatgataacttctatcgacaaatgtacattctacaatgtaggtaatggtaacgccaattaccgtttcttctatctgcggttccccggcaataccaatacctttaccaataatgttgtagccaacttcgataatactcgcggttttgccaattcaacttccgtaggagtacccagctattcgaacaactattactataactgtaagaacttgacttcacaagccgaaggtaatactcagcccaatttaacatgtttcgatacagaaggaaagattcttgataagaatccatttgccgatcctgacaatgccgatttcactatcactgatgaactcttccagagttatggattcggtgatcctcgttggtattaaaatatttgaatccttaaagtaaaagagggtacgtcactatacaaagtgcgtatcctctttttcttttaccattttaaccccgccccctataccattattatcatcatttactccaaaaggaacaatatttcctcctctttatagctataaacttctatttttgcatacacataagtacaaaccactattgacggaacatttaaaattaaaagaatttatatcatgaagaaactctttttagtcttctctattttaactgcctctataactgttatggggcaacagcctattccggttaagcctcgcattcttatcagtacggacataggtggcacagatccggacgacaatcaatcaatggcacacttccttatgtacagtgagatgttcgaaacagaaggattagtatcttctccctcctatggacacggaagtaaacagaatcttctggacatgatagacctatacgaaaaagatctgcccaagttgaaaaaacacataaagggcttcccgtcaccggatgccttacgagccatctgcaaacaaggaagacaaggagcagccccattcaaaggttatactactgccacagagggttctgattggatcattaaatgtgctagaaaagaaagtacccggcccttatggatactcgtatggggtggactcgatgacttagcacaagctctacatgatgctccggacattcaaaataaaataagagtatactggattggcggaccgaataaaaaatggagtaccaatagctatgtatacattgtcgagaatttccccaacctttggttcatcgaggccaatgcttcctatcgtggattcataaccaatgacaaacaacctggtaaattcaacaaagactattacgatgaatgtatccgtggagccggacatctgggaaaagactatataaaatattacgatggaaaagtcaagatgggagataccccatcactactttacatgatggatggtgatccgaataatcctcagaaagaaagctggggagggagtttcgagaaattcactcatagcccaagaatcattttcaaccggagtactaccctgaaagatacggttccggtatatgccatcattgaattccgcataaagggaccggaaatgaatatccccgctgactcaacctgtttcaccatgacaacagatggtcaggactgggacggtttctatctgggtaatggtgaatatgccgtcagatatgctcctaaatctaccgcagtcctaacctacaagattacctctgatattccgggatttccggaacaaaccggagagttcgtagtaaataacacatggcccggaaagattgatgccgatgactataaattaggagattattggtatacagaccgaaatgacgcaaacctgtttgaaggaaaatggcagggaagtaaaacggtatccaaatggagaaaagatgttctgcaagactgggccaagcgttgggaattgcttaaataaatacatattctaaaaaataatagcatgaagagaatactattctatctatgttttacctgctttttttatcaggtgttttcacaatcacacaacctcccttggaaaaatggagccttgcaaatatccagcaactcccgttaccttcagcatacgaatggctctcccttcttctggctcggagataccggttggctgcttcccgaaaggttgaaccgggatgaagcggaatactatcttgaacaatgcaaacaagcaggcttcaacgtagtacaggtacaaaccatcaacggagtacctgccatgaacttttatggacaatcgtctatgccggatggatttgatttctccaatatcaaccgaccgggtatatatggatattgggatcatatggactttatcatcgatgccgccgcccgcagagggatttatatcggcatggtctgcatctggggcgggctggtaaaaagtggaaaaatgaatgtggaagaagccaaggcttatggtacttttctcgccaaccgttacaaagattgccccaacatcatctggatgattggcggagatatctatggaaacatcaaaaccgaagtctggaacatgcttgccaacaccattaaatccattgataagaaccatctcatgactttccatcccttcggaaggacactctcggcagaatggttcaacgatgccccctggctggatttcaatatgttccaaagtggacaccgccgctacggacaaagcaaagatgacaaaaagacactgttaccacaaggcacagaagaagacaactggcgatatgtggaacatagtcttgctcaaaagccactacgtccggttattgatggagagccgtcttatgaagccattccccaaggacttcacgaccctaaggaaggtttctggaaagacaacgatgtacgcagatatgcttactggtcggtttttgccggttcattcggtcatacgtacggtcatagctctatcatgcaattcctaaagccgggagttaatccagcctacggtgctaccaaattatggtatgaagccctgaaagatcccggattcaaccagatgcaatatttgaaaaaactgatacttgcttttcccttctttgaaagagtagccgaccaaagttgcatagccggcaataacggtacaaagtatgaacgtctcattgcaacacgtggcaacgactatatgttagtatacaactataccggacgccccatgaaaatagacctcagcaagattcatggaaagactaaaaaggcttggtggtattcaccacgcaatgcagagctatcttatatcggtgagtttagttcaaaagtagaaacgttccagcctgaaggtggtcattcaaacggcaatgactgggtactcatcctaacagacggaacccggaagtatatagaagcattgcaatagatagttttaataaaaacaagaggatgtccctgaagacatcctcttaaccctaaccagtcataatttcttgaattcaagtaattatcatcttcttacctttacgacacgggcaaaagtatatagaaaatacaaaatgtaactccataaatcagtattttctgcattatttagcaatcaattgtttatcagccttatacaagacaacaaagatgtccgttttgatgaattcatgtattttttgacgaattgatcttattcattcccttatcccgatactcagttggagtcatccccatcttctgtttgaagcatttgctgaaataacggggatcattaatacccaccatataagagatctgagtcatggaatattctccggtttcaatgaattgcacagcacgcttgatacgcatttccttaataaactcaataggtgccaaaccagtcagtgtcttcagtttcttaaagaagactgaacggctgactgccagttcctgcaccaaatcgtctactaccaattctccattatccatattcttctccatcagttccaccagtttatccataaacttacgatcgttcggggacatttccggtccttgctcttctacggtttcttccgttaagtcaaccgttgcatttcccgtcatcaggttatcccgatagataccctgtaactttcggcgctgtgtgagcagattctttacgcgtgctttcagataagtggcactgaacggcttagtgatgtaatcgtccgctccatactccaacccctccaatttgctttcaatggaagtcttagccgtcaacaatacaatgggaatatgactggtggtcatatcggcacgcagttcacgcgtcatggtgatgccatcttttccgggcatcattacatcactaataatgatatccggaaggaatttcaaagctttactccaaccttgcataccatccactgcttccacgattctgtactcagaagcaaagatgctgcgcaggaacaaacggagttccgaattatcttccacaagcaacatagtccctttggcgtccatactctcttccgattcctcctctatattctcttcttcagaagattccggtatttcactaagaatatcggtcacttgttctataactcccatacccactgtagcatcatcttgcaagaattccaccgattcattatagtgttctttacctttcaggaagtccaccttaaaacagcttccttctcctaacttactatcaacggtaatggtcgccttatgcatttctaccaattccttcaccaatgacaaaccgataccggtgctggactgattgaacagattgcggtctaccagattctcaaaacggacaaacagcgactttttcttattatctgcaatacctattccctgatcttccacacttacggaaactgatttctcatcttcacgcacaagcaccgtgatcatctttccattcggagtgtatttaaaagcattggaaagcagattgaacacaatcttctcaaatttatccgcatctacccaaagatacagttcttccttctccgtttcaaacaggaagtctatctgatgttcttcggcaacagactcgaagttcgccatgatcttgcgagtaaaagccactacatccatacgttgaacctgcatcttcattttccggttctgtatcttccggaagtccagtatctggttgataagcctcaacatgcggttcgtattccgttctaccacctgtaactgttcacgggcatcatccggaagtttggtattccccagtatatattccacaggccctgaaatcaaagtcagcggagtgcgcagttcatgagagatatcagtaaagaaacgcagtttcatatccgtcatttgttgctcgacggacacctcatgcttcaaacgataaatagtgaacaagatatacaccgccgctacaataatcatgatgaagaaaagcacatacaggaaataagcaaacggagtttcccagaaggaaggtagtatctcaatgtccaatgtacgcgtgttttcagtccatataccgtcactgttggtagaacggactttaaagacataatgccctttgggtaagttggtataagtagctacacgctgtttacctacatagttccaggccttttcaaaaccttccaggatataagcatactgtatttcggaaggtgcggaatagtcgagtgcagcaaactgtatggtgaaaatattctcccgatgcgacagtaccaattctttggtatcatccaatccctgtttcagtacggaaccctgtcccggcaccacgtccacattcgccaccaacaatttggagaaaaccatcggcggcacataattactcttcccgatggaatcgggattgaaatagaaaatacctgtacttgccccgaaaagtatattacccgaagcagtatattccgaagccgcctcactgaaacgtacccggaaaaatatctccttatcggcataattctcaaatttctctttggaaggaataaacttactgataccgttttccgaactgagccataaattaccggctttatcctcctgtatggaaagcaatacatccgaaggcaggccgtcctgtaccgtataagacttaaaacaagcattaccgctctcatccagcgatactaacttattcagtcctccgccaaatgttgcaataaagagttccttattccgggtagatacaatccaatgcacatcattattgcttaggctatgctcattgtccggaacacgcaggaaatgacggaacttcacatcttcgggattcttgaagtctgcatccatcatcaaggcgcctacggtagttcctatccagatatgcccctgatcatcacctgttataaaacgggccttgtaacaataatcaataggatatcctttcaggttattacgatggttcacaaaaatctctttaccaccctgactgtgcgccatatagttgatgccgcctgcaaatgtagcaatccagatgcgtccatgcttatcttcgtatacacaataaacattgtcgtcactcaaactataaatatcaccttcctgatgctgataacgtgtcagcttatagtgatagctatctttctgtttttcagctttcaccaggccatcccctttggttgcaatccagaaattctgtttactgtcctgcaaaatgaaataaacattaccacgcaacggagtgccgctgtgcgacacagtaccgttttcggtcagatagcccttatttacacggttcttatcatatatccgtagtttaccatctttcaagcctacccataaattctggtcagcatcttcgcaaagggcacgtacttcgttgctcaatgactcataatcgtgtggtaccggcgttacgatgccaaactgagacggacggaaagtgaccttctccaatcccttagagtgagtgcacatccatagattcccctgattgtcggaaaaggcagtatgtattttattggaaaagcgccagtcatgccctgacaactcattatagaacggacgcagactattactttcacggtcaaaatatgaaaaaccgccgccatacggatgtacccaaagcatgccgttgatatcttcatgcgcatggaaagccggacgagaacggtccgtactggtcggttccacagctattacttcacgcttcaagacctgtgtatgcggattaaagtgtaccactgtacccggaatatgttgctcgaaccatacttccgatgctttatccacataagtaccatgaatcggcgcatcaggaaaacgggaggcagggaagtgttctgtcttctttgtatcacatttataagtaaagaatccgtcttttgaagtggtcagtatgatctcattaccatctatatgattgattgacacaatgtgggatgaaaccggcagactcagcaacaagaactgcccgctctccttctgatagcgccatacgcgcccgttatccgatccgaaatagatttcggggccatgctccaaacaggaataaaaagcttgcccgcctttcttctcccgctctgctgtctctgcaaaataaaagaccggtgatttctctccgggtgccaacatccctaatccgttatcagacaatatccattcattacctgcccggtcctcatatacctgaaacacacgtgaggcagaaaactgccccgattgggtagaataatattgggaggtcaggctataatcctgtggatcagttgccacccggatcaccccttcagtctccgtcagcaaccataccgaaccacccggaaggactttgatattcgttatattggctgtgcccccctcttcatcatcacccggcgcacgctcaaacgtttccgtacggggatcgaagcgataagcgtgattgtcataggtttgtagccaaaggaagccatacttgtcttccagcatatgatctatacgattatgactcaacacgatacgattatcaagacgtgccttatatgttttaaatgaataaccattgaacttattaatgccatcccaagtagcaagccagatatttcccttgcggtcttgcaggatgctcattactgtattttgagaaagtccgtcttcagacgaataatgggtgaaaaaacaatccggctgcgcttttactgacaacacacctatcaacccaaggatcagatataagatttttttcataataacaggcttattctatgcggtaaagataagtatttcatagaaaattcatatatctttgtttagattttaacaaccactggtcatgagaagaatcgtaatattgctaatcctccaaataattgccaccggcttctgcttcggacaattaccacatacctttacacaatatacctcagaagacggactctcgcagaataccatcatgagtatcctgcaagatgacaaaggagtgatgtggttcgctacctgggacggtctctacaaatttgacggatatacatttaacaactataaagcccatccgggcgacagcatcggattgagcaacaaccgtctagacaatattaaagaagacagatacggatatatctgggtacaaagctacaatcaccaggtttatcgtttcaatccgcggcttgaacggttccaggctatcccttacgacaactacctgtctttggacatgtatgtgcttccgtgtggagacgtatggataattaccgtacaaaatgaattgattcatatttccacccatccggaaacacatgaaatgaaagccacagacttcttcaaatcccatcagatttcatactcagagcctatcaagtctatctttcaggacagccgggagaaccaatggattcttaccgagaacggattataccgcctgactcgtaacgggaatgaagagaaactttcttcttacttcgtcgctcctccggaaaaggacaaacaacctttttacgatgcattggagaacaatcataccatctactttacttccaaacagggatgtgtatacgaatataatccggacaccggccagtttgtaaggcaagagttccccaccggctcgtctattaaaaccatccgacaactcaaaaaggacaagctattcattggcacagccagcgacgggttctttgtgtatgaacaaagttccggaaaccatcgtcactataatacccggaattatccttcattaaaggacaaccagattaaagcagtctatatcgataccaacggtgaagcatggatacgcctcaacaccaaaggagtgacgcacttcaatcctgaaaacgagcagttcgatcacttcattctgcaagacaagtacggcaaagatatcgtcgattcccgaccggaaatgtatatatacgaggatgttaacggctctttatgggtacatccttcgggaggaggacttgcctggtacgaccgtaagaacaaccggatacgtccgttttacaatccggccctgcaatcgggctggagcgccgacaataaggtgaccaatgtctttactgataaacaaggtaatttatggctcggttcatacggaaacggcttggagaagatctctttcaataccaatcatttccatttacttaccgctgccccggatgacacggaattcccgggaagcaacgtccgtgccgtttatcaggaccgcaacgggtatatatggacgggcaataaagacaaagttatacgtgtctacgacagccaatggcgctatgtgggcaacctcacatcctcagggactatctccccttacagtacggacaagttaggaatcggctattccatcatacaagatcacgaaggcaccatctggataggcaccaaaggcaacggactattcgccgccaggcctcaaggaaagcctctgacttatcatctcgttcagtacagcgccgacgcaaacgatgtatacagtctgagcggtaacgagatatacagtctgcatgaagaccggcagcaacggatatggattgccacattcgaaggaggaatcaactacctggaacggggaacagacaaagaagcggaccgtttcatcaactaccggaaccggctaaagaactatcctatcagccaatgttaccgtacgcgtttcatcacctccgacaccaaagggaatatatggataggcagcgccacaggattactgatgtgcaagggcaatttcaaagaaccggaagagatagaattccaacgttattgccgtatttcgggaaacgccaacagcctcagcaataacgacgtgcacaacatatatttcacccggaaaggcgaaatgtacgtagccaccttcggaggcggactcaataagctactctcactggagggtgctgaagcccgctttcaggcatacaccatgaaaaacgggcttccttcggacgtattgctatccatcgaagaagacccacacggcaatttgtggtgcgctacagagaaagaactgtgcaagtttattccttccacggataaaataataaactacccctccagagccttccccctacgaattagtttcaatgaaggggcggctctgcgaacagcatccgattatctgatgttcaacaccgtgaaaggtgttctatatttctttccggattccatccatacaagtacatacgttcctcccatcatcttcacccgcctgcaacaggccgagaagacggtgactcccgaagaaggtggcatactgaccacccacatcgatgatacgaacctactgaccctgcctcacgataagaatggattcagcatccagtttgccgccctggatatgaagtatcccggcaacatctcctattcctacaaactggaaggattcgaaaacaactggaacaatattggcaaccagcgaaccgccacttacaccaaccttccgaaagggcattacaccctgaaagtccgctctacaaacagtgacggcatctgggtggagaatacgcgtacactggacatcaacatacttccctccttctgggagacaccgtgggcatattccctgtacgtgctatttatcttattggtcatttttacagccacctatattctcttcaccatcttccggctgaagcataaagtatctgttgaacaggagatttcagatataaagttacgtttcttcacaaatatatcgcacgaactgcgtacaccgttgacgctgattgccggtcccgtagagcaagtcctgcaacatggcaagctgaatgatgaggaacgggaacagttggtgctggtggagcgaaacacgaaccggatgttgaggcttgtcaatcagattctggacttccgcaagatacagaacaagaagatgaagatgagggtgcaacagattgacctgatccctttcatccgccacattatggaaagtttcaacagccttgccgatgaacaccagattgatttcagtatggatacgaaagtctccagcctcaagatatgggcggactccgacaagttggaaaagatattgttcaacctgttatcgaatgccttcaaatatactccccaagggaagcagatcaaagtggtggtgcaggaagaagaaaaggatgtgattcttgctgtggaggaccagggaatagggattgcagagaataaacaaaagtccctgttcgtccgcttcgagaatttagtggataagaacctcttcaaccaggccagcaccggtatcggcctttcactggtgaaagaattgatcgatatgcaccacggctccatcagcatccggagcaaacttggagaagggagttgcttcagcatcagattacagaaaggaaaagaacacttcgacgaaaccgttgaattcatcctgtccgactacgtggtaagtgatacctcaccggcatacaccggaaatcagttctcttctctcaccggaaacgaagaggagaacctgaacagtgaaaaagaaactatcctgatagtggaagataatcaggaattacgcttcttcataaggaccatctttgcccagtacttcaatgtgatagaagctgaaaatggtaacatcggactggaaaagagcaaattgtatatgccggatatcatcatcagcgacgttatgatgcccgaaaaagatggtatagaaatggtgcgcgaactacgggaagagatgaccacaagccatattcccatcgttatgctgacggctaagtcgaccatcgaaagcaagatagaaggcatgaagctgggagcggacgattacatcacaaagcccttcagcgctgcctacctgaaggcacgtattttcaatctgcttgaacagcgcaagaagttacaggcattgtattgcgccagtctgttgcctgcatccaccgaacaacctctggcagggaaaaaggaaaccaccactccggccctctcgcccaacgaccggaaatttatggataaagtgatggaaaccatagagaagcatctggataacggtgaccttacagtggaagacattgccggcgaagtaaacatgagccgttccgtattcttcaagaaactgaaaacactgaccggtttatctcccgttgagttcctgaaagaaatacgtatgaagcgggcagctcaactcatagagacagaggagtataacatggcacagattgcctacatggtgggactgaatgactcgcattacttcagcaagtgcttcaagcagcaatatggaatgacaccgactgaatacaaggaaagccgaaagcaaaactaagtgccgaggtcccattacgagtgaaggtacttcccactaggactgaagccacctcccactaggactgaagccacctcccactaggactgaagtaccttcccactaggactgaacacgtgttccactacgacaaatcttagtggaacactaaatgctttatcacacaaactattacgttgatcgctatacctatatgttgtcgctatcccatcataaactcttattcaaaaaggatagtacggcttcctggactttcactccacaatcatgcggcatatcccacagttccgtaaccagtttgtcgcctgccgaacggctttcccatactttccgcatttctgcaaaggcggcattcactcctaccggaggaaagagcttgtcatgttccccgttcagaaaaaacatcggtttaggacaggcaatggacgcgatatgcggataatccagataacggcggatacccggcaacatattggcaaaacctcccctttcttttccatactcccatgagaactgacagtccgtagtcaccatccagcagacggcagctccggctttcaccttatcagagagtgccgaaagcatccaggcacggtaagctcccatcgaaaagcccatgcaaccgatacgtttggagtcgacttcgggcaacgtagccagaaagtcagtggtgtacatgtcttcgtagttcatgaaagcactccaactgcgtcccagcatcatgaagttacctgccacagccatgtgtttgtcaccgtcaactccttctttccgtccgcgttccccccagaatatagcatcaatagaaataactacatatccatgtgcagccagataatcgcctacatattgcccaccgtagcattgtttagcccaggcatcggcatcagccaggacttcgggagacactccgaagggacggatcatcttctccttaccaatcgtataatgacctccatggtcatgcaaaagcactaccgccgggaagggaccttcaccatcgggcaccagcatataggcgttcacacgggaataaccggtcagattgaaacgtaacttccgggctttatacccattccgctgctcttcggctacaacctcagtccggtagtcggtagtgcgaggcggaggggcaagcatggcatccagcacggcattgcgtgcctgtttgcgccacttcttaaaattcttaaccggactatttccccaagccatggggtaagtcaattctgctttcagttgatccaggaaaacaggcatctctctttccagttcgtaaccggataaatgctgagaaagggcggctaccgaagtagccaaccctaacatcatgcaaagaatacatcttcttaccatattactgctgcttaaaaccataaccattcgtaattcccgaattcagcaatacctgataaatattcggcaataaatggatggggggattctttgccgcataatcggcatccgtataaccggcgaagagtttcttcgcgtaagaatcctcatatttcaacatatcaatagcccagggagtctgtacatatccatcagcttccaaagccagcgcttcggcagaacccggttcgatatacttaaacaagcctttgattgcaacgttggtcatcgtcactcctgcataagcaggaaccagacttccccaatcatcatgctgtccgcgccatcccgggaacaataccggatcatcttgcttgtcaaccggagtttgtgatgtcagtctatatccatacttggatttagcatcgaccatcttcgtccagatataggcaggtatctgattgccattcttaaacgtgtagtaaccatcctgacgtatgccctcaatgatagccgacattacctttctgttttcaacggcaacttccggaagaataccggtgcggataatgtcaaaacgacgcacgccttcgccactgaattccagagcacgttctttaagcactgcattatacacagagccgcaatccgagatatatttttcaaagttcgggtcgttgttgccggggaacgcccggttatggacgatggcaagatacgtcttggcgctgccttcatcgcccaatgccgcacacacttcagccaacatcaggtaagcatcggaaatacgcatataagagaaattgataccggaattaccataagttttcgtatcaggcgcagtcatccggttccagtcccacttattggtacccgggccgcatcctttaccccatgcactgcggtcgaatgactgcatcaactcctgaccaccacctgtgctccctgttacagcaacagaagcgtcacgacgcaagtcgttattatcgaaccaaccgtagtagaaatgtgcctgaatacgatcttgtccgcaagccacgcaaggtgcctgaccgtcaccacccgacgaaggacgaccaatataggccggacgagaagatccgccattgtattcatgagggagttcgtagatagattcatcagccaatgttatattatcggcggcatgcatctgctggaacatatactggtaaggattattatactcctgtccattcttacctgtggaacggggatccgttgtacgcaataccaccgaaccgggattcatatagattgcctgaagatattctttggctatggcatacaaatctttccaatcgctgcggcgtccataaatggcaccgttcttttccacactccaatcgtcgaaagtaagcacctttccgtcaccatccacatagaagtctgcacccaggtctgtgcggcgggttgcataaccaccattatacatgcaaagacgtcctataagtccctgaacatatgtacgattcatgacatccgctctcgtactgccttcacccggacgatacatatgaggctctacctccctgagtttccggatatgatagtcataaatggcatagcgggaagtcagtccttttgcctgctcaccggcattcagcgcatggggcacatcgccataccagcggcacaattcccagtagcacgtagcacgcagagccacagcctgtccgtagatatccgaaagattattaggttctccggtcatgattgactggaagttatcaagcgcctcaaaactggatatcagggaattggccacggatattgtttcgtaaagcttggtaaatacttcggttccttctcccgagttaatgttatagttacccgtaccacccggataataccatttttcacagattccggcgctaccttcatcgtaaatgtcctgagagtcttcaatatccgatccccaaaccggatgccagaagaatccgacattatgcacactcctgtttgcacggagggtttcataaccataatacaatgcaccacgtgcagactcttcatttgagaagacaaaatcgcggtctactacactcggagacgaagtgtcgaggaagtcctggcagccggtcatcgcacatgcgaaagctgctgcgagagttatattcaatatctttttcatatctgtttctctgttattttacaattactatttagaaagttatgttagcaccgaaagtgaatgtgcgtgcacgcgggtaagttccgaagtccatgttgagcgtcgggaaaattctcaggtcactgtagaatccgctttgccccgtaggattggcattcacttcaggatctatgcccgaataaccggtaatggtgaagagattggttgcagtaagatacaggcgtatcttatccacatgtactttagtcaaccagttcttgggcaatgtatatccgagcgtcagcgtctgcaaacgaaggtaggaaccattctccaaccattccgatgaagttataccactctgatggtagggtaaatgatatttggcattcgcattcaaagctctcaactcatcgggattggtaacggcatacaagtcaccggcagcattcacattgtaaaccttgaaagcatcggccacccaggatgcacgctgtgcaccgattccgtcaaactcctgaccggatgcattgatcatagcagccacgttatataccttaccgcctgctgtccagttgaaattagtagaaagatcaaagttcttatagttgaaattcagttggaagcttcccgtatgacgaggcatcacttcgcccaggcaagtagcatcatccaagtctaccgtaccactttcatccacatcacggaatttggcagctccggggaatgcagtctgtccggcaggcagatcgtaagggtgcatgtatgtagcggtcaaggctttcgtaatatcgggtacaccttctttcagaacgtactggccattggtgtaattgaaatcatccacggtataatatccttcgctgataaagccacgtaccaggccgatcgctttcccttccacaaacatatagtcgttggtaggaaccagagaggaagaaccccagtatgaagaatagagatactggtcggcattaggcagttcatccagtttattgcggttgtagttatagatggcacctacgttgaaacggaaatcacctttgtttatcacatctacattcaccgaaagctcaataccacgattggatgttttaccgaagttctggaactggtaagagtatccggtagtgttatccacaggtacggccatcaacaagtcttttgtagtattccagtatacttccagactaccgttaacacggttgttcaggaatccaaagtcaataccgaagttgcgcgaaatagtagtttcccatttcagcttagagttagccagcaaaccgtccggacgatagaatgaaccgagttcaccgttgataggggtatgattgctgcccgaaccaaggctcgaccaggtttcacgccacagattggaactaatattgtcactgcccgaagtaccataggacaaacgaagcttcagattggaaagccaatcttttgtgccgttcatgaaaggttcttccgaaaggcgccatgcgaaagcacctgcgggaaagtatccccaacgattatccggcgcaaacttagaagagccatcggcacggaacgtaccggtgaacagataacggtccatgaaagtgtaactcaaacgtccgaagaaggaaaccgtacgggcaggcacgctataagaattggttgcagagaaagaggtggttgccgtatggatcaatcccatcgtggtgtcataatcaaatgtagaaggatagccacggcccgtgatttgcgacgattcggaatccgacttcaggacttcattacccagcaatgccgagaatacattgttcttgccgatattgaagttataattcaaagtgctcaccgaacgcaatccatctcccatgccccggttaagggtggcacgcttatctccgtttgtatatccgttctcataataagtactcttcgatgaactgcgggtaagtgataattcactgcgggccacaagccccttgatgatctcccatgacaaagctgccgatcctctcaatgaacgggaataggatttattcgtgatatcattgatcaattctaccggattgtgcttgtcgtcgatattagccacaccgaaactgaagcctgaggcaacttccgaataagagacaccacccaacggattgtcaatgggacgatagcgataagctcccgacacattagaacctttaccgttcgttacattctcacgtccattcagatttgactccgtataacggaaatcaacatccaggtccagtgccttggcaagtttctgccgaatcttgaaagaagcattcagacggttgtagtccgaattgatcttgattccttcatcgttaacgtagccgagtgtaaatatcactttcgttttatctgtaccgcccgaaacattcacactgtggttatgagacagtgcggtacgcagtacatcatccgtatagtcatgggctttcacattggcatagtcggcatagtggttgccatacttacttcccagaccgaagtatttctcaacagcatcctggttagcagttcctctggatgcggcatagctccagttatgaaggatatactcctgagccgaaagcgtttcaagcgtcttcgatacatttttgacctgtacatagccatcatagcttaccttaatctgaccttccttggcactcttagtggtaaccaggattacaccgtttgcaccgcgtgcaccgtaaatagccgtagatgacgcatctttcaacacatcgatagattctatttccgaagccggtatatcgccaatattgcttaccggaaatccatcgactacatagagcggatcattggactgggttatagaccctcctccgcgaacacgtaccgagattgtagctcccggacgaccgtcctgcgacactacgttcacacccggcagacgtccctgcaaggcctgtgcaacattggatacaggattggcagcaacctcatctccttttaccgaagctatggctcccgtcaggtcacgacgtttcaccgtaccgtaaccgataacaaccacttcatctaacatttccgtatcttcaagcaactgaatattgaaaagactcttacctgcaaccgctatgtcctggtctacataacctatatatgagatgtgtaatatcccattagcagccacagtcatagaaaagttaccgtccatatcggaaacgacaccgtttgaagttcctttctctaaaatggtagcaccaataatagattcaccggccgcatctctgaccgaaccggaaatcttaattgtcttcttgtcattggaggcttgctgcacaccggctactgaagtatgatccactgtcaggggagcagcttgagaaaaagttcccaaattgaggtaggacaaaaccccgagcattaacacgacctttttcctgtaattcataagtaaatgatttattgattaaacaaattctgaattcactacaaagcatttatgtctgccttgcacttgcaaaatagcagataatctatctctctcaggtgaaaaatatgcttgaatcggtggaaaaatcgctctataccactcaaaacaccgcagacaaaaggatagggggattttctcacagtaaaatcacaaaaaatccccccggattcactctttttattgaagagagatccggggggatgagaaataagatagattttatttatttcagatgcttcaatatccactgcaactgtccgtattccgtatcattggaagtccagtgctcattaatcggggtgatcaatgcttccttcggacaatccagcgtattataaacagcatagctggtggtcggcggacacacatcgtcattatatccccaggtaatataagtaggaacctttatcagacgggcaaagttcactacatcataatatgccatcgtttttaacttctccggcgtatccatcccttcggtacggaaaaagtggggatatcctccggcacgccctgctttataccctgccatatcactcaaagcgggatgattggctacacaagctgttacacgaggatccaaaccggtcgtaatcaaagctaaagctcctccctggctaccgccctggacaattacattcttaccatcccattcgggcaaggaagtcaggaggtcaatgctacgcacacaacccagatacactcgtttcatataatagttgtcacggttatcaagtccattattcagatagccattctctctaccgttaaaagcgttgctgatttccttgaatgcctcctctgtcaaggtaggattcaatccgtgtatctcaatctcaaaacgaatacagccttgttctgcataatatttgtgacgtaaaggctccttgattgttttaattccggcacccggagggcaaagaactaccggacaagaaccttttgttgcattcttcggatagaacaagtagccgtaaatactctgtccgcgactgttcaacatcagcttaataagatagcaatccaccttgtcggtgcaatattcctttgccaattccttcgtataagtcaacggatacttggctgcctccgctttattgttttcccagaactctttaaagtccttcggcatctgcgtataaggcttaatcttctctggtgagaaacccagctttacatgatgcttataactttttccatccacagtggctgtcaagcggcagtcgcgaaagccgggttctttcatggttcccacaggaataaccgcttttccctgcttcaacgtaaccgaaccggaagtttctgccggcatcatatcaccgcctatttcataagatacagttactccatcctgcggaataccatatttatagaactgaacttcaaccgtagccttttctccggtcttataaatccagtcagcatgattgggcacggtaacccaaagcacatcactccgatacgggtaattctccgcacatacaaacgaaaacggaagtatcagagcgagcagtaatacaaacaaattctttttcatcattgtgttctaattgttataggtttatttatcaaatccaaatatcaatcagcgctttatgcttagcagttcatccccatttttcaccggattccatccgtcatctccggcaagtacggtttccatctcataccctttgagattcttcaattgatgggaataaggaacacgcgctttgggattagcaccctcacccgtgctttcatattctgcatagaaagctgtcttttccgcttctttatttccccagttattccagccggcaggagagatatgtttgcccagattgcaacggataaacacagcctgcgcatacggacgccagggacgtgaaagagcgacatcccgtacaccgtcatccgcagtcaggcgacaatcataaaatacgtaaccatacttctgtccctgatccgtagaaggtgcagtgacatacccaccgctcttactatggatatggcaacgattgaagacagccgtagaccagccgaatatgaagtcgaccgtaccttctatatagcaatcttcatagtactgacggcaatttttcccatacgtataaagtgtatcctgagagccaaggaaacggcaattcttgaaataagcacgatcggcacttacgaaacaggccactgcctgccctaccggaccggaagagttctcaaacgtaatattctcagcataaaaatcaggagcataaatataacaggaagacgaaccggaggtccctttttcttcgccaaagcagtttttcttctgcgcataatcatcatacgaaagcactgccccgtcctgacctatcagagaaatattgatcttactttccggtatcacaatcttctccttatacacgcctttacgcaccaatatcgtagtacggatattcttgcggaaatcaggaacagcattaatagcctcctgcacggtaaagaaatctccgctaccatcctgcgccactacaaaatcatagtgtcgaacatacttagccagttccggtacttccttggcaatggcatccatggccaaaccagccacaacacgcccgccataaacattcagatgagtgttatcttcacgtcccttcggcatcgcggcaacctgattggcaggtacccacataaataattttcgggagtctaccggtcccatgccctctacaaggtcatgcgtaatcttattcatatccacaaaagccacacccaattctttcgctacattccgcggagaatccagataagcaccgtgtgtatcaattagcttgtcaccttcagtaacagcaggttgctccgaagcctcccgctttgcatccagattcactcctttctgtatatcatcctgactgatagcctgagccactgcattcccatttgccgtaccaaaattacggcgtacaatggagttaaacaaaacaggaataccacctttggcacgggtttcgtttacaaaacgtttcaggttctcatcaaaagtacttcccggagccgtataccgtttcggatcggacttctcatcgttatgtccgaactgaataaatacatagtcccctttcttcacctgtgagattaccttttcccaccgtccctcgtcaataaaactcttggaactacgtccattcacagcatgattgtctacacggatttcctcggaaagatagccgggcaacatctgtccccagccacgttcggggtttccacctgtcaatgacttattggccatagtggagtctccaatcatgaaaatcgtaatcacaggcttgtcagccttgaaagccgagagcaggaaaaacaaccccagcaataatgtcaacttgtgtttcataattcatcaaaatataaatagtattattattttccggtgcaatattacccaaaaacaaaggatctgaagtgtaaaaaaagtcgcaatcggtagaaaaattaatattaatcgtatatttgccggcaaaacaactaatctggcaacaaaatgaaaaagacaagaagtaacactttcattcttgaaaaagaaatcgcatgggaaccggcaggcgaaggagtagtacgccaaataatgggctacgacgggcaagtgatgctggttaaagtaaaattcgagcaaggtgccatcggtacaccacacacccactaccatacacaaaccacctatgtggcaagcggtaaatttgagtttaccgtgaacggtgaaaaacaaattgtagaaaccggagacggcgtctacattgaaccggatgcggaacacgggtgcgtatgtctggaagctggtattctgatagattgtttcagccccatgagagcggattttctaaggcgctaataccttgtctgcaaggagttaacttcttgccaacaaaaagttaacttcctgtcgacaaggagttaactccttgtaagcaggaagttggctctttgtagacaggaagctaagttattaattttcaggtttccagtcactacacatccgatagatgtaattcagatcatcgtattgggctgcttctttcttggtcagctgtttcgcccattttacccgaccggctgccgcagcaccttctcctgtactattgtactcagcatagcgggctgtcttctcattttcctcttttccccagttatgccatccttcgggacgaatatgcttacccatttcacaattgataaatacggtggcagcatacggacgccagggacgccccagataaaccttgtccacacccggattggccgtcagtttgcaatttttaaaaacatagcccaccgcaatgtcttcgggcgtagaagctgccgtcacgtatgaatttgttttgctacggatttcgcagttctcaaacaaagcggtagaaggaccgaaaataaagtcggtagttccttcaatgtagcaatctacgaaataaaggcgtgtacctgcggcacctgtataaatggtatcctgatttcccagcaaacggcagttgataaataccagtttatccccttccgtgtgaagagcaaccgcttgtcccagtctggcagcattattttctatggtgaggtttttgaaggtaatattgtttccctgcacttttacagtataggtacggaaagtacccatcttattaatgttggcatggtcatcatacgtgataatcgtattttccacactttcaccgatgaaatccacattttgcacccaagaaggaattatcgctttctccttatatgttccattctttatcagcactgtaaccttgtaatccataaaagcacgaatgccttccatagcttccgtcaacgtgcgatagtctcccgaaccatcacgggcaaccacaagcgtatctttatattgagactgtgccgatagcggcatgatccccaccaggagaagaagtatgccacataaataataagttagccgtttcattgtcttatttctgattaacgatttcctttacttgttgcagacgctcccattccagacttgccatgataaacggacctactgccttgggatcgttgctgcgaattgtttcatttatataataggtgtaatctcccatacggtagtttttgccacccaggccggcaactgcacaggctctggtaatagtcaccacaccgtctttatctacttctatgaagttatcaagaataccttggtatcctttgagagccactttcagatacgatttatcaatatatcccttacgaacagctttgaacaaagcatagacaaacatagtagaacaggaagactctacataatttcctttctcaccactcttatccaacacctgataccataatccggtcttcggatcttgtatgcgcttcacctgtgcggcaatattattaaggataacgagcatggaatcacgtcctgcctcatgtttcggaataaagtccagtgcatctacaaatgccattgcataccatcccatcgcacgtccccagctatgctgtgactgtccggtaacgggatctgcccaacgttccttacgactgacatcacaggcatggcgataaagtccattcttcggatcatacgtatggcgtgccactgtaataaattggttcacaatatctttataatcctgtacacgattattgcggaaagcatattcagcatagaaaggtgcccccatataaagaccatccaaccacatctggttcggatatactttcttatgccagaaaccgccgtcctcattacgcggatgggtgtcaagctgactacgcaacaaatcaatagccttcttatatttttcatctttcgtctgttcgtagatgcggaacaggaatttacctgaattcaagcggtcgatattgtattcattcagtttataggtctcaatacttccgtccttgtgtatcatggtgtccgcataagctagtgcatagtcaaacatcttctgatctccatacgtatcatacacatccagcatggcttgtaattccagcccatgacaataatcccatttcagtttcggctggaaatccagttgccaggattccgggcaacgaatcatctccgattctaccatacgtaccgaccacggttgcttatcgcttactttctgagcagacaactgagtggagcaaatcagcgctcccatcacaaaagttttacaaagcagattgttcatcattctgttcttgtttttaggtatatagattatattaagtaatgtgacaaagatagcggttctcacctaaagcgttgtgtacttttcgactgaaaaggtgcattatttattttcaccttctataaacttagtatttcgtgtgcgagaacgagtgttttcgtgcacgataacgagtttttttgccatttatttgcatttcgaacaaaaattgcaggaaattagacgaaaaaagtattgatatacatcaaataatgtgtatttttggccccagaaataagaattaataattttaaatcaacgtatcatgagtttaaatcaaaatgcagtgggaaagatgaccaactacaggtggaccatctgcgccatgctattttttgcgacaacagtaaactaccttgaccgccaggtgctgtcattgacgtgggatgaatttatcaaacccgaattccattgggatgaatcacactacggaacaatcacttctgttttctctattgtttatgcagtctgcatgttgttcgccggtcgctttattgactggatgggtacaaagaaaggtttcctttgggctatcggtgtatggtcggcaggtgcttgtctccacgctctttgtggtatcgtaaccgagcatttcgtaggtctgcatagtgcagccgaattaatgggtgccacaggtgatgtggtagtaactattgctactattagtatgtactgcttcctggcagcccgttgtgtactggcacttggtgaggctggtaacttccctgccgctatcaaagtaactgccgagtatttccctaagaaagaccgcgcgtatgctacttcaatctttaatgccggtgcttctatcggtgctctggttgctccgttgacaattcctttgctggctaaagcatggggttgggaaatggctttcatcgtaattggtggtcttggatttatctggatgggcttctgggtattcatgtactctaaaccttctgaaagcaagcacgtaaataaggctgagcttgattacattgagcaagacaagcacgaagaaggtgctgctcctgtcgtagaagaaaaagacgagaagaagatgaagttctggcaatgcttcagctacaaacagacttgggcatttgctttcggtaaatttatgaccgatggtgtttggtggttcttcctgttctggactccttcttatctgaatacgcaattcggtatcaagacttccgaaggattgggtatcgcattgatctttactctgtatgccatcacgatgctttctatttatggtggtaaactgcctactatcattatcaacagaaccggtttgaatccgtatgcagcacgtatgcgtgccatgttgatatttgcattcttcccgctggtagtattgctggcacagcctctgggtactatctctccgtggttaccggttatcatgatcggtattggtggtgcagctcaccagtcttggtctgccaacattttctctaccgtaagtgacatgttcccgagagcagccattgcaagtatcactggtatcggtggtatggccggtggtttcggttcaatgattcttcagaaagtagcaggtaacttgttcgtatattcatcaggaagtacaatggtagatggaaaagaagtggaaatgactcatgatttactggaacaaggtgcacagttcgtacgccctgccatggaatttatgggcttctccggtaaacctgcgggatacttcatcatcttctgtgtatgcgcagtagcttacctgattggttgggttgtaatgaaggctctggttccgaagtataaacctattgtattggaataatactggaatagtatatatagataataaaaaaggtgctcagcagtgagcaccttttttgatatatataaaagacagaaaagtaccggcacaaaaaaagccccttctcacgaagcgactctcttctgcactctcccgtgaaaaacatgaacctcagtatactttagcaaatttaccttcaaacggtccatgagagatacaggagcgcaaaactttaagatgaaaaaaagggaagtctcacgacttccacaattcttctaaccttaaatctaaatctctatgaaaaaaacgttcgacaaagataagggtttattacattcaaaaatactaataaaagatataaagaaaagaggaacgtttaagatttgctaaatgagactcggattatcctcctgaaagtcacagttccttccattttagaaaatactatccaacaagtccgcatagataggattttgccttagcagatggggtacacctgtcataaacaattgcttacgggcacgggtgagagccacattcaatttccggtcaatccataccccaccctcttccgtaagattggcaaggaatttcaattgataagtacggttcacacagaaggaataaataatcacatcgcgctcactcccctggaagcgctctacggtatctaccaggatatcgtttaaacacggaatgcccaaagcggctatttcacttttaataagagctatctgactacgatagggagtgataatccccaaagtcaaggcaggacgaaaaccggaagtaccgtcatattgccgatagatagcagctgccagtctggctacgagctgtgcttcaaaatgattaatctttgcagattgcgaagcgacctccggcactgaggcaagaaaaaccacacgacgcaccagtatatctgcaaattcatcattttccaaccccggagcaagtgtcagttccccttgctggtgttgcaaaccgacaggttccagcagtccaccataaaaggcatgattaggaaaacgagccacttccacattcatacgtccctggcgacaaagcatgtcgtaggagcggttagttatgagtgataagtgatgagtggtatcggcagaattccggtagaggcgttcaaaaagggaatctttcaaattatgcaaaccgatgctatgcaggcagtcctcgcagacttcagattgggattcggattgaagcacgacagcgggcaattgtttatgatcaccaatgaggataaacttaccaatagcatttccacccgccacattacgcgcacaaagaagccccagcagttgtggttccagtatctgagtagcctcatccacaatagccacatcgaaagttttcagacggaacaattccgttttggaggagaatgtggagacagtgcccacaaaaacacggcaacgctctatgcaggcatgcacctcacgacgtgaagagcaggattccagcacattctctatcagatgtgaacggaaaggtatatcgcaggaaagttcactccctatacggatgaaatcaatctcaggagtaatggcagagagggttttgcagatttcatccactgcacgattagtgtacgagagcaataatatctgcttcccctcacgatagaaggcttccaccataccgcgtagagcacgggaagtctttccggtgcccggaggacctaccaaaagaaaataatctttagcagcctgggctttcagggtgatacgggagaaatcatccggagcaactgcaatgcgaggatcgaaagaaacgtcaaactccggctgtcgctggaatagcaacaggtcccggcgatccttgttggcagaaagaaaggcagaaagtcccagatacatactgcggaaagaagtatccatataatcatgctcgatggcataacgactgtcgggaggaagcacggaagtattttgttgcgaagcacgaagccggatacggatatcccggtcggtgattcgctctatatttcctttgaataccattttattggttacgttgtccgtatcattattacgttgatagagaacgatggagtcaccttcacggaaattcggcaatgtctgcgccgaccgctgattagcccgtgccaacacaaggtatgctttatgcagatccgccgcatgattctctgtgattgtcagatcgtataatatctctcccgcttcacacttttcttcaagcgtagaaagccacaaggcggcagcacctgtacgcccttcataatcaatatctcccgattttgaagtgtatagttccttcgtaataaaattatagagtgtatagaaatagcattgttccaacggtgtaagcgcccgaagacgctgcatcacggcatcaatggcagggtaaagatagcgtttccacaatgtattgttcaggtggcgctcattcagtgtatccggatgaatatccttcagccgctctgccgtatagtgcggactattacgtaattgcataccgtattcattcgccacaatccggttgcgcacatccattacacggcgcaccatcgcccacgacggacgagcgggatataacaacggatagcgggtatagagcagataagcttttactttgcggtgatccatccccatggaatattccaataccgcctgatacaacaacatctgtaccttattattctccttcggctccaccttgccccggatagaatactcgtcagctttgcccgacttcatttctatgaaggaagacatgtcgcgctgcatatagtccaagcggccttgcaatcccagagcttcacagatataggtaggttccagtacggcatccgtcttatccagttcataaccgggagcacggaaagtctccgtcaccgtttgtcggatatggtcgaagtgccgtttacaatcagcgaagaattccttttccttttctttatccaacaaatcagcacacgcggccaaatcaatggaataggtacggaacgctttcttcatacaagtcagatagtccggttccttcttggcatagatccactcatccagaaaaagattggcgatatttccaagcaacagcggacgcgtattgtcaggagattgcaggcgtgccagcaaataattggcaggatgatgcccgtaatctttaaagcactctgccaacgagctgatatccaacagatagtccggttccagtataataaaggaaggcgtcagtataccagcctcatctacagctacatccagcaggttaacctgcgcatgacgccacagcagtttgcaagtctcggcaaattcctcattcacctgagatacattgtagcgtaccctcagcggttcatcggcaacggtatctacaggcaatacatatagaaaagtgtcgtcagcatactggaaacagacacgcatccggcgtatccgttcttttgcaggcggagcaacaatataagtggcatctgcacggggaagctgatgatatagttcagcagggatatcctcacccgtcaaccgtttcacaaagaaggtcaatgtcttgatgtcacgcaacagattctcacgtgaaggttcggattgccgattcagtacggcattggaagtcagtcggaaggtgtgcaagcggttttgttccactacggagagccccacttttgaggccacaaaactgacacgagcggaaaggtccgtcatttgcaggctaccgtccggcatctgcgtacggcaaaggcgttccagaacttcacgaagctgacgataaactgttaccagcggaatattttcatcctggcagacagtaagcaagaaatggtagtattcccgtgcttcttctttcattattcctccttctcttcatcagtctcgtccgcgtcggtctttttatccttaatcatcaggatactcaactcatagagcagataaagcggaacggaaaccacagtcagggtgaaggggtcgccagtcggcgtaatgatagctgaaataatcacgataagcaccagtgcatgacggcggtatttgcgcaggaaagatttatgtaccagtcccaagagcgaaagcagccacgtcactagcggcaattcgaaagccaatcccatgcagagcaccagcatcatgaagttatctatgtaggaattcaaagaaatctggttctcaatagccgcgctcaattgataggtggaaaggaaacgcagcgtcagcggatagaccataaaatagcccagaagtacaccgaggaagaacatcaccgtaccaatgcacagggctttcttcacgccacgccgctcattagcatagagcgcaggactgataaaccgccagatttcaaaaaaaatataaggcgtagccgtcaccaccgacatccagaatgcagtggacatgtgaataaagaacggggcagccagattaatattgattagtttaacgtggaaatcctgtgtgaagaaatcatcatggagatcgaaaacttttcccacatagcgcagcacgtcgtagaaaacgaagtcattgtgacagggagctaacactacgttatcaaacagccacggcatcgcaataaaataaccgacagccaatacaaaccatacaccgagtacccgaaacaatacacgacgcagttcgtccaaatgatcccaaaaggttaattccttatctgccatagtagtaagtagctacgagttacaagttacaagctacgagtgccatgcggcataatcgcgcagccacttgtagcttgtaacttgtagctcgtagcttatgtaactcatttattttttgaagccggctcttctatatcatcctttgccttgtttatttcttcttttgcttcattcacaccatctttgaagctcttcacacctttaccgagtcctttcatcagttcggggattttcttaccaccaaacaacaacagtattaacagggcgatgataacccattcggaaccgctgggcagaaagcctaataaaagtaagtttgtcatatccgtagtcttttaaatttgttgcaaatataatagtttcaccacagattacacagatttacacagattaaaacgaaaactttctgtgtcaagccgaataaccgggaagcatatacagctcacgaacggacgattaatcctgataatagattcttttcacccgtgtagaaatacttgtcagcacctcgtaaggaatggtttcaagaatatcggaaagtaccgtaataggcagatgatcgccgaaaatctctacggcatccccttccttacaatcaatgtccgtaacgtcaatcatgcaaacgtccatacagatgttacccacatagggcgcacgctggccattcaccaagcaataggcgtggccgttgccaagatgccggttcaacccgtcggcatatccgataggcaatgcggcaatccgtgaattacgtgtcagatgccctttgcggctatagcctactgtgtcttcctggggtacatcacgtatttgcaggatggtagttttcagtgtgctcacattattgataatgctgttatcaatgggactgacaccatacaaaccgatacccaaccgtaccatgtcgaactgtgcacccgggaagcgctcaataccggccgaattgcagatgtgccggagtatcttatgcggaaatgcttcctgcaactgcatggatgccgcttcaaacatttcaatctgtccacgtgtaaacgcatcgaactgtgccgcatcactacccacaaaatgcgagaataccgaacgggcaatcactgcattctgtcctttcagccgttcaatcaatcgcggcatattttcggcagcaaagcccagacgatgcatacccgtatccagttttatatgaatcgggaagttagtgattccctccttctccgcctctttaatcagtgcatccagcaggtggaagctatacacttctggttccagtttatagtcgaacatggtcttgaacgcggtcatctccgggttcataatgatgatgcttgccgtaatacccgctttgcggagttcggaaccttcatcagccacagccacagccagaaaatcgacatgatgttcctgcaatgtcttggcaatctcatacgaaccggctccataggctgatgctttcaccatgcacaccatcttcgtatccggacgcagccgactgcggtaatagttcagattagctatcatggctccaagattcacctcaagaatggtctcgtgtacctttttctccagttcttccgtcaaagcatcaaaaccgaactgacgggcaccttttatcaatataatctcattctccaaccgcagttctccacgggaaatagcgcgcaacagggtttctgtattaggatagaaagccttctcgatgtcaaagcgtgcggcacacgaagatatctcactgcctactccgatgatacgctcaatgccgcggctaccggcaagctgcgatactttccggtaaagcgtcggcgcattctgtccggtttccagtatatccgagaggataagagtccgcttcagtccgttactctgcgaacgacggtaaagaaaatcgagtgcaatgtccagtgaagcgagatcactgttatagctatcatttatcagcaggcaaccgtttttaccttccttcacttccaggcgcatagccaccggttccagtgtcgccatacgttccgtaatcttctcggcaggaagcatcagataaagacaggcagccaggcagttaagcgagttctcaatggaagcatcgtcaataaaaggcagtataaaggtattatccatctccagataacgataagaaatgacggtacaatcctcctttttctccaccttacttataaacaggggacgctccatatctttccgactccatgctatttcacgggcactgagcatagacttcgccacacaattactgataaactcatcatcaccattatagatcaccacatcgcagttcttgaagagcgacagtttttccatgcacttctcttgcaaagagaagaagttctcctgatgagctccgccgatgttggtcagtatgccaatggtaggtttgataatattctgcaaggcacgcatctctcccatctccgaaattccagcttcgaaaatagcgagttcggactgctcgttcatctgccaaacggacagcggcacgccgatctgcgaattatagctgcgtggtgaacgaacaatcacccgttcagggctgagcaattgatgaagccattcctttacaatcgtctttccgttactgcccgttatgccgataaccggtatctgaaactgttcacggtgttgttccgccaacttctgcaaagccttcaacggattggcgaccacaaggaaattaacagctaacatatccgaattactcattgccagttgtccgctttccacccatttataagcttctttactgactacaaaattgcgaacaccgcgtgaatacaagtcaggaatatagcgtgcgccatcattgcgcttggtagttaaggcaaaaaataaggtttcttcggggaaactcaaggaacggctatcagtaagtaaccaatctatggttgccggcgtgtcccccacacgtcgtgcactgatgcgttcggctattgtttcaatcgtatatgacatatatctttctcttttttgaaatctaagtacgggtattttttgttaagtcggtcgatttttaacacaatttgtcctaaaaaacgcttatactcgtctgactccggatggaagggcttatgagatagcgctttattgatattttcactttcctgcataatctctaacgcgtcctcagagagacaggtctgcacgaacttctcccatacatagcgtaccgccaaaggagatggatgcaccatatcatcggcataaaaacgatagtcacgaagctcgtcgagtaaaagttcataagccggaaaataaaagacatgtccgggaaaagaagtctgtaactgatcgatggcaagcagaagtgtagctttactcaattgattagcgtgcatcccgtcgcgtacgtggcggatggggctgaccgtaagaatcactttcaacttcggattccgagcaatcaaaccggagaagagagaggtataatccgatacaatctcctgcacgctgagccggcgacgggtaaagacagactccggttgtttatgacaattagcaaccacatgtcccgtggatttctgttcgtacacccatgctgtaccaaaagtcaacatcaggcagttcaaatggtggatacgttcgtgcgctgtttgcagacggatattaatacgctgcaacacttcttctgcagagggagaagaaaaatcaccatgatgcatcgggctatgccagcactcacgaaagaaaaacaggtcttcttctttatacagtctgcccgtcaccaactcacgcaaagctgttgaaacagacaaaggattataaagaaccccaaatggattgacatccggacgaaatctggcatccgcaagcagtgcaccgatgttggtggcaaagcaggaacccatcaacagaagttcgtccgcctgagtaaaacggggcagatcggaaggtaattcaacaggggtagaaaagttcatacgtttacatcatcatattcttccggatagagaatttcacgatagccattgcctgaatggaagcaaagggaacatccatcggttcatggtgcggattataactcacaagtttaatgcaaccctcctgctccgaacggttcacatacttcactgccagatactcatcgccatcaatatcgaatgagactagatacatttcaccataaatgacattgctgaagctgttcatttccttgaaacctacaatatctcccgatttcaggatgggatacatactgtccccactaatataaagggcaccgtcgcatacgggaatactaggtatttgtattcttcccatcacaaactggtgcttattggcaagcaatgtacgcagattagcggcagcagtaatgtcgtacagcactacactgcggtctttcatcacatccggcgttttgggattgtgtattatctcaacattacctgtcgccagttcgttataacaactttgtaaatgacttacaggggttcccttccctaacagcaaccagttataatccacatccttcatcttgctcagcaataacgggaagtcggtgctgtttcgtgcaatccagttactaagtgtagaacgcgacacacccaggtaggcagccagatcagcatctgttttgaagttcaatacacgcttggcacgcttcacgatgtccgctacattaaaaaagatatccttttccatatttatttatataaataagttctaatgttgccttcaacatacacttatgcatttttttaatgcaaaagtcaatatatgatgttttccatacgaaaacgaagttatacattacagcaacaaaactaatcaatttgttttaaaggggcaaataaaagtaagggaaacaataccggcactataacagaatatctttcccactacgagtgaaagtatttcccactacgactgaaggcacctcccactacgactgaaggtacttcccactacgactgaacgagtgtttcactacgactgaatcgagtggcacacccatcatcctatcaggcaacagcttagagggaatttacggcttttggaacatgatatccgtcccagtcatattcttcggtataactatcgaatgcaggagtttccgtaatgcacgcttgtgcaaaaagcccggcaatttccgcctgttctgccggtgagagtccacgttccttgtgcaggatacggtaataagtgggttttggaaagagagtacgaatcatccctttcaacagcaacgctttcttataggggatgttatcaaagagggtactgatgccccaggcataacgaagtttcacagtgcttcggaagtaaggacactgaccggcatccataggataattggcaggattcaccgttacaatactcttcacactttgcggcacatgcaacgtaacaagatggcgcaggcaactttcacttcgctcacaatcagggttaagacagtggaggtaatttaaaggcaccgaatcataattaaagcagtcttccatgatattctgtttttgaggggacaaatgtagtgaatctattctgacggaacaatccaaaggagaagagttcttgaaatattaagataaaaaaggagaagaactaatgttaaagcggcaaggattcatatttttcccccaaaaagggaataccttccgttttcttttactaattttgcaatttgtaatcctcagaacagagatgaagacagaaccaacaacatataacttgctaaattctatttctgatcccgaagatctgcgtaaactgagcgttgatcagcttccggaaatttgcaaagaattgcggcaggacattattaaagaagtttcgtgcaacccgggacactttgcagccagtttggggacggtagaactgaccgtcgccttgcattacgtgttcaatactccttacgaccgcatcgtgtgggacgtaggccatcaggcgtatggccataagatactgaccggacgtcgggaaacattctccacaaaccggaaattcaaaggtatccgccctttcccttctcccgatgaaagcgattatgacactttcacttgcggacatgcttcgaactccatttcagcggctctcggcatggcggtagcggcagaagaaaaaggagaaaaagaccgccatgtggttgccgtaattggcgatggcagcatgagcggcggactggcattcgaaggattgaacaatgcctcagcaagttccaacaacctgcttatcattctgaacgataacgagatggcgatagaccgcagtgtaggcggcatgaagcaatatctcttcaacctgaccacctcaaaccgatacaaccagctccgcttcaaagtatccaagatgctgttcaaagtgggcattctcaacgaagatcgccgtaaagcacttatccgctttggaaacagcctgaaatcaatagctgcccaacaacagaatatcttcgaaggaatgaatatccgctacttcggccccatcaacggacacgatgtgaagaacatcgcacgtatcctgcgggacatcaaagatatgaagggaccgaaaatcctgcacctgcacaccattaaggggaaaggcttcgaacctgccgagaaggctccgggcatttggcatgcaccgggaaagttcgatcccgaaacaggtgaacgctttacagcggatacacacaacctgccaccgctgtatcaggacgttttcggcgaaaccttggtggaacttgccgaaaagaatccacgcatcgtcggcgtcactcccgccatgcctacagggtgttccatgaatatgctgatgcaggcaatgcccgaccgtgcttttgacgtaggcattgccgaaggacatgcagctactttctcaggtggtatggccaaagaagggatgcaacctttctgcaacatctattcgtcattcatgcaacgtgcttacgacaatgtcattcatgatatcgccatactcaaactccccgttgtgctctgcctggatcgtgccgggctggtaggagaagacggaccgacccaccacggcgtgttcgacctggcctacttccgccctatccccaacctgacaatttcctcgcccatgaacgagcacgagctgcgccacctcatgtacacggcacagctgccggacaaaggtccgttcgttatccgctacccccgtgggcgcggtgtgctcaaggattggaaatgcccgttggaagaaatcccggttggcaaaggacgcaagctgaaggacggtaaagatatggcagtcgttaccctcggcccgatagggaacattgccgcaaaggccatcgaacgggcggaaaaagaaaaagacatctcaatagcacattacgacctgcgtttcctcaagccactggacgaggagatgctccacgaaataggacgctcattttcccgcatcatcaccattgaagacggcatacggaaaggcggcatggggactgccatcctggaatttatgtcggacaacgaatatacaccacacgtacaccgcataggagtaccggacaagtttgtagaacatggcacgatacaggaattgtatcatctgtgtggcatggatgaggaaggaatcttagaggccataaacataaattgtcatgacaaagaaagaagcaataaagatatttgaggagaaaaaagtacgtacggcttgggatgacgagacggaggaatggtatttctccgtaattgatgtgatagaaattctaacagacagttccaatccaagaagatactggagcgacttaaaatcaaagttggcaaaggaaggcagtcaactgtacgctaaaatcgtacagttaaaaatgttgtcaccagacggtaaaatgagattgacagacgtgatgactactgagcaaatgtttcgcctcattcaatccattccctcccccaaagctgaacccttcaagctttggatggcccaaactgccaaagagcggctggatgaaatgcaggaccctgcaaaagaggttctgagattagaacaaaacaaggataagagtaataaagagcaatgaaaattattattgccggtgccggcgcagtaggcacacacttggcaaaattgttgtctcgcgagaagcaggacatcatattgatggacgacaatgaagagaggttgagcacgcttagttccaacttcgatttaatgacggtcacggcatcgcctacctccattcagggattgaaagaagtgggggctagagatgctgacctgtttatagccgtcactcccgatgagagccgtaacatgaccgcatgtatgctggccaccaatctcggtgcaaaaaagaccgttgcccgtattgacaattacgagtatctcctgcctaagaacaaggaatttttcaagaaactgggtgttgactcattgatttaccctgaaatgcttgccgctaaagaaatcgtatcttccatacgtatgagttgggtgcgccaatggtgggaattctgtggcggatcgctgatacttatcggtaccaagatgcgtgaaaaagcggaaatactggatattcctctgcaccagcttgccgaaacagacaagccctatcacgtagtagccatcaaacgctgcaacgaaacactgattccgcgcggtgacgatgtaatcaaactgcatgacatcgtttacttcaccactacccgcaagtatgtaccttatatacgtaagatagccggaaaggaagattatgccgacgtacgcaacgtaatgatcatgggtggaagccgtattgccgtgcgaaccgcccaatatgtacccgactatatgcaggtgaagatcatagataatgacttgaaccgttgcaaccgcctgacagaacttcttgacgataaggttatgattatcaacggggacggacgcgatatggatctgcttatcgaagaaggtctgaagaacacagaagccttcgtagccttgacggaaaactcggaaacaaacattctttcctgccttgccgccaaacgtatgggcgtcagcaagacagtggcggaagtagaaaatatagattatataggtatggcagagagcctcgacatcggtacggtaatcaataagaagatgattaccgccagccacatctatcagatgatgctggatgctgacgtcagtaacgtaaaatgcctgacctttgccaatgccgacgttgcagagttcaccgtgaaagccgactctaaaattaccaaacaccaggttaaggacctcgggctgccgaagggaaccactatcggcggattgatccgacagggcgaaggagtcgtagtgacaggtaatacacaaattctgccgggcgatcacgtagttgtattctgcctaagcatgatgattaagaagattgagaagtactttaattaaatgaagaactaaaaaaagaacattcttcattcatatgatatgattaatttcaagacagttatacggattatcggtatcctcctattgctggagacggtgatgctattgctttgctcgggcgtttcattctattaccaggatgaagcgttggtagatttctgggtatcagcaggtattacggcaggtgccggactactcctggcagccatgggcaaaggcggtgaccgccaactgacacgaagggacggatatgtactcgtcagctttgcctgggtagccttctcgcttttcggtatgctaccgttctacatcagtggatatatacccagcattaccaacgccttctttgaaacgatgtccggcttcagcagcacaggcgctacaatattggatgacatcgaagcactcccccacggtctgcttttttggcgcagcatgacacaatggataggcggcttgggtattatcatgttcaccatcgccattcttccgatattcggtgtcagcggtttacaagtgtttgctgccgaagccagcggacctacacatgacaaagtgcatccgcgcatcggtatcacagccaaatggatctggagcatttatgctggtatcacctgtatccttgtcgccctgctgatgctgggggggatggactggttcgacagtgtctgccatgcctttgctactacaggcacaggtggattctccaccaagcaagccagtgtagcttactatcaatcaccctatattgaatatgtaatatccatcttcatgttcatatccggtatcaacttcacgttactgctgttctttgtcaaccgaaagttcaagaaagttatccacgatgctgagttaaagtggtatttctggtcggtagtattatttaccggcctgatcgcagtgatactttattattccaaccccataggcatggaagatgcattccgcaagtcactgtttcaggtgatttcactgcacacttccaccggattcgccacggacgactatatgttgtggcctgccgtgacgtggggtttgctgaccatcgtcatgctgatgggtgcctgtgcaggaagcacaacgggtggtcttaaatgtatccgtatggtaatcctcggcaaagtggcccgcaatgaatttaaacatatcctccaccctaacgcaatacttccggtacgtatcaacaagcaggtgatttccccctccatacaatctacagtactggctttctgctttatatatgcagtaatcattatcattagcgtattgattatgatgggaatgggtattggttttgtagaatccgtggggtgtgtcgtatccagtatcggcaacatggggcccgggctaggagaaaccggtcccgccttctcatggaatgcactacccgatgtggcgaagtggttaatggctttccttatgttgctgggacgcctggaattatttaccgtattattacttttcactccggaattctggagaagaagttgatataaggcaaaaaagtgctaaaaagaaacttatttgccatctctatataacaaaatagccaatatttgttatacatttgcagccgaatgaaaaagtagttgaatgaaacagtgcataaaatactttatgattatcctactcggcgtattattgtacgacggtgcagctcaggcggcgggtatatcgtgcactttgataagtaacgatagcgagcgttgtttcctttctcaagctcctacctcacatcagcaaaacattcgtaatatatataatcatttctcgtccatgcccttatatatggacaatgtggacagtacacaggtgcccggcaacaagagttttttcattttactgaattacttccggatgtactggctggccgattcgccgactagcaatccgttgttgcatcccgctttctaccctgtgcccgacccgctctcctattatgtattcgggctgagaaagataattatttgataaactaagtcaggcaagttctacaggcttgccaaggtccgtcgaaggcaattcagaggtattgctaccttcgaccaactatcctattatatacatctaaaagttaattagatttatgaactttactttgttagtagtcgtcttgctgacggcaattgctttcgtgggtattgttatcgcgttgtctaaggcgatatcaccccgttcgtacaatccacagaagatggaagcgtacgagtgcggtattcctacccgtggtaaatcatggatgcagttccgggtgggttactatctgtttgccatcctgtttctgatgttcgacgtggagacggtatttctgtttccatgggcagtcattgcccgcgacctgggaatagcgggattgcttagtatcttatttttcttacttatcctggtattaggacttgcctacgcatggcggaaaggagcattggaatggaaagaataaaaaagcctaaaataaagtctatcccgtatgaagaatttacggataatgaaacgttggagaaactcgttcgcgaacttaatgccggaggtgccaatgtcgccctcggcgtactggacgatttcatcaactggggacgcagcaattcgctgtggccgcttacgtttgcaacaagctgttgcggtatcgagttcatggcactgggtgccgcgcgctatgacatggcgcgtttcggatttgaagtagcccgtgccagtccgcgccaggcagatatgattatggtgtgcggaactatcacaaataagatggcgcctgtactgaaacgcctatacgatcagatgccggacccgaaatacgtggttgccgtgggtggatgcgccgttagcggcggaccgttcaagaaatcctatcacgtagtgaatggagtagataagattctgccggtggatgtgtacatcccgggatgcccccctcgtccggaagcgttctactacggcatgatgcagttgcagcgtaaagtgaagatagagaaattcttcggcggagtgaaccggaaggaaccgaaaccggatagtgacgagtgatgagctacaataacgaaacataatcaaaatatggataatatacgatttataaaacctacggacttgcatgccgaaatgctccgcctgcgccaagagcagcagatggactttctggaatgcctgaccggtatggactggggagaaacaaccgacaaggatacgccggatacaccgcgtggtttaggagtggtttatcatctggaatccaccactaccggagaacgtttagtcgtacgtaccgctaccttggaccgcgagaatgccgagttacccagtgtcagtgacatctggaaagcagcagatttcctggagcgtgaagtatacgatttctacggcatcatcttcattggacatcccgacatgcgccgcctctacctgcgtaacgactgggtaggataccctatgcgtaaggacaatgatccggaaaaggacaatccgctacgtatggacaatgaagaaaccattgataccactaccgaactggcacttaacccagatggtacaataaagaataaagaactggtactcttcggagacgaagaatatgttgtgaacatcggtccgcaacaccctgccacgcacggtgtaatgcgtttccgtgtatcactggaaggtgaaaccatcgagaagatagatgccaactgcggctacatccaccggggcatcgagaaaatgtgcgaaagcctcacctacccgcagacattggcactgactgaccgtctggattatctgggcgcacatcagaaccgccacgccctttgtgcatgcatcgagcaggctatgggcattgaagtaagcgaccgtgtgaagtatatccgtaccatcatggacgaattgcagcgcatagactctcacttgctgttctactcttgtctcgcaatggaccttggtgctttgaccgcgttcttctatggtttccgcgaccgcgagaagatactcgacatcttcgaggaaacctgcggtggacgccttattatgaactacaacactattggtggtgtgcaggccgatctgcatcccaacttccagaaacgagtgaaagagtttatcccctacctacgtggcatcatccacgaatatcatgaggtgttcacaggcaatatcatcgcccagcaacgtctgaaaggcgtaggagtactgaaccgtgaagatgccatcgctttcggagctacaggtggtacaggacgtgccagcggctgggcttgcgatgtccgtaaacgccatccctacggagtatacgacaaagtggacttcaaagaaatcgtttataccgaaggcgactcctgggcacgctacatggttcgtatggacgaaatcatggaaagcatgaatatccttgaacaactcattgataacatccccgaaggcccatatcaggaaaagatgaaacccatcatccgtgtacccgaaggacagtattatactgccgtagaaggtagccgtggtgagttcggcgtcttcctggaaagccatggcgacaagactccgtaccgtctgcatttccgttccacgggattaccgctggtaagcactgtagataccatttgccgcggagcaaagattgccgacctgattgcaatcgggggaacgctggattacgtagtgccagatattgataggtaaaggaaggtacaatttacaatgtacaatgtacaatttagctacgcatgagtagtcggttgatgcattgccattgtaaagtgcctcgtaaattgtaaattgtaaattgtaaattacaagatgtttgactttagtatagtaaccaactggatacaccagacgctgacttccctgatgccggaaggtctggcgatattcctcgaatgtgtagtgataggcgtgtgcatcattctgatgtatgccgtactcgccatcattctgatttacatggagcgcaagatatgtgctttcttccagtgtcgtctcggtccgaaccgtgtaggtaaatggggtagcattcaggtcatctgcgacgtgttgaagatgctgaccaaagaaatcttcactccgaaagctgccgaccgcttcctctacaacctggcaccgttcatggtgatcatagcttcatttctgacatttgcctgcctccctattaataaaggtatggaagtgctgaatttcaatgtaggtgtattcttcctgctggcagcatccagtataggtgtattaggtattctgctggccggttggggatccaacaacaaattttcattgatcggagccatgcgaagcggagcacagattatctcgtacgagttgtctgtaggactgagtatattaactatggtagtgctgatgggtacgatgcagttctctgaaattgtagaaggacaggctgacggatggttcatcttcaaaggacacattccggcagtgatcgctttcgttatctacctgatagccggaaatgcagagtgtaaccgtgggccgttcgacttgccggaagcagaaagcgaactgacggcaggataccacaccgaatatagcggtatgcacttcggtttcttctatctggccgaatatctgaacctgtttatcgtagccagcgtggctgccaccatcttcctgggcggctggatgccgcttcatattgtaggactggatggcttcaacgccataatggattatattccgggcttcatctggttcttcggcaaggcattcttcgtagtattcctgctgatgtggattaaatggacattcccccgcttgcgtatcgaccagatcctggcattggaatggaagtatctggtacctatctcgatggtaaacctcattctgatggtactgattgttgtatttaaactgcacttttagattatgaaaacatacagttattttggcggactgatgcacggcatcggttctttgctgacgggtatgaaaactaccatgaccgtcttctgccgccggaaagtgacagagcaatacccggagaatcgtgcgacactggagatgttcgaccgtttccgcggtacgctgaccatgccgcacaatgaccggaatgaacaccattgtatagcgtgcgggctgtgccagatagcatgtcccaacgataccatcaaggtaacaagtgaaatgatagagactgaggacggcaaaaaaaagaagatattggcaaagtatgaatacgacctcggttcgtgcatgttctgccaactttgtgtcacagcttgtccgcacgatgcgattacgtttgctacagactttgagcatgcggtgttcgaccgtacaaagctggtgaagacgttgaaccatccgggcagtcacgtagaagagaaaaagaaacccgctgctccccaaagtgaagcaacaaagtaatttgtaattaagtaatttgtaattcaagaatatggaaataacccttgaaaccgtagtattctactttctggcagtgttcatcagcgtatgttccattctcactgtgactacacgccacatggtacgctcggcaacgtatctgctgttcacgcttttcggcacggcaggcatctacttcctgctgggctacacatttctaggctcggtacaaatcatggtttatgccggcggtattgtcgtactctacgtcttctccatcctgctgaccagtggcgaaggagaccgtactaccaagttaaaacgtagcaaactgttggctggtctaggtgcaaccgtaggtggtgccatcatcgtagtattcattacgttgaaacataaattcctcgttactaccgatcttgtaccgctggaaatcaacatcaagactatcggacactctatgctgagtagtgacaaattcggttatctgcttcccttcgaggcagtcagcatcctgttgctggcgtgtatcgtaggtgggttggtgattgcacgtaaacgctaaatacaattgattatgattcacatggaatattatctgatagtttcggctatcatgtttttcgccggtatctacgggttcttcacccgccgcaacacactggcgatacttatcagcatcgagttgatactgaatgctacggatatcaacttcgcagtgttcaatcgtttccttttccctgacggaatggaagggtatttctttgccctgttctccattgccatctcggccgccgaaacggcagtagctatcgcgattatgatcaacatctaccgcaatatacgaagtatccaggttaataagctggacgaattgaaatggtagaatcagtacagtatcaataatagaataaaaaagaaaagaatatggaatatacaatcttcattctcctgcttcccctcctctccttccttgtattggggattggcggcaaatggatgacgcaccggacggcgggcatcatcggtaccacggtattggctgtggtagccgtattgagctacgccactgcctggcagtatttctccgctccgcgtctggcggacggcactttcgccacacttatgccttataatgtgacgtggttgcctttcacttcaacgctgagcattgacctgggtatcctgctcgaccccatttctgtgatgatgcttatcgtcatttccaccgtatcgttgatggtacatgtctactctttcggctacatgaagggtgagcgcggattccaacgctattatgcattcctcagcctctttaccatgtccatgttgggtctggtggtggctaccaatatcttccagatgtatctgttctgggaattggtgggtgtttcgtcttacttgctcatcggtttctactatacgaaaccgtctgctgttgctgcaagcaagaaagcgttcatcgttacccgttttgccgacctgggtttcctgatcggtatccttatttacggttattatgccggaacttacaccttccatcccagtgaaatggcattgctgaaaggtggtgcggcaatgatacctctggccttgggactgatgttcatcggtggtgccggaaagagtgccatgttcccattacacatctggctgccggatgcaatggaaggcccgacacccgtcagcgcattgatccatgcagcgaccatggtggtagccggagtttaccttgtggcccgaatgttcccgctgttcatcggttatgcacccgacgtgctgcatctggtagcttacgttggagcgttcactgcattctatgctgcttcggtagcttgtgtgcaaagtgacatcaagcgtgtgctggcattctctactatctcacagatcggctttatgatggtggcactgggagtttgtacttctgctgatccgcatcatggcggtctgggctatatggccggtatgttccacctgttcacgcacgctatgttcaaggcattactcttcctcggcgcaggtagcattatccatgcggtacacagcaatgaaatgtccgctatgggtggactgcgcaagtacatgcctgtgacacatattacgttcctaattgcttgtcttgccattgcaggtattcctccattctccggtttcttctctaaagatgaaatactgacagcatgcttccagttcagtcctgtaatgggctggattatgacagtgattgctgcaatgacggcattttatatgttccgcctctattacggcatcttctggggcaaagagaataaagagcttcatgctgaacatactccccacgaaagtccgttaactatgacttttccgctgatgtttcttgctgttgttactatcggagccggtttcatccccttcggtaagttcatctcttccaacggtacggcttacgagattcatctcgactgggcggtggcaggtaccagcattgctatagctgtcatctccatcgcaattgccacagccatgtacgcacgggcaaagcaacccgttgccaatgcccttgcccgtcgtttccgcggattatggacagctgcctatcatcgcttctatatcgatgaagtgtaccagttcgtaactcataagataatctttggttgcatctcccgccccatcgcttggttcgaccgccacgtagtagatggtttcttcgacttccttgcctggagcgccaatgccaccagtgatgaaatacgcggtctgcaaagcggacaaattcaacagtacacttacgtattcctgttgggtacgctggcattgatattgttattgctgctatagtagagaaatgttaatcgtaatttgtaattcgtaatttgtaattataaaaatgaacatattaagtatttttgttctcatccccctgttgatgttacttggtctctggctgagtcgcaacatcaagcagatacgcacggtgatggtgacaggtgcatcggcattagtgttggccgccgtaggcctaaccattgcttatctgcaagcgcgtgccgccggagacacagctgaaatgctcttccgcgcggatgtaccctggtatccggcactcaacatacactactccgtgggagtagacggcatttcagtagccatgctgctgctctctgccatcatagtcttcaccggtacttttgcctcctggcgtctgcaaccgttgacgaaagaatatttcctttggttcaccctgctctctctgggtgtgttcggcttcttcatttctacggatctgttcaccatgttcatgttctatgaagtagcactgattccgatgtacctgcttatcggtgtatggggatcaggacgtaaggaatactctgccatgaaactgacactgatgttgatgggtggttccgcattcctgcttattggtattctgggtatctatttcggttccggtgccaccagtatgaacctgctggaaattgcccaattgcataatattcctatcgaacagcaacgcatttggttcccgcttaccttcctcggtttcggtgtactcggtgcattgttcccgttccacacatggagccccgacggccacgcttcggcgcctactgccgtaagtatgctccatgcaggtgtactgatgaaacttggtggttacggttgtttccgtatcgccatgtatctgatgcctgaagctgctcaggaactcggctggatattcctgatactgacaggtatctccgttgtctacggtgccttctcggcttgtgtacagacagacttgaagtatattaacgcctactcttccgtatctcactgcggcctcgtgctcttcgccatcctgatgatgaaccaaacggcttgtaccggtgctgtcctacaaatgctcagccacggattaatgactgccctgttctttgccctcatcggtatgatctacggtcgtacccacacacgcgacgtacgtgagctttcaggattgatgaaaatcatgccgttccttgctgtctgttatgtcattgccggacttgccaatctcggacttccaggactcagcggtttcgttgccgagatgacaatcttcaacggtgctttccagcatgcagatgttttccaccgcacgtggactatcattgcctgtaccagtatcgtgattaccgcagtctatatcctccgactggttggcaagatactgtatggaacttgcaccaacaagcaccatctggcgctgactgatgctacctgggatgaacgcactgccgttattattctcattgtctgcgttgcaggcctcggtcttgctccgttgtggatcagcaatatgattggagacagcgtgttgcccctggtgagtatatttcaataatggtatgctaataacttataactaataacttatcattcaatagatatggactattcccaattccttattctcaaagaagagctttcgctgatagctgtcatcgtgatcctcttcgtggccgacctcttcatgagccccgacgctcacaagaaggacggtaatccacgactcaacaccatgttgcccgtcgtgctgctcacgatacacacgctgattaccatcatacccggtccggctgccgatgctttcggtggtatgtaccataacgccccgatacaaagcatcgtgaagtccatcctcagcgtcggtacgctgattgttttcctgatggcacatgagtggctgaaacgaccggacactgtaatcaagcaaggcgaattttatatgctgacgctctctaccctgctgggtatgtacttcatgatttccgcaggacacttcctgatgttcttcatcggactggaaacagcaagtatcccgatggctgcattggttgctttcgacaagtaccgccaccactccgccgaagccggtgccaagtacatcctcaccgcacttttctccagcggactgctgctttatggcatctcgcttatttacggaacagtaggtactctctatttcgatgatatcccggctcacctggacggcagtgccctgcaaataatggcatttgtctttttcttctccggcatgggattcaagctttcccttgttcctttccacctctggacggcagacgtgtacgaaggtgccccgagtgtagtaactgcttatttaagtgttatttctaaaggatcggcagcttttgtattgatgactatccttatcaagacattcgctccgatggtggatcaatggcaggaaattctttattgggttatcatagcttctatcacccttgccaaccttttcgccctgcgtcaggaaaacctgaaacgcctgatggcattttccagtatctcgcaggcaggctacatcatgttgggtgtgattgccggaacgcaacagggtatggcatcattggtgtattatgtacttatttacatgttcgccaacctctctgtatttgcagtgattacgattatcgcccttcgtgcccagcgtttcacgctcgaagaatataacggattatacagtaccaatccgaaactggcattcctcatgacgcttgctttgttttcattggcaggtattcctccgttcgcaggcttcttctcgaagttctttatcttcgcagcagctttccagggcggtttccatctgctggtgttcatcgcattggtgaatacgattatttcactctattactatctgaagattgtgaagtccatgtatatcaacaagagtgatgagcctatcgccactttccgtagcgataactacacgcgtgccagccttgtcatctgtacgctcggtattattgtattgagccttgcgagcgtggtttatcagtccatcgacaagttctcgttcggactgaattagttacgagctacaaaagctacgagctacaagttacgagtggttgcgctattacaccgcaaagcacttgtaactcgtagctcgtaactcttataccaccggcagaataaaccagaacgtcgatcctttacccaattcactatccacaccaatagtgcctcccagttgctctatgatactcttactgatagaaagtcccaggccggtgccctgaacaaacgagttcaattttataaagcggtcgaatatcttctcacaggcttccggggcaataccgatacctgtatccgatacatatattcgtaaatgctttgcatccggttggtcatatccgatacggatatagccggttgtagtgaacttaatcgcattatttacaaaattagcaaccacctgatgcaaacgattaggatcactcacaatgacgcatgacggtaaagtcggttcgaataaaagctcaacacccggcttcacacgcagtttcatggagcgctgaacatctccacacagagtattcacatccagatcccttattttaaagtcgaaagttcccgcctcaatcttcgataaatccagaatatcagaaatcagttgcagcagaagttcattattctcttccaccatctttgagtattcccgcttttctccctgatcttccgtctccaccagcaaacttgaaaaacctacaatagcattcaacggtgtacgtatctcatgactcatattcgccagaaaagcactcttcaagcggtctgcctcttcagctttctctttggcttcaatcagcttttgttctgtttccttcaattcagtgatatcgtagttaacaccgatcaattcaatcagcccattctcaggatcatagcggttgagcactacattcatacgtacccagttccactggttcaatgttccggatttgagcacgcgcatttcacttttgaaactcgtagcttccccccgtttggccttctcaaagaaagccaatacacgtaccctgtcttgtgggtgcattttattataaattcctaccacttcaaccaatggcgtatcttcatcttcccccatattcttataccattgcttgatggcatatccattacgggtaagcaggttcagtttggcataacctactttggcatattcagaaatcaacaggaagaagttttcaaaatcacgtatccggttaatggaactgatacgttccgtattgtctatattgataagtacaaaaccattgttatcaccctgcttatcgtatatcttacttattttcgtataaagttctattccacctcttttctccgattcataataatcgctcacattggagaattcatagtcctgcgaaaagtcaagttcatcttccactttcaccctttcacggatatcagacggcacattcggattctcatagaagttcactccaatcgtacttgatttgtccttaaccccaaatatctccatatctttattattaagatctatcagtatcccatccttattataaatctccacaccgacagggatattagaaaagagatttcgcaatagtttctcgctgtgatccaaagccatatacgtacgacgcatctcagtgacatccatatagagacaaaccaattcatccggttcgggagaataaataatacaatgacaagtcctctttgactcttcaaaatattcatccagttccctgtacagaccatgcttatgtatatctgcaagaatccgaagcttggttgacagtttgtctgaagaatagatttctgaagcaaaacgccctttatatctctctaaaggcgaaccgcacaaatcggcactgaactgattagcatctgtgataagatagtcataaggttcaccttcttcatcgcaaagaatggaaaggcgtacatagcccataggcatatacttatagagattgctcaggaaattacgttcacggtcggcctcatctctggcaagacgcaagctgatacaaatattaatgatatcggctaaagaggagaaccattgatagtcttcattcgtccatttatagtacctatctaccaagtcaataccgatatatccccacacccgttcggtattccggagcggaaccaccatgagtgactttatattctgcatagcaagtatctcagactcctgacgtgccacccgtggcaaatccgataaagtattcaataggatgggtttgcctgccaacatttgtttaagccaccactccatgccattagtaggaatttgttgcagcatgtctatttccggactaactccttcagccactacctcgtaggtacaagtttgtgtgcgatattcagcatcgtattccactatatagacacgtccaccatgaaagagttcgaggacatccttcaatactcccgaaatcacttcactcaggcttttatctttcagaaaattacgtaaggactgggacactgaatgctgtcggaacagcaattcattaaactgtttcagaatatcaccggattgtgcgtctgcaggggtattgactagttgaaggataccaaatgcttttggatgcccatcttctgtcagccacttttcgcccagacgggaacaaacccacacaatgccttgtgaagagtaaataggaaaagtttgctcatatacctcgatttcttctatcgaaaggaattcacgtgtgatacggcaacggtaatcttcacgaatcagttggccgaactggcgaaaagtcagagtgtctccctccaagcctaacaaattacaaacatattcggaacaaagatattcccctgtagcgaagtctgcttcccaccagcctatttgtccaacagatgaaagaagctgaaaacgttttgcctcatgtgattggttgccactcatacgattgtgcttttaatattcgtaaatagtgcaaagataatgcttacttattaatttccactctattcatatcaacaaaaaaaagaaagtttgggttcgttaatgtagtaagtcagaagagtttatcaaccacttttttcaacaattcagcttgtcatttaattgtaacctaattgagaatcaattgtatgacatgtgtattatggttgtaattcccttgccgcatctttgcaccggaaacaagaaacgataaaagatgagcatgaaactggattttggaaaagtatttttcttcattttattattggtgctttccaccatgaccgccatggctggaaacatcaaaggaaccgtcctcgacaagcagacgaaagagccactgaccggagctaccatacagataaccgggacagcgcagggtgtggtagccgatattgacggcaattatacactgaatgtaaatgacggtacatataccataaccgtgagatatataggatacaaagacatcctgctcaacagcataaaagtcaaggccgaaactttgctgaactttgagatggagagtgatgcacaagcgttaggcgaagtctccgtagtggccaaaaagaatctggaaggtgaacgagccctgcagatggagcggcagaaagccacccttgcaatcgaaaatctcggtgccaaagaaatgagtatcaaaggaatcagcaatgtggaagaaggtgtaaaaaagataaccggtatctccatcgccagtgccggacagttgattgtgcgcggtctgggcgaccggtacagcaccaccactctgaacggacttcccatcgcctctcctaatccggacaacaaactgatccctctggatatcttccctgcatctaccgtacagaatattaccgtgagcaaagtatatgacgccagtgcattcgccgactactcgggggcacacatcgacatcagtaccaaagagaatgtaggcagtgattttctgtccatcaacttcaatgcaggtggcaagttcaatacgctaggcaaagatttctaccggatggaccgcgacggctctctgttcaagactccttctctggatcagaaactgatagacatgtcattaacagactttgaagagtatgcacgccacaaccgcctctttaacaccagttttcaggttagtaaaaagaccgccctacccgaattcggcggaaatatcggcttcggcaaacgtttcaccctgggtggaaatgaagtcagcgttctgggctccataggagtaagcaacgacctgcaaaccatggacaatgcctccatacgtaccttagaagctacaggaaataccctgaatgaatttaactacgacagctacagcaacgagttaaagattgccgcactgggtaatctcggctacagtttccgcacttccgatcacatcggatataccttcttctacgcccgcaatgccatcgacacttatatgaggcgcgaaggtgtggactatgaagaccaccatctgataggcagcaacaacgtgacacacatctacagtctgcaaaaccatcaagtaaatggcaagcactacttcggcaaacagtgggacctcaactggagcggctcgtacagcaagacctccagcgatgaacccgaccgccgccaagtaatgttcatccgtgaagatgaccagataaaactcttcaaactgaaccgccaagaaaccatgcgttactttggctcactgaatgaagatgaatgggtgggcgacctcaccgccaactaccgctttggcgacaacaacaagttgcaggccggtttcacctataaagacaagaatcgtgactatatgggtacacgcttctactacaacctgaacaaactgaaccctaccatcaccgacatctacgataccgactccttcctcaacatggaaaatgtagaaaacggttccatcaccatagaccggaagaagcagcccaaagacagctatacagccggtaacagcatttatgcaggatacattgccactgaatactaccccgtagccccgttattggtgaacctgggagtacgctacgaaatcagcaagcaatgggtagactactataccgatggcggaaaagccgaacgcagtgaactgaacaaaaacgaccttttcccctcactgaacataaaataccagatgaacgaaaagaacagtctgcgctttgccttctcacgcacagtgacgcgtccttcgtttatcgaaatggcccccttcctctatcaggaatcctacggttcggcacagatacgcggtaacgctgatttgcaaaacggctacaactataacatcgatctgcgctacgaactctttgaaaagaatggggatatgctctccatcaccgcctactacaagcacctgaaagcaccgatagagcgtgtacagactctgtcaggcggttccgccgtgcattctttccgcaatgcggacaacggtatggcaacgggggtggagatagaattccgcaaagagatagtgaaagacctgcgtttcggcgtgaacggctcgtatatgtacactaacgtgaaactgcccgaaggtggtgcctacaccaacagccagcgtgccttgcagggagcatcgccctacctggcaaatgcagacctcacctattcacccgctttcagcaacgaccgccaactcagcgttgccctgctctacaatctgcaaggtccccgcatccactccgtaggtatctccggtctgggagacatcaagcaacagccggtacacacactgaactttacaggcagttaccgcttcaaccggcgtttcgcggtgaagttgcaagtcaacgacctgctgaaccaagacatcctcttcaagcaagaagtgcctaccaccggagataaagtagaagtggaacgcttcagaaagggtacaggctttgaagttggcttcagctatgacctgtaagagaaaagaaaaattttgagagagacaaacaatagaaactcattttatcaactaaacaattattagtatgagaacatcaaattggaaattcatgactatggcccttgcggcaagcatgaccttattcactgcatgtaccgacaacaacgaacccggaaacggggacggcggtgaagacaacaagtatgaactgacgaaagacatcgaaagcgatacggaactggaagccggaaagacttacacgctaagtggcggcatacacgtaaagaatggtgccacactgaagattcccgcaggcgtcaccattattgccaaacatgacgatgtggtagactacatcctcatagaacaaggagccaagatagatgcacaaggcactgccagcagccctatcgtgatgacttccgaaaagaaagaaccaggcgcatggggcggtatccacatctgcggatacgcacacaccaatgccgaaggcggaacaggtagctcggaaataggcggcgcaccctatggtggcaataatgacgccgacaattccggtacattgcggtatgttcgtgtagagtacaccggatttgccttcgacgaagagcacgaagccaacggtatcaccttctacggtgtaggaaacgggacaacggtagaatattgccaggcatacatgggttccgatgatggtttcgaatggttcggtggttccgtcaatgtgaagtatctggtatctaccgactgtagcgacgactctttcgactggaccgaaggctggaacggcaaagcacaattcctcgtagcttaccaaagccccaaagacgaactgggatacgactgcgactgcctgatggagtgcgacaacaacggcaagagcttcggtgcaacgcccgtagcctgccccacacttgccaacctgacactgataggtaacggagagtctaagcaaggtatccgcctgcgtgccggtacaaaggcaaaaatctacaacgccattgtaaaaggcaaagggcaatgcctcaccaccgaaactacagaaacagaaaatgctttgatggatggtagctccgagctgcaatacatcacactggccacggacataagctgcaaggaaggtatctattcttccaatgaattcaccaaagacggtaaccacaatatcatcaattatagcgtcatgttcaccaacggctatgtaggtactatcgaaggcgggaaaaacctgagcgacgacagtttcttcactcaagccgcctatcagggtgcagtacccgcaagtaacgactggacacaaggctggacactgaaaagcggtatagccgaagagaccattgaagagctgaaaggtgaaataaccaccagcaagactctgacagaaggaaaaacctactacctgaccggagaatacaaagtgaagaatggcgccacactgaaaatagaaccgggtgtaaccatcatcgccaaacacgatgacatcgtagactacatcctcgtagaacaaggttccaagatcgatgcacagggtactgccgaaacccccatcgtaatgacctccgaaaagaaagaagccggagcctggggtggtatccacatctgcggatatgcacacactaatgtagccggcggcacaggcagctcggaaataggcggtgccatttacgggggtaacaacgatgccgacaactccggtacactgcgctacgtgcgtatcgaatacagcggatacgctttcgatgaggaacacgaagccaatggtttcaccttctatggcgtaggcaacggcaccacagtagaatattgccaggcttaccaaggttctgatgacggtttcgagttcttcggcgggtccgttaacataaaatactgcgtatctaccagttgcagtgatgactccttcgactggactgaaggctggaacggaaaagcccagttccttgtagcctatcaggaagcagcggaaacactagggtatgactgcgactgtctgctggaatgtgacaacaacggtacgaacttcgctgctactcccgttgcccaccccatcctcgccaacctcacactgattggcaacggtggcagcaaacagggcgtacgcctgcgtgccggaacacaagtggaactttacaatacgcttatcaccggcaaagggcaacctctgaccgtagaaaccacagaaactgaaacagccctgaaagagggtgtatctaaactggagtacgtagctatcagcaaaacattgtcttccaaagaaggcatttacaccaacgatatgttcgcagcagcaacgggcaacctcactgcacagaacttcacttgggaaaatctctacgaaggcactattgatggtggcaaagacctcagtgccgacagtttcttcaccaaagccgaatataagggagctgtaaaaacaggcgacaactggacaagcggcaactggatcaaacaataaaacgagaaacacacataattcacgaagcaatagcttctacaaaggcaacgccggacaagttcagaggaactgtccggcataaattctcatctaagagagaaaagatcgagaatccgtgccgattatctcaattaagcctttcgcggaaatcttcaccggatggtgactggaatacgtgaagatcaaactcggaaataatagccaacagatggtcgaagacatcagactgcaagtcttcataaggtatccaggatgtggttgcagagaagaaatacagttccaacggtataccgtgatcggtaggctgaagctggcgcaccatgcaagtcatattatgattcacccccggatggctcttcaggtaacaattcagataggcacggaagacaccaagattcgtctggcgacgaccattcacaaggatggagttatcgatatgatgttcttcattatactccttaatcacttgttccgtctgttcaacatagtttgccaagagctgtatcttgcgatacttcgccaacatttcaggcgtacagaaccgcacactgttcatatcgatattgatagaacgtttgatacggcgtccgccactctcctgcataccacgccagttctggaaagagtcgcttacgagcaagtaaggcggaatagtagtgatggttttgtcgaaattacgaaccttcactgtattcaatgacacttctattacatcaccgtccgctccatacttaggcatagtgatccagtcgcctactttcagcatattgttggcagaaagttgcacaccggaaacaaagcccatgatactgtctttgaatactaacatcagcacggcagccgaagctcccagaccggtgagtaatacaccgggcgaacggtcaatcagtatgctgacaacgatgataccaccgacaaaataaaggatgacctgtactgtctgcaagagtcccttcaaaggacggtcgcgaaactgttccttctcgctatatacggtataaaccgcagtaagcaaagcgctgataaagctaagaaacattataataataaagatgagacagaaacgcaggataagcgccaacgttgccgactctgcgtcggaaaatgccagaggaagcaggatataaataagaataggtgccaccatacggctaagatgcaccatcactttgcgatcgaaaacaatgtcatcccaggtggcttttgtttgctttaccaaacgcgaaacgactttcagcaagatcttccggcaaacagtatccgccagataagctaccaggagaactcccaggaatgctataaattgatctaactgggcagccaatgactggctgaaacctaaagactgaagtccttcgttaatttgttgtacaatgctcatgatactaagaattaattttggtgttaatggttagtaattaccgctccctgttcaggaagtctcctatatcttcttttaaccactgatacaagtaaaggttcttgtatccgctgttctttttcaacatcaagctgacgttggtctggctattctcatagctggtcagttcgttatggaattgctcgttgtgggcagccagacgcttaatttcctgttcgcgctcgcgacgcaacacagtacatacggggataagaagtttcatcacaacaccatccatgaggtgatgcccctgtatgtagagataagtagtatcaggattcagtcccagcttctccagttccacacccaaagcctccaccgacttgatatttcgcggaagacgtctgcgcatctcggaaagtttcttggcaacggcacgctgcacgggctccagtgttcgttcgggatgatgtacattgacttcctgcaagcgggtgcaggcattgaagtcatacatcggaaaagtatatgtatctcgttggcgatagaaccagacgttccagagaaagagcggatagacaatttgcgaataacgcttcaggaaagcaggaaagtctatcagcatacggtcgttcaacgtagcctgcacgcaaacttcatgcaagctttcagcataacaatggaaattctcgatggcatatgcgtacgtctggaatatgtagggactactgtttatcttatgtgaaacgctcgttttgccttgtaacagaaaatcgtagtcactgtccacacaggctatcaggctcttgcccagttcagtagtgttcagcgtattcatcagcaccatcttcttacccttggcaagagaggtagccgaaggcagcatcacctgaaaataatattcatctgtctcgaactcagccaacaatgtgcgccagaaagctacatcatcgtaactttccacatacgccacaatgcgacgccgcgccttcttaggataaagcttgttggcggcattgaaataggcggatgtaagattatgttttaaagaagtagccatggttatattatcactttatcacctttatttatatctcagtcgaaatatcgctcacttccgtcaccgcatccagccagccttccatgatgacggcgggagaatgagtggtaagtatcagttgcacattgggattcaattcacgtatcataccgataagtttttgctgccactcgatgtgaagagaggcttcgggttcatccataaagaggacacaatgggcattgtcgcgcactagcacggtgagcaggataatcagcatctgtttttcaccggaagatagtttatagggcaacaggcgttcaccgtcctgatagaagatgatttcattactgcggcgatctatggttttgcgggtatagctgaataactgatccatcagatcctggaacttccgcttgggaagggataaggaagcggcttgtgaacgctgttcctcatcaccggaaaggagttcgatcatcttgttgccaatattcacctggtaatcgaggtatcggcgttgcaagagataaagttgccagtccagttcggatttgacgttcggatcggccatgcgggcggtaaagtcgcccataatcaaggggcggtcgtaactacgaattacgtcgtaaggaatatacgtggcatccggacggtcgaaggtaacacgtacgccctctatctcgccgttctttatctcccccgaaagttcttccagatagtggacggaacggttaaggatcgtggttttccccactccgttgataccggaaaggatattcacgtcgggacgtaagtcccaagctatgtcaaagcgatcccacaacctgtgtatctctatacgtttgatgtaattagcttgttcttccatagtttttgcttttaattaaagcaaatatacgtgattatcttttatttccacgcccggaaatagaaaaatcacttctcatccggtaaatcaatgcagaaacatgcgccatcccgataagatgtatcgagataaatggaaccacccagacgggtgacaatgaggcgacaggaataaaggcctaagcctgtgccaggcatgaagtcatccagtttggtaaaacggtcgaatatgtattcggctttgtcggcagggataccgatccccgtatcacttaccataatacgaatcttcccaccggtacgcatcagattcatacggatagtaccggcagttgtaaacttcgcggcattgttcaggatatgttctacaacgtgttgcagatatttgtcattcgtttttacaaggcactcatccagtccggattcaaacaaccaggtgattccggattttttcgtttttcccttacacatatccagaagtcctgcacaaatcggcaatatatctatccgttccataggaaataactccagcgaactgcttaaatccgatacttgcaggatatcctcgaacaattcggtcaattgattagagttcttttcaatgatgaccggaaaatctttcttgtcttcctgatccaagtcttcattcagcaacaaagtactgaaaccacagatagcatttagcggagtacgtatctcatgacacatggattggaggaattctgtcttcatacggtcactcgctttggcacgttcactttcctcagccactttttcattagacagaatcaacgcctgcttcgttgccttcagtcgtttcgtcaacaagtactgataaagcccccagataaagaaaaccagaagcaggactatgagcacaacaaaagcaacgcgatgataacgtgcctgaagctctgcctgttctatcttcaatttatccacttcaaacaacgaacgcatctcggccaactgcttattcgtctcttccacatgattaccttccatcagactggtgtactcccaaaaagcgtcaaatccttctttgtaatgttgtttccatcgggtaaccaagttaatcttcttcgccaacaactctgtccgactgttcgtatcggcagaatccgtttgttccagcagttcatcgatggtccgcatggcaaggtcatactgtgccgtataaaaatagtaacggaaagcggacggcaaaagccactctttattctcttccggcgtcttgacctgataatattccttcatccgggaataaatttcatcagcccttttccttcctatgatatctccgaagtaaagaagctcgctataaacacccatacgcaaggcttcacgactacgggtgcggatataagcacgtctcttatagaaaggcaattcaaactgattgtcatagagttgttccgtttgttccaaggcctccaccgctttagcggcttcctcagcttttccttccgcacggtatatgaattcgatacgggtcagataataccaattgaacttataactgacctcgaacggcagaccgctgaccaaatggtgaatgttcttcaaatgaacaatgcggtcttctgaattggcaacagacggtgaaaagtaactaatgcattccattgccgaacaaagtatcatttcccactgcacttcctgcgacttatccgagagatttaccttatgacgcttataccgtgagatttcttcattggcttcatcaggtttctccgcctcatccatcttgcaaacagaaggaaaagctttgagccatgccatataaaagtccttataagccccttccagacactcttctcctatctgctgatagtagcgcaaagagtcaggttcatctttataactgcgacaaaggatatccagtgtctcaaaaatatatatctgatttttcaactgaatggccagttgcagcgattcgttaatataggtacgtttgcttgtcacatcatcggacaagtcgtacaagtcaatatacagctccatcctctgctgtttgtctacggaattgtcttgtagtgtttgcaacaggtgttttctggtctgattaacatcaatctcctgagcaacactaacttgcagacaaaagaatatgaaccagagggtcgttataatttttatcaagtagtttatcatattcggacaatttgaagaacttgtcacttaagttgcaaatatagaataaattggaggttagagcaaatttatttgtatttaactgtcgtgagaagtctttctatgatttcactacaagtaggcgttggaggaattgatatctatattattgacaatcagcattgttgtatatgcatatccaaactatccgtagctgataaagccagtttattttttatacgctgtttagctttcaatacagaccggggaactatattaaaaagaagagcgattgtcttattatccaaacgggcccgtatcagatagcataacctcaattcctggacacttaaaccaaatgacatcaattcttctgacagacaccccccataaaataaatctatgacgataaacagatccctccattcggcttcatccttaattatgccataggaaggcttttgatggagacacaacaactgtcccattgccactatcaaagaagaagaacattttgttaatgccgaaaccttctggtaatccttcaattgctttgtcaactgtttattacggtactgcaaacaagcattccaactatccttagacgtatccatatccatcatgttatatcatattcatctatcaatcttcgttttacaccaatcatctcctatcttttccacttcgctcctcatttccctaatagcgatggaatagactttcggctctttagtcaatacaatccgttgcatcttctcaaacttctctctattccggtagcccggctccgcatagagttttgccagcagatagtagggataaatccgccccggcaaacggtggactgacgcccaataataggtttcagccttctcatagtattgcatttcctgataattcttacctattatattcagtatcattgggtcagtgctatataaggcagcttgttccagaaacgaattagacaaatcataacgtcctgatttatataagctgtgtccatattcaaataagaattcccctctttcgtccaactgcggatagagcttatggtaagcctcattggcagcagtataatttccctgatgataaagcatcctcgcatacacccaatctcggcaggcatcttcctcccgttgccatttaccgttaagccccactgtccatatcagcgcacaagtgccgcaaataagaaattttccgcccacatctccggccccacaagcaaacagcaggcatataccggttaccatgaaaaccgggaaatgcatgggataagaagaaaaagagaaaacgagcaaggatatgagtgctccgcaaatttcataacgcccccattttgtccctaaccacagacctgccccaatagtcgagaagaacatgacaccaagcataactcctgctgttaacgccaactccagatattcattgaaagcatattccggacttccggccacgcgctcttcccaaacagcatagtctccactaccaaagtatttttcctgcgcttcgccataagcatagacaaatccttcacgacatccccaaggatgctctacgatagctttacaagtaattttccacataaacagacgtcccatagcagagtcaggcttcaaaaagaaaataccagcacctcctaatatcagaacaaaaagcccgaccactccccacgtaaggtaacgtttcttatatctccgccacaatacgctccacttacgtctgtcacgatgcatatacgccacccatgcacagcttattgcagcagcaatccaggcagaacggctcattgtggccggcagtacacataagatcagaataccggcaagccctgctgtcactttttctattttatgaagaacatctgtgcttttccactcacaggcacgtaaatacaaatgcaggcaaacaggtaatatcatcgctaaatatcccccatacggaccgggattgaagaaagagcctgtcagtgcataccgtgaatgcccggaaacagaaaacccatataattgccgcaagccccaaacggcttcaattgcccctaacaatactaggctccaagccacatgaacaaagaaattccggaaacacaaaagatctgtccaggaagtttttcctagaagttgtagcaaacaagaagcagtaatacaaccggtcgaaaccaacacagctttcccaaaccacacccactggccgatggtttctcccgcaggcagttcaggagttgtcgcacataccatactcagcaaggagcaaacagcaacaaactgtagcaaaataactgtagcttctctcattttatgcatccatcctatcatcattctatctttttgaatatcctattccatcgtactctatccgtcctcttatccactgatttccatatcctgacagcctttccaacaatatattcttccggtaataacccccaataacgggaatctcttgaattctccaccctgtcgcccgccatgaagtaatagttctttaaaaagcgatattcagcaatgaggctatcacctaaatatatattccccgcttcataccgaagactctttttttgctcccactccaccatattcttgtaaagtttaacagtgcgtccatccatcggaacaatgtcacctgatttaggaatatacagaggcccgaactttttcaccgtccaccttatcagagaatcttcgggatatgccctcacaccaattgcatcatctgtaaggccctgttcccttatcagtgccatgaacctgttctgcgcatccacgcaccccaatgtccctgcatagccattcactttgtagcgtccgtttacaatgcagaacgtgtctcccggcaacgcgacacaccgtttcacataatactgcatcacatccatttcaatctgtctccactttttaggacaaggataattgaagacaatcacatcattccttcggactttacctattcccggcaaacgttttatctccacctgctttcctgcaacggcttccatcacattgaacaatcttgctccatataccaatttatccaccagtattacatcaccggccaatagctccggctccatcgaatcacttggaatatggaacgaggtcacacaaaagacttgtgccaacagccacaataccacaatgccacagaaccaaaggaaaagatcaattcccttatctacgattttcttcaaggatacgcttcgcttcatccatccatggaattaaaatcaaaacagtagctcccaacattcatcttatataactcaaattactgataaatacttgtttcccatcttttatgtgaaagacctgttcttcctcaccacgtgtcaggcaacgcaaatgaaacagtgctccacgaggcatattgtcatagaccaattccggcgctgaagccgttttacgtcctaacgaaacccatccgttcctgccgtcatggtaatataactcgtaggtgtcgccaatgcggataaaattgtcatcgttacgagggataaagataaaacgatccatttccacctgctttccaaaatccatcagcaaggtggctcccggcaatcgcgtactataataagtcaacggatcatcatcaaacatccgttcctgcacattcaccggattttccgcaggcgctcctttaacggtttcaggataataccttgtcttccctccccagaacagcagttcgcctatgtttgtgttcttccattccatagccttatatcgcacataacggcattgcagttgctgtggaagcgccacttcgttgtaacagatacgtggggtgtccggaacctgataagtgtattttagatgcctgaaatcctccatatcagaaaaatcgaagcgaccgccgcaaatctcatccagataaataccgatccaccccatcaggggatgcttacgatacaaagtgaccttctcttcccgttccttgtcaggagtgtagaaatgaggctgcttcccgtcaaaataaaacggatagtccactgtggcgaagacaccgttctcttttttctctaatacggcataaatggcatcagactccacatgcggaaaaacagcctcgccacggcatacctctgcaacgtcagcaatcacccatttccccttaggatgaaaaatacccaagaacagatattccggactcctgcctgacacttctaccctcaacgtatcgggaaagtagtcggcagaggcgtccacatgccgaggcgtaccgaaacgcttgcggaagatcttacccgatttccgtccgtcacggtacacctgtccgcgtttccactctttgtctgtcacccacataccccagaaagctcccgtggtatcacgtacagagttccacgtatgtcccttgcgtgtttccgagctgtatacataataatccacagctaccggaatgcccagcgaacgcatggcatacagggtgaggtcgcaggcatccatgcaagtccccacgcggtggttcatcaggaaagacgcccccagatgcggcaaaccgaactcccagttatactcaaacccttcctctttcaagcatcttcccactgtggcggcagcttccaccacatccgttcccttgtagacggaatcgagcaggaaagcataccgcttcccgtaaagttcgcgccactcttccagcggttcatcgtctatcctataaggcaaaatcaactcacaaaaatcatcaaaaggcagatacttgttccaagggcgctgcttccatgaatcgaacgcatagtctatgttgcgtatcaggaagtcagccgtaaccatgtgggcatcatacactttctccaacgcctgcatatcaggatgtccccattgccgcacaagttcgggaagtaccattcccgttgaatccaccgttgccaacgccgcctttcccgaatctacggacatcccccgccgctcataatattgcggcatgttctctatcagaaaacgggcggcatcatacttctgcccgctgtccttataatgcgcaagcaccttttccaactcaccacggttgctgtccgcaaactgcaacgcatattccaacaatctgtcgttcctgccgcaagccgtaagcaacatcattgccaacagcgcatatacgaacaaatgtcttttctttaccacgcaaaacatcttactatctttatttcttatcccccatttggagttccttctctatcgggctgtaccggttatttgcaaaacaataggggaagacgctgcattgcaatatacagttatggttttatcaaaatgctccggatgctccgctttatacgtgacgcataattccaagctattatcaggcctgacaggctcttttgaatactccacggaagtacaaccgcacgaagtcgcaacattctgtataaccaaaggcttatcccccgtattcttcaatacaaaaacagctttttgctctttctgccaatcaaatttgcccaacgagattaatgctttggatatatctactttggtccttatcgtcttatcttcatccttttctccaatcttctcgccttgaataattttcagatagagttcttttactttagaattatggatagggttgccgatggcaacgactttattttccttatccaataaaaatgtgtggaatgccatatcagttgggaaatgattcaacttattcaaaccatcctcttcatcaatacaaataggataattaaatgtatcacggcgaataataaaatctagttctgctttatttttaggataaaaataaaataaaaa

SEQ ID NO: 6385 - DNA, 15516 bp, Unknown
  gut microbiota DNA sequence
ttacataatatcaatacatcattttaaactctgtctatgaaaagcagttattattttgatcttgtgaaaagaaagagatggaaatagtttttgcccgtcactacggaacatgctatttacatatacatatttgttttatagatcgaaccttgttaagagtattgaattttttttcctttcttcagcttcaaaacttgcgagatagttttcggtaatagctaaattggaatgcccaaggctttcagatatgtaggaaatgttgacaccactgcgctttaatactgttgcaaatgaatgacgcgctgaataggtcgtgacgcgtggaatgcctgtcttatgggaaattttataaagtatctgattacattcagtgacaacatcccttaccagttttactctttcaaacggattttcttttccggtagcgaaaggaaaaatataagtttcaggtgacttaggtggatttccccatttctctattatcttttgcatctcgggcgtgatgactgcatggataatcttactgtgtttggtgtttctggctgtttttgcacgtatgaagcagatttctccattgatgatattggagtactgtaagtataataaatcacgaaaattaatgccattacataaataagagaagaaccacagatcacgataaatttcagtcttttgggttccatcattataagtaataattttctttatttctttcaggtttaatgccaatttgcgtccacatccagtgggtacttcatactttccttttccaaaaggatactgactttctttgatgataccatctttacgtgctatattgagaatacatttgagatttctgaaataaaatcccatgctggagtagctgattcctaacgcggataagtgatgttcaaaacggtttaaccagttgatggtaatttcatgaaaagaaatgtgctttcctgcaaactgttctattttgtttaatgaacctttataagacagataagtattggcttgtccattttcctttaactcctctaacttcttatgaaataaagcattcactgaaaaatcagaatatctacctaagcgtgcatttaagatgtcaaaatgaaattcaccttgaaaagatagaaattcgacttgctgcctgattaaagaaaaactattttcgatgttacgccgtacttcagataagtgacgatttttggtatgtggtaatacttcccagtctctaatagaaacttcttgcccggtggagtaatatttctgttttctgttgtggataacttgtacttttatgggaaataatccattcatcttttgttttcttttatctaatactgtgagtacggaaactccatccttagaatatttgtacatggctttttaaatttgttggttattaactatgaattgaaactgtatttagcaacatgctatttgcatacaaagttgataaataaggtccatattaaaagatatttgagacagtattaacagaaacatagataatattgataatcgtctatctttctattccttacttttgtagtgctaacaatttaacagaatagtatgaaaaacagatttcttattttattgagttttgtactcattgtggggcgagatgttgtttgtgcaaatacctcaatggtgcgtgagcgcataaacattaatcgtgactggcgttatcagatagatgatccggatggggtaggtgctgcattacattactctagactaaagccttatttattaccttgtgccaatgactttattatatttgggaagaggtatcagagaccggaaggcaatccgggagaaaatatagcctatgtaaaatctgattttgatgatagtgaatggcgacatctgaatttaccccatgattgggctattgaagggcctttcaatattgactataacggttcgactggaaagttaccttattgggggatacgctggtatcgtaaaacactggagttatcgcaggatgatgccgggaaacaaatttatcttgatattgatggggcgatgtcatacgcttccgtgtggtgtaacgggcaatatgtgggtggatggccttatggctatgcttcttttcgtcttgatctgacaccttatataaaggccggacaaaagaatgtgttggctattcgattggataatccggacgatacttcacgttggtatccgggtagtggtatttatcggaatgtatggttagtgaaaacgtctcctgttcatgtggagcaatggggaacttttgtacgaaaccagcaggttgattctgaaattgctgttatggaaatgggagtgaatattgagaatcatgctggaaaagatgttcaggtaaagttgcagacaagtgtatatctgcaagggaaagatggacgtcctgtgggggaagaggtgactcaaagtatgactaaggatattgcgattaaaaaagatagctggtcgagtgcccgctttcaatttaaagtagataaaccgaagttgtgggatattgatactccaaattgctatgtagcggtcagccgggtattcatggatggaaaagaaatggatagttatgaaactccttttggaattcgtacaattgaatttacccataaccaaggtttcatgctgaatggacaaaaggtagctattaaaggtgtgtgtatgcatcatgatttgggcgctttgggcgctgcttttaatgaagtggctgccgaaaggcagttacgtatcatgaaagagatgggtgcaaatgccattcgtacttcacataacccaccggcaccggagttggttgctctctgtgaccgtatgggactgatgatgcagcttgaattagcagatacttggcaaaaagggaaacgcaagaatgattataatcttctttttgatgattggagtgaagcagatatgcgctcattggtacgtcattatcgtaatcatccttctgtaattatgtggagtataggtaatgaaatgcctgatcagacgactgatcagggagtcataatagctcgtaacctgacagcttactgtcacgatgaagatcctacacggcctacttctttagggtgtaataagcgggatgctgttttccgtgatattgtgaatcaggtggatatatttggtctgaactatttccataaaacttatccggtttttaaagagcagaatcctactcgccgttatcatgccagtgaaacttcctctgcaacgagttctcgtggggaatatttcttccctgtaactactgacgttaacgatagccgttccggcttccagctttcatcgtatgatatgacaactataggatggggatgtgctcctgaggttcaatttaaaatgaatgaagaatatccgtttatgagtggtgagtttgtgtggaccggattcgattacttgggcgaacctactccttataataaagatctgaccaatttgttaaacttcagtgatccgaatgaattagaaaaggctagaaaggaattggaagagttaggcaaaattaaaacaccttctcgcagttcttattttggtattgtcgatttatgtggttttccgaaggatcgttattacaattataagagctattggcgtcctgatgtgcccactgtgcatatattacctcattggaactgggaagagcggattggtgaaataactcccgttcatatttatacttcgggagatgctgttgagctgtttttgaatggtaagtcactggggcgtagagagaaagctcattcgtatgaccgtttgacctgggatgatgtacgttatgaaccgggaagtttgaaagccatagcttataagaacggtcagaagtgggcggaagagcttgtagagaccactggaaaaccagccgctttacaagtaacggcagagaaaacagagcttaaaaatgatggtactgatttatcatttatccgtgtagctgttgtggactctcaaggtcgtgttgttcctcgttctaagaatcatttgaagttttctgtaacagggcctgctgagattatagctacagataatggagacgcaaccagcctattaccattccagttatcagaaagagatgcttataacggtttggcattagtcattttgcgtagccagtatatgaagcagggaaaagtagtacttacagtagaatctaaggggcttccgaaacaaaagattgcattaaaggtagaatgacgtgtaaaatattaccgacgcccggcgaaaccagacatcggcaatattggtgattgattattgttgcattaatcctgtaagaatatctatttcatttagctcagcgctgtgccaggtggtaccacaatctgcgggtgagacggcttgccggcgttgagcctttatttgctctttattgaatgtaatactttgaaatcctttaatagccggtgattctttgcttttgaactgacagagattatcgacaaatgtagtgccgggaaatatagccggattattgattttgatatttgggaaagtattgggagaatagattcggttatgcgcaaaacgtacgttttgcggttccttatctccttgtccgtctccaaagttcagttcggcacaatccacgaaagtattgaaagcgatatcgatattcgctgcccgatgatacgatttaagtttttcatcttcataatcttccggggcactgggacgttcatatacccccatgcgcagaataaaggcggcactggaacctttccccgttaccccctccacataattgttactgacagtatggccttggttgataatacggatacccgaagtcccggggagctgattacctatgatgacattggaatctatgatattattatgtccatggcgacatactaatccaccgcgtgattcgtaaaacaagttacggcgtacggtattgaaaccggattttactgaaataatttcattttctccgtcacaacgatagaatatattttcttcgatgatactgtaggaaggcagttgtgatgaccaggaattacccacgcgtatgatttctgcaccattacctccaaagggtttccgataaccaaatatattatgatctatttggtggtgattgtgatctccaccgtcttctactgtaatttgtataaccaatccacgggcgcgcttattggcaaaataacagtggtctatacgattattgtttccatgtagtccaatccagttttcagtcccaccccccggtttttctcctttggcagggtcattgcaatcatcaatggcacattgggtaatccggcaatgagtggctgggtgttctttatccagttgaaattctatcatctcaaagtcagatgcccaagctttatgaaagtagagtccttccaattgtagataactgcctgccatacgtatttctgttgttccggatatgatagcctttccggtattcgctgctttcagtataattggataatctgctgttccatttcctgtaaaactaaccttaccaagatgggaataggttccatcttgtaaaagcagagtatcaccaggttgtaaagatccgtcagacatcttgatctttagacttccgatgtcggttggtgtgaaagtgtgtgtcaccgccaaaaccggacaaacgaatattactgcaataatagtggatgcaaatgatttcttattcatgatatttattaatttagataatacaaaagaataaaaagcgggtgtctcacaacaaccgcttttcgatcaacaatctaaaatgacctatgagatataatacctatttaccaactaactatgaatttaaaaagcctatgatttattctatattacgagtatgatgtgatgttttaatagcagttctgatgttatccattggtgtttgggacaagattgtacaatctgcccctaaaataaatcgtttccctttcaaggatttctttagttcatatatttcttttgccacttcatcagaacttccttctaatataacgcctttacgatataatcctcccattgcaggacgcttaaataattgttcgcatgcttgtagactgaaagtctgatcggctacttcacagggcgcattaattatttggcccggatatgacacgaaacgggttaaatcgtcatacttaccttcgtagtcacagatatggagtatgttaaacagggttccgtcgttacactcttgcatcactcttatgtcatacggtttgacaaaggtctcaaagaatccgggaattatatagaacttactttcacctccttgcgtgggtgtataaaagccatccacaccaatgtttttacatgctattacgtatctgataattgcttcggtaaaatattcaagtgctttttttacgcgttccggttctgtttgggcatatgccatcacagttttggctcctacgctttgtattagcatctggaatggggaataaacggtaggcagtatcattgcattggctccggcaatatcatagataccttttactatttccaacgttggagtgaagaaatctgccgggagtggttttatttgttcccaatcttctgatttatcaatccgtatacgtccgtatccttgttcaaactggatttttacaaagtccatgcctgtagaaagaaaatagcgcaaatgtgcgtcaatggctttttctccgatgcgtgcatctttcccaaagtgcatgaaaaacgcagccggtacatattcttcatctaatgtacctgatagaaactgctgcattatttcccgcttgttagtggggatttgtgcctgggctaacgtagcgaagcaaaataatgtgaatagtaatcttttcatgagagcctgttttcgtttgatttaatatggcaaaggtacacgtagtggcaatgcgggatttaaaatattgtttcaatccttatatatattgtttcagaagatgtttttagcgtataaaatcaaggattattatttctttcggagataaagtgacagaaatggtatcaccgtaatgataatgtcgggataatgacctttcttgaatattagtaataggtgagtctactttgaaacgtttttttgtttcaggtactcccagcgccttatctagcttgagatgatagctttgtgacttttccgaaggattatgtaaggaaatatagccttgtttttcggtccaggctgtataaccgtatacttcatttcgttgaggtgatcctccatgcataactacgttgttgaaggtaggaaatgcttttcgtgcccatttcagaccgtcagaaagaatgtcccaatcagtaggagacaggctatccgttttgatgtacaattcaataaaaccggtgcctcggctgaagttcatatataaataatccctaaaagtttcaggtgtttcgtttgtttgcgtttttttcggttcatgattgaatatggcgctcatcgggaatttggtattctcttctttccatatttgatgataaatctggtcacgataaaccagttcaccagttcgattgtctccttttgcggcatctcctgcattaatcaaccatacaatatcaatgtattgcagccaccacgggctgaggtaagcgccattggtgatggcgataaagatatccggattgactgtattcagtttgtcgaagatttgtatcagtctttctgttcctgctgaaagataatagcctttttgctcgtcaaagtgactatcatttagcctttcatcattggatgacggaaaaggattatcagcaatatcgaagtcccggagattaagatgtccgaacaaaccatcaaacttgaagtaggatattcccatacgtgccagttctaatactcgttcttctaatttcagcatatacttcttccccgtcatagacatgccataggagagtgtctcaaaaccatattcctgcatccggggcatcatggggtgtccgccaaagaggcaaccggggctaagccagagccctaactgtgaatgggctttctgcaccgaatgaaaacagtcggtaaaatccggttggaatttggagttaattgtccataccttgtccgaccaatcggcttctttacttgtatcttgccaaccatcatcaatgatgtacgcattcagaggctggcagcctctctttgttaccaattcgtcattgattttctctacgctgcggataaatttctcttttgatacctttcttgagtaatcgaaccaactattgtattgaatctgcagacgcaacgggcgtttccttattttattgatataagtatagaatgcattgtctatggcgtgtacatcgtcacttacaccaatgatactgttatatgacgtataaggtgtatttttacttatgatttgcccccacagataaccgcaattgatttgtccgttactcacttcattattggcagcagggaattctattccccagaaagttccggttttagtagtataaacaggttgtcccaatccaggtttccattgggcgctgcctcttgccgtaattttcttgagagtataattttggtacgcatcttcgaaagcaatagcttctacattcactctttttaaaagaatatcctgatttgaagtgaatcgcagggattttcgacaaaaggcatcattagaggctaattcataatagacaattaaagaaaagtcattctccttgccccgtagttggaactgataccctttgctttccggacgttcggggtttgcataaggagaaacagaagttactatgaaatctttggcagataaaatgtaatcggtattttctgtttcaccggggattgagaaacgaagggaaaactcgtcacaacttgttggagtcaattctgtttgagcttgtttattaagaatagtctgggtatgtaaccttccatccgttacttgtataatacgtgccaagtgcttgttctccatcctgtacgtttgtgctgtaattgccagagtagacagagataagatgataatcgttgaaatcagtttcttcatatcattaaatataaaaatggttaatgatacaaagatagcctgatgttagaagagtagcttgcagtattttctcaaaacctttttcaagtgtcttattgctaggaacagtaataaaaaagaggagccaactctcgtttggctcccccacatgaaatgttttgctgattatttcttcacttgaataatatcgtagttcaggtcgctgacagcttcttgcagactatcgttaaccaaacgtaaagtggtatcgttcactactacgaagtagacgggagcgtcaccatcactcggtgtcagtttgtaggctgtcttttgtttgttgttcactgtcttcttgatgacttgtttcttacctttggaagtgaagctcttgttctttccttgaccttccgcatccaagtaagtagtaaccaaagtataaccgctttctccgtcaggacctacactgtccacgctcaatacgtattggatacccgggccgtcggcagcaggaagaagaccttcgtatacggctacggcagaagaatcattcccggcaactgtcaacactccttcacctacggcggaatcattgttctgggttccttttgattggcaggataccaatgcagcagcgatggctgcaatcatcattacttttttcattgctttaatggtttaagttaatatataatgcaaattcacactattcttcctcttcttttttgataacgagcagtttatccactcgtccacgatccatgtccacaacttcaaactgtaggttcttgtagctgaacaagtctcctgctttaggtacccgcccgatgaggaacatggcgagaccgcttagtgtggtaaagtcttcttctttcagatcatcatagctcaggatacccatctcttccataaaatcatctacattcatagaagcctcaacgagcatcgagccatcttgccgggtgacgatatcttcttcttccatttcgttttcttcaaggatgtctccgaagatactttccgtcagatcatgcaaggtgataatgcctgctgtgttaccatactcgtctacaacaactccgaacttatttttgttcttcttaaatagctctaaaactttcttggcatataaactttccggaataaacaggggagagcgcgcgataccgcgtaaatcgaaggggtgatcattgcctaacatcagaataatatctttgacggacactactccgataatatcatcttttcctttctctaccaataggtatttgctgaaatgttgttcgcggataatgtgtagtacttcatcacgtgtgtatgtaggatgtagtacgacaaggtcgcgacggtaagtcatcagttcattggcccgcttatctgagaatcggaatacgtcccgtaacatttccgtttcctctttatcaataacaccctgttctgaactttggtgcagaatcatttttaactcttcctgtgtcatgggacgttcttctccattgttcaggccgattagtttattcactatcttggttgagaaactgagtaaacagacgaatggataagacactttggtcagtaaaatcatgaccggactaagtagagttgcatatcgttccggattactcagtgctatggacttgggtaccaactcaccgatgatgagtgaaaggtacgtaatgattgccactgttgtaatcatggcaaggtctttagcatagggagcgactccaggaatggaggcgaataacggcgctacattgtcggcaatggctacaccaccgaaagcaccggatacaataccgataagcgtgataccaatctgaatggtagaaagaaacttctcgggctcttccaactgtttcaatactcctttggctcttttgtttccctttcctgcgagggtttcgagtcgtgctttgctggatgacaccaacgctatttcatacatggcaaagacaccgttcagcactaataaaaatagaataataataaattccatataggttatgaatagtttatattgcaaaattactaattttttgaattttattactaatattgctgcctatttatagagattattaaagaatgaaagacatgaaaagaaaacaaattttatttagcgttttattgctgttttcagttgttgcgacacaggcggcacgagtagataccgttatggtaaaaagcccatccatgaataaagaagtacaagtggtatatgtactccctgataaagcattgggtgaggaagctgaggcttgtccggtagtttatttgttgcacggctatggtggtaatgcacgtagttgggtaggattgaaaccggagttacctaagattgcagatgaaaaaggaattatctttgtatgtcctgatggtaaaaacagttggtattgggatagccctaaaaatcaggcttatcgttatgaaacttttgtagcttcggaactggtgaaatatacagataaaaactatgctactattccggagaaaaaaggacgagccattaccggattgagtatgggtggacatggtgctttgtggcttgcaatccgtcataaagagatatttggtgcaggaggaagtaccagtggtggagtggatattcgcccttttccgaagaattgggagatgaacaaacaactcggtgattatgagtctgataagactttatgggatcagcatacagtgattactcaagttgataaaatcaaggatggtgatctggcattgattattgattgtggtgaacaagatttctttttggaagtgaataaagcattacataaggttctgctggaaaaaaatatcagccatgatttcattacccgtcccggtgggcataacgggcaatactggaataattctattgactatcagattctcttcttcgataaattcttcaagaagtaatatccttagtttatttcatgatataatctacggtacgtgcatagtccgtaccgtaacttttggttaactcgctgcatgagatgtcgacatctttcttatcgaacctataagtgtaagtcgtggtttcgttacttccactgttatcctctggtctgagatcagtaatcagagtattgtatgcatctcccaagaatttcccataaatggcaaccgagtggaatgaaaggggatatagatctgtcaggaataggtacggaatctctgaagtgttggctatttcattgccggtagatgtgctggctatgtaagtttgttcggacttgtcaacctgctgggtgatgcgtagtgttctatagctactataatctatgttgatagaagaataggacttatttccgtctaatgtttctgttatatttttcaggaagtattttccctctgtattgataagataatcgaaagtataagagcgtattttaccatccatttcttggcgcacgcaacttatagcatagccattatcatccaacgtgtaggtcgagatattattaatttcatctgttactacagcctgatgatctccataaacaacatttgttgcattttctatcttaaacaattctcctccagctacgaaactttgtgtagatgtaaagttaatcaatcgaccggcactataatcgtaagtctgagtaacagtaacagctggtgcacctggctcttccttgacttcctttaattctattttagagaaatgagttacaggatatcccggattatcgggtatatctgagccctcgttattgtcactacaagctgtcaatcctcctatgaatagtaaagctatgaaaatattcttcttcattctgggttatttaatgataagaccattgcggaaatagcgctttactttcacactttttactactgtcatttgagtttcgggttctggtttaggttcagggagcacgatactaccatcgatgatacctattgctgcactgaacaaagcctcgttaggatctcctaatggcagtacttttgcaaaatcactcagttcactgactgcataattcggtgtgaaacctttggtgtagtccgcctcaccttctgaattgaatacttggcatacaacagggcgaagcacccataagaattgattgctggggaaactttctgttgctacggtttctcccttggttgtggtgcctatagttattactgtcatgtacggtctcaaacaattaatgagcatttccgaagcagcagcagttgtactgcttgtcagaacatacactttcgatagatttaggttcacacctccttgcaaaagcttgctgtcgagtgtgagttcgtggtctttatattttcgcttctggctatattccagtgaggcgaagggactgttcaatttgtcggcaggtaccaaaatatctgccagaagttgtacgcactccatttctccaccggcattgtagcgcaagtcaataaccaaatctgttatatccttatctttaaagaactgcgatagttggagtagcttactattatcttctttattgaagctgttgtatgccaagtaacctacatttatacttccactggagtaaacgtcgtaagcaggtatggcgacgtcctctacgggacgggtggcaggaagaactacgtcacgataagattcaatcttactttcatcttctccttcgtcattgacagctgaaacatattttcctaacaatagtttctgattttcaccttcagtcagtagtttctccgtttttttggtgatataatcatcgttgatttgcatgatccattcgcctcgctttaatccgacttcggaagctggagattcgggaatgacgtatgtgataagtgcattataggcggtatcattaccgcttatccgatatagggaatagtcgaagccatagctcggtgtaggagtggcatacaatgtatcgacactggagtaatctttatcaagtgatgatcttattgattttaaaaaagcctccggggcaaggaaataattcacgttttttgagtcgggtatgtcttcaaaccacagatattcttctctcatgacgctgtctatccatagatcgcgtccggtccatttgtaatattccggccaacggtctactccacaagagaataagctcgtcaatgcaaggactcccaatagtaggaaaagctgtatattccttcttctcatctgtatctatcgtttggttttcgttgcaaatttagcgaatagtttgtttatctaccataaatgtggtataaaattccctatcttgtgtcattgcccatgtcataacatcccattatctttgcactcaatcaattaatcctaaaaaatacaaagacaatggaaacaaagaaattgcatttcgagacgcttcaactccatgtaggacaagaacaacccgacccggctactgatgcacgtgccgtacccatttatcagactacttcgtatgtattccgcaactctgcccatgctgctgcacgctttggtttgcaagatccgggcaatatctatggccgtttgactaactctacacaaggtgtgttcgaagcacgtgtagctgctttagaaggtggcgttgccggattggcggttgcttcgggtgcagctgccgtgacttacgctttagagaatattactcgtgccggagatcatatcgtatcggctaaaaccatctatgggggaacgtataatctgttggagcatactctgcctgcctacggagtgactactacttttgtagatcctgctgatctctcgaactttgagaaggctatacaggagaatacaaaggctgtatatattgaaactctgggtaacccaaactccaacattattgatattgaagctgttgctgaaatagcacatcgtcataagattccattgatcattgataatacatttggcacaccttacctgatacggcctattgagcatggagcagacatcgtggtacactccgctacgaagtttatcggtggccatggcagttccttaggtggcgtgattgtggacggcggtaagttcgattgggctgcttcgggcaaatttcctcaactgacggaaccggagccttgctaccatggcatacgttttactgaagctgcgggtgctgcggcttacgttactcgaattcgcgctatcctgcttcgtgatacgggtgctaccatcagtccattcaatgcttttattttattgcagggactggaaacactttcccttcgtgtggaacgtcatgtagagaatgcattgaaggtggttgatttcttgaagaaacatcctaaagtggcagcggtgaatcacccgtcattgacggaacatccggatcatgcattgtatcaaaggtattttcccaatggtgcaagttctatctttacttttgaagtaaagggtggggtgaaagaggcacagacatttattgataacctacaaattttctcacttctggcaaatgtagcggatgttaagtcgctcgttatccatccggctaccactacacattcgcagttgaatgaacaggagttggaagaacaaggcattaggccgggaacggtgcgtctgtctatcggtacggagcatattgctgatttgctggatgacttggctcaggcgttggataaaatataattg

SEQ ID NO: 6386 - DNA, 9880 bp, Unknown
  gut microbiota DNA sequence
aatactatccaaagcttactatgtatttcgtagatcatttatattgaattaattataatatataattgatataatagtgagttggaatagttttttgttgtaataatagtattttagtgaattgcatggtctgtaccaacatcaataccattccatgcttttagagcagtccactccaccgatgggtttgcccaaaaagcatcatcagcaggtagccctaatggtaaaaatacagccatacagagataaagactacctgtatttatatattcttcagacatttgtatttggctacctgcatatccaacacgtaaccagccagctgaatcaaatgtgttaggtcggctaagttggcgttgaataacagatgttaacccacaacgtacttgtgccggattaatttctacaggtaataaatgtaaaagagctgcatcagcaagtgcatgaaaagagccaaacctataggcgatggaacgtcctatcactggataactaccttcaggtgaaatcatacgttccatctgttctgcaaaacgtgaatggcgcttttcttgtattggtaagaaatccgcttcaggcagtccatgttttttcataatgcgtaaaacttctgttaacataggatgaataacaagactgttataatagtctaaatgaaaatccttaccatcgccataccaagcgtcacctttataccattcatcacgaaaacgaccaatcccgtaattcaaacgtttcgcatcatattcacctgtgaactctaataatgcggcttcaataatagaaggaaaaagtaaccaattactttcaaaaggttttatatttctagattctttccatttttctattaaccatttttgagtttgattatcaagctttttccatatttgtgttggagcgcgtaaaatgccttcagcaagaaaagctgcatcaacaagtggttgtgaatgattattaaacattagattgtcaggtgatttcgggttaactgcattacgtagtccctttactactaaatttatatagtgtgcacgcaattttccttctttagtattatcggagcctagctctaaccaaggagcaataccacaaatagttcgaccaacagcttccaaataagatgctttacgccgtaaagaatcattagatagagactcgaaaggcatatttttctttaatgtacctgcagcaagattttctaatacaggagtagcaatacgtgtcattttctttatccaaatttcacgctcgcttataccagtaggtctggaaattaattttttaaggcgtaccaaagcttcaacgtaataatagtctccataagttaaaggaacatctacttcattcttgcttcgtaaatctccgactccatgtttaatgatgaatcctcccattgtaccagcttctgctaaatactcaggagaactaagtgtacgaagttgtttttgtgcggtttcaagccatattggagccatatcactagggtcaagttgacttaattcaataaaagctgacgccataatagaagcagctgatgcatcacgtttagcattaggaatttgaggatcgtcataatcccagtaaggtactttgtctttgggtagacgtggatgcgaaatgagaaaattaccgattttccgggcttgttccaaataaatggggttaagcgtctcccgatacatcattgtatatccataaagtccccatgcttgtccacgtgaccatgaactatgatctgcatatccttgagcggttttttttgcatgtggcatgccagttatagtatcataagaaattacatgataagtgctataatcagcacgaaagtgattttttatagtagtttgggcatgagtttctgctacctttatataagtacgatcagagaattcttggctcatgaaacaaagcatttccaaattcatcatattatcaataatgacaggatattgccattgcttcctttcccatgatttgataactcctaattttggattccaacgagccaaaagattatttgtaccttcttttattacatcgagataatgaggatttctagttaaacgatatccttgtccaaaactacaataaagcataaacccaagatcatgtgtatttgtcatctgttttgcaggttctacacgtgctgtatataattctgcatattttctaaattgcgtatcttgattattctcataaagtagccaaagaacaccagggaaaaagccagatacccaatgatcataatgtatagtctgtaatttattattctcataagtacgtggtagaacatgttctctgttttttaattcttgtgctaaaataagagattgattttcagcacgttttagtccgtattctattatttgatttattgattcttcctgtgctatgattggtatgctaatgaagatagaaaaaatcaaatagagaaatttattattgaataatttcataatcatgaataaaatgttaatataaaatgaattaaagttagatacttggctaatatataaaacaatgtgttgtttgtataaattactttgttttgttctcatcagcaattgcgtcctcccagttatcccacattttgattgaggcatcataaccatcgtagccatagttttgtgctagttcagccttgttgttagctgtaatagcctcgttaggaataggccagaatacattacgcttatccatcgtataattgatggcacttgcactaccggaagaaattgtataaccacggttatagtaagagtagcgtgtgacacgttgataccaatagctgcctctatcaggtgtcgtaccggattgtttatcccaatcagaaccataggtattaccccattcatcgggaatgccactgttggctaaacacattgaaatacgtgttagttccaccttgcgccattcctcaagaaaaagttcacggctacgctcattggctatatcacctatattgacagtagtataatattcactacagtttgcacgacggcgtactatgttaacatcctcagcggcttctgcagcacgattttgatataatttagcttcggcgcgtagtaggtaggtttctgctaagcggaaaagatatatgtttccattactacctttagtggcacctcgaaattcagtagatgctaaattattttcagcaaatacatcatggtagtaaattttgtagagtggaaaatcaaaccaagaacgaattgtatcattacaaagtaattgtcctttggttatcaatatatttccattattatccatcacatctttaggggcatatagcgtcaggtttttaccataccaagaagaagctggattgttatatctgatatcttccatgtttacccagttaccaacttcgctgttgtgacgcaaatcttgagtatcttctttaccattaacttcccatagagtatgttgggcgaaatagctcaacctcatggtagcaatgccacgtcccagcacacgattccaatcattgtgtacatcgtaacgagaatctgtacgagcatagttaataacacctttaccagaagcaccatcagggcaagttatattaccattccaaaaaggaccaaagatacgcattgtaaggtattcagtgaatgattgagtggacaaattgggaattcccataatgcattctttattgaaacttccaatcatgttttcagcgcgatgaagatcccaaataatattgcggttaattgcccaagtttctgattcgccaccaggattatttgtaccgaatggttcagtcatcaactttaatccatagttattgattaggtcagttgccatcagttctgccttattgtattctcctacagctaaataacatttgatgagaagatgtatacaggcttctttatttaccataccataggtgggcatattctgctgtgaggggacatgttcaacagcgaattccaaatcgtggatcaacatatccaaaatggcctctttctttgtagaacggtaattttgcttaggtacgtcaataattctggttaccagaggtacatctccaaactcaaacactaagttgtaatattttatggaacgatgaaaataggcgcgccctttatattcgttacgaatactttcgcttaatccttctacttggtcaatataagaaaggagcgtattggcatatttaatgccattaaaagcttcattccaaaggtacattagcctatttgtatcaccaccagtatacatgttggaagttggcgtgagcttattggcaaaattatcttgaaatcccgaccctgcatctgttttaccataaagccctatctcagagaagaaatagtcagaggccaagggagtattatttccattttgaggatcaacaatcatcatcttaagatgtcggtcgcaaacagctaatgcagcctgaagtcccgattctgtagtgtaagtggcactaggttcatagaatgatagcggatcttgagcaagaaaattctcagagcaacttaaaagtgtgaaagctgatgttacacaaaaaagagcttttgtaataaatatattttgttttttcatatctgtaaactgttataatgtgaaactcaaaccaaaattataggtacgcgtagccaaaccaccagtctcgggatctccatactcccaatcactggcaaagactgctatattccggacagaggcggtaatacgtacacgatcaataaggaacttgcgtgtccaattttgtggtaaagtatatcctaaagagatgttatctaaacgaataaatgagcgattataaatcttagctggagcagtagctcctgatggccctaaagcatctaagcgtgcatatttgtttgtaggattctcaggaagccaatatccacttttgaaattattaaaggcataagtgaccgaggaagcctgattgagttgattaagataattgatggatttacttttgtgtcccatgtaagagtaaaaggagaaaaatatatccagatttttgtatatagtaaaattgttacgtaggttccagtaaatagggggcgttttcttgccttggaacactttgtcattatcattataaacaggtgttcgtgtaccgtctttattgataatatcatctgctgtgtatatattgcttactttaggatcaccaggacgctgaccggctaaagctgcttcgtcagcttcattaacttgccagattccttctactttaaaatcccaaatttcatcaatggccttgcctatgaaccagccattcgtcttatcatccatttcttttttgcctattacattaccattgttatcaaccacatcttcatattcatagtaaaggtggtttattttgttggcattgaaagataagttgaatgttgaagtccaacgaaaatttgcacggttaatattaaccgaatttaaagaaagttcgatacctgtattttgaatctcacctaaattagtataaatggaattgaagccagagaagttaggtaaacgttgactcataatcatgtcatgcgtcttcttaaagtaataatctatactaccgttcaaacgattgtctaatatgccaaagtcgagtccaatattgaatgattctgtcttttcccattgtaatctcggattagctaggcgatccatcattaaatatttcatgtctgttgctactgaaccatcaggatttaggtaattcattgtagcacctaatcctgcacccaagttggctaatgacaaataagaatttgcgagtgaacggttgccatttttgccccaagaaaagcgtaacttgcctgtatccaaccatgaaagatttataaatttctcgttagagaaattccaggctacagaaaaagatggaaatgtagcataaggatttgaagaaccaaatgctgaataaccatcacgacgaacagaccctgtaaacagatagcggttatcataagaatagaagagacgtcctagtaaagcgctggcagtttcatgagtatcgtcggttccaaagctactatcttctaaggtagcattctgtgtgttgtgaaagcctaatgcatcagaaggctgaatattacgagctttgatgttatctgaccagtagcgacgttcttcagcttcttgcactaaagttactataaaatggtgtatatcttttaacgtataatcccatgtaaccgtattattcagagaccagtcaaatctctttgcccatccacgattaacaccgcgatctctaacattactattaggaaaatcggctgacatgaaataacgatcgtaaaagaattgatagcgaggtgcaatattgaagtcgtaagtaatgttgaaaggtaattttattttggtatttaaaacagtattgaagatagtgtaacctttctctaaatcattatattggttgctgaaccaatagttatagccacgcttaatatcactgtccattggatattgaatataactgccatcttcattgtatagtgaagcataaggacttagacgaagcatggtggttgttgataacatattctgttctgtatcaagatttatggaacgtgtcccatcactacgatcttggaaattgatattagttcctatctccaaccaatcggttacctttccattcactttgaagttagaacgaaaagatttataatcatctccataaagtacaccttgattcttcaaatatccgaaggacatataataattgatacggtcgctagctccactgatactcgcattgtaatcttgcttaattccggtccgaaaaacttgatcttcccaatttatagttttacctagaaggtagttattatagacgttagtcgattcatctaacccaagacgccgagcgtatatgctttgaagcgactctccatcagaactagtcgaaagagctttccattgatcggtacttatgccgtattgtgaaagattatttggattgtcataatagcctacacctttattcccaatagcataataagaataatcacctttctcgttaaaaccgagtgtggtacttttataccagtcttccctgaatttcatgtaatctgttgcattatagacactacgaaaatcactctttgtgtcaatgccaagatttgttgaaatattaatgacaggttttcccatcttacctttttttgtagtaatgataacaacgccgcaagctgcctttgctccataaatagctgtagatgaagcatccttcaatacatcgatttgactaatatcattaggattgatttccgataactctccataaaaaaccataccatccaaaactatgagtggagcgttatggtcaccatctgtgtataccgaattctgccctcgtaactggatagaaccaccacctttagcagaagcatcataacctatttgtagaccagctgtcccacgaagaagttcttgcacattacccggatgagtatctgcaactttatcaggattaatctgtactacagcacctgttaaatcttttttacgcatagaaccatagccaattaccactacttcttctaatgtttttgtatcttcatacaaagtaatggtgagttcttttttattgcttacatttacttcctgtgatgtataaccaatatatgttatttgcaatatggcatttgcaggaatattgataacaaatcgcccatttatatctgtaattgtacctattgattgaccttttgctctaatattggcacctataatggcttctccatttacatctcttacaatacctgttaccttgtttacctgttctactgattgaccttcttttgttctgcttatcagcatgatattcttgccttccatggcatagtaaatattagtattctcgaatactttattcaaaacttcagcaacagatttgttttctgcatttatttgaatagtacgttgcagattgacttcatccacattataaacaaatagataatctgtctgtttttctatttcattaattactttacctgtcgaaattttatttgcaacgactgttactttcatcacttgagaataagattccgtggcaaaagccgtcccagcaaatataaacagggctaaggctgtgattctcatgatatggaataaatgtttaatttctacaatagattcctgatacaaaatatttttcatatatttgcattactaattttaggttttttacttaagattactagaaaaaagtcaattcgtaattgactatctatgggatggtgttgcagcactgtcccatttcttttagagtgtattatttcataggctaattattttaaagggttaataaatggttattatattcttctcgtcatctttcgtataggtaaatttaatgcttagtcttaatacttttagtacatgttctactccatctttggttctgaacttgccagtataatgattatccaatatttgggggttatttataatgaaattgactccatagtaaagctttagcttttctatcatgtccctgacagatatattattgaaacaaatcaatccttcacgccatagaaagtgatctggttctgttatctgtcctttaattaatttgttaccttttaggcttgccactgtatttggttccaatctcattccgttcatggtagtaccaggttttaatatctctacagatcctttcagtaaagctgtctcccaaagactgtctgcttcataagccattacattgaattctgttcctaatactttaatattgcatttgcttgtttccactaaaaaaggttgttctgcatttttagttactgcaaagtaaccttcgccgtttagttttacattgcgaatattaccgttgaaacttccaggaaaggttagtgtactcaatgaattcagccatactttagtaccatctgctaaaataagttcagcccgttgcccggcaggtacatgtatagattgaagtaattcatttccttgagtatgatttcttccaaaccaatgttgtgtgcctaataagacaatagcaactattgctgcaacttttgcggcctctatccaaaatgtgtgcaatatgaacctttttggttgctttttttctttcatgattggttttgtacgccatagtgcgatgtcatagagcttacgttgcactatgtattcacgcatattttctggactttgctgtatccactcggttacatgttgtttctcggttttagtggcattgccagatatgtatttttgcagtagttcagtattcattattctctatgttattttatataataacgattgagataggaataaccctaaaagaaaaatggaaaaaataaaaaaaaactcattttttcctagaaaatgaggtaggtttaagactgaacttaataatagaagaaaaaataaaagaggggaagataatcttttaaagatattcgtaatgcctttagggattttgatatatgatactctactcctttcactgaaattcccatttgttcggcaatttccttattagacttgttctcaaatcggcttaatagaaatgcttgacatgtttgttttgagagtgattttaaagtattctgaatgatattttctacttcgttcgagaatatttcgttgggatcacacgattctaaggtggaaatacgaatagaaagttcctgtagatgccaatcgttcatagactcaaatgctgcgcgttttacttcttcatgtttcagataatcaagagctttattttttaatgtgacaagcaaaatgggacctatattgttaatcttttctgtttttaatttttcccatagtttgattaatgcttcagaggcgatatcttctgcagcaaaatcattatggacatatgacttggcgaaaaaaaatgatttcttataataagagctataaatctcattaaaagaat

SEQ ID NO: 6387 - DNA, 14919 bp, Unknown
  gut microbiota DNA sequence
ggcgtgacctgtactttaaacaaattgaagaaaaataattcatcggcaatatgcgtaaaaaggaaaggacggttttccactatcttctttatctgttccgctgtattccaggtagtagagaaataagtcacatccggacagattttcatccattcattcagttccggcatctccttgatacacggtctgcaacccgtgtgccaatagttcagaacgaaaggctttccaatgatatccgcctttgtccatacccgtcccgtcgtatcctttaccttaaagtccgggaatggttttcctacccatttatcaagagttactgtattagtcgctgcaatcgccatcggcttttgcgctcctgaacgggaaatctgcaataattcctctcctccgggtactttttctacggaaacccgatatttcattgcatagtccggtaaagttttgcctttattcagacgtatttccaatgcggtatgtccttcctcatctgtcagcataatcatctgggcaccttcatcagtccgaattcccggaggcataccattgaaaaaacatccgtcaatgagaacatacttatcactactagtttgggcggagcaaagccccacccaaacgaacatcatagagagaaacaaaaagagagaattccttttcatataaaatatctttgattattcatctttcaaagtaactgtcaccttcggctccgcctttactttagcagttttcatgccaatataagaaacaaccagtttatcgccttttgaagcagataggacaaagcgaccatccacatcggttatactgccgctttttgttccttctatcagtatggcagcacctacaacaggttctccgtctttatcctgcacaataccttccactttcatatcacctttggcagaagtcttctcaactcctcttttgtctttggtagtgatataaatctggcctttgccgtctgttcctttctcaacactcatgctttcaattctttcagccggtactacctcacctatgtccgcaacgctggaatcaattttcacaccatctacaaaaaaggtcacatctccccgatttgccttcttactatttatatagataccttgcactccattgacagtagtaaattttcctgtacctttcactcccaaaaccacgggatcattagtattctttagtgtataggtttctgatggatggtattcttctttatcttctttcaaagtaatcaatataaccccattcttgcctctctctccatatattgcagtagaagccgcatccttcaagacgctaaaactcattatcctgtcgacatttattgcattcaatatagactgggtaacttccttgccatccactataaccaaagcactatccaataaacttccagggcgtctgctcatctctacagtacgagaacttttcatctctcccccttccagtctgaacattaccggcagtgtatacttcactgctaccgcttgtcctttctgcatacctggtttccacttcggcatcgttcctatcaaccggatagcctcagcatccagatctttatctacggcacggatcactttcggatccgtcacatttcctcccttatcaataataaattgcaccgtaacgcgtccctgtgtaccattcttctttgcagtttcaggataacgcatattcttctgaatatactccaatgcagcagccatgccacccagatactccggcatttgctccaccacctcgaagaagggagtaccctgtagcttctcagtcacttctgcaggaatatacttcacctccacgggtttagctgtatctttcagtactggagctacctgtactggttcttccgtagtttttacagcttttgcttccacaattgctgtcaaatcattaactttggcggcagaaatgtcatgcaaacgagagaagagcaaacttgcttgttccattccgagtgcatccgacattcttgaaatctcttctgcggtttccgagatttcaggacgggcaaaagcagttactgcaatggcagctaccggaagtatatataaatacttcaatcttgcccacggattcgatttttcttttaacatcatagtgatacgttttttaagtttactgtgattaaagctgttggccatagagtagagccttgtgccgacagcttttttaattaataataattgatattgtttcgcgtcaacgcctttttcaatcaccgtttcatccgcctcatactcatggatattctgtaattcctgtttcagcagccacgaagccggattaaaccactggaaaaagatgcagatatctgctaccagcaaatcccacgaatgtcggttctgtatatgagccaactcatgaataagtatttcccgcccattctcatccaagtctttctgtgaaataacgatgtatttcatccaactgaacggagctatatcgtggtcgtgcactatcaaagtcactttctcaccaccgtcagtataattactcaagtcttcttttctgcctgatctcaataaattgcccaacttcaacaacgaatacccattacgaaaagcaaaaagtaaaataccggccaggtacaccaataatgcaacctgtatccaagttaccgtcacttcctctatctgcaattccgccacatttgtagtattcatcatatccgccagcatcagccactgttccagtgtcatcatggtttgatgaacctctgtctgcttctccacagtaacttccaccaatggcaaaagacaagatagcaacaatatgctcaacaacgctacccggttgaaacgatgaaacgtctcacggctcagcaacaaacggtaaaacaggtagaataccgccaaacaaaccgacgacttcagtatatagacaaagaaaattcccatattgacgtactatttataatttacagctactatttcccagccttcagtagttcttctttcatcacctccgcaccgggaaatccggtaactttatatgaaagcttcccttcccggtctatcacaaaataagtgggtattcccggatactcatatagtttacctaatgcagaactctgctcattcgtgatccgatagtgtattccatgaatatcaggtatggtgattttccacttcccttcaggtgaactttcatccgctatataaacatacactacatctttcaattcttctttcaccggcttcaggctattcatagcccgcatacaagggccacaccaagtattccacatatctatcagaaccaccttaccacgataaggacgggtgacaactgccaatagaccatctgcggtaactgccgtatctagctggcaaactatataaccggtcttatttgcactttcagcaagcaagtccatcacttctttatttttgacagtcaaagctttctttatttccggttcggatatactgtccaatgtcagcatctgtttttccgacagcggtttcaaacgagcaagagtggaacctagaggtttcgcccgtaaaatatcctcccatacaggttgcggttcaaactttcctttaaaatcttcagttgcagcacgtacaaaatcaggataactgccataacgtatataaggtgaatgaataaaatccagttccagaatatcatcataataactttcatctaccgtcatgtccgcacgcttcactcctttctttccgctaatcatcggagcataactaatattccctttataccccctgatagcaaagaaatacgacatttccagcttgtttatcatgtatgtgcgagcagcatcactcaacgatttatttttcagtatttcaccacgatttttttcataaatcttcgtcacatactttttatattgagccggagtaacaccacaaatattctcataaaaattatccgcactataaatgttcatcagtccggcatgctttaccagttcagtattcagagcggcatacgtaccctcaaaccaaatcaactgcccgttctctttctttccaaacaggtgactttccgaccagaaaatctccggcaaattaatagttacctcaagtttaccacccggcatcagaaacaattcaaatctcttccgtcctacccgtaatgtcgcttcaccgggcagcatcatatttgtttcgtagcgaaaacttccatcctcgaccaccggaacggattgaccgaatacatcaaagaatagccagtcagtacaattgaatttcaaagcaataccatgagtcggatcataacccaatatacgcccatatatcaccgtcttcccattcttcaaatcaggatccggcagaggctgggaataatccaattgctgattcaacaatttctccggtattcctatttccggcttttttccgtccagacgcactccataaatattccatccttcgtctttcttctcagacatttcgaaaaagtcaaaactttccgtatccataggaatcggctcaaacttcaacgtcacagccaattcaccagaagccggtgtcttcgtccatagttcttttgaaaaaccattaccacctagataggcatacgtttttcctcctatctgcaatacagcagtcgagtctatccttacatcttcacccggaatagaatatattttagcatctatccatgtcgtatcctttcccaatgtcactttttcgaattcgatctggctagtattcgttgccatgaaataaggagctttcacaacctttttcgcctgcaaacctacgcaaacagctatcaatacaaaacaagttatagctatgtttttcataattcttggcattttaaagtttctatttcgttcctctctccacttctgcaatcaactgtttcaggtcctccaacgaaatatcctcttcttttaccaacgatgatactgcgctgagatacgaattattgaagtacttactgattactttcttcagcgttcccttactgaagtcttccttattcactacagcataatactggtacgtgttaccgtaagtcttatgtgccaggaaacctttatcctccaatcccctcacaatcgtagacagcgtattgaaatgcggcttcggttcttcatagaaagctagcatctccttcacaaacaacggacctttctcccagaaaaatcccatgatttcctcttctttcgcagtcaatcctttcataactcttcatttgtttttcgcaaagaactaaattatttagtttataaactaatttttctcgttaaataagactaaacacaaaatacctacatatagcgattgcaattcccggagaaaatccgttactttgcgcacgaataaataaagaaagaaaggataatctgcaatgaatgaaccgcataagtatcgtgccacagacaaaatgagcgaccttatctgtgataactactccttattaatggttatgagccgtttcggcctttccttaggattcggagacaagagtgtaaaggacgtttgcgaggcacaaggcgtagactaccgtacctttctcgcagtagccaatttcatcagtgaagaacaatatacttatagtggagaggaaaacgtattttccatctcagcccttatggattatctgaaacgggcgcacacttactttctcgattttaaattacctgttatccgtcgtaagctcatcgaatctatcgattgctcgggctcggataatattgcctatctcattctgaaattcttcgatgaatatgccaaagaggtacgccgccacatggaatatgaaaacgaggctgtgttcacctatgtcgaaaaactacttgaaggcaaacttgcagagaactatgatatagcaacctttgccagtaagcataatcagattgaatccaagctgacagaactgaaaaatattatcattaagtattatccggaaaaagagaacaacaacaagctcaatgctgttcttttcgatatcttcaactgtgagcatgaccttgcttcacactgccaagtagaagactatatgtttgttcccgccgtggcacaactggaaaggagaatgaaaaatgaacaataatgtttctgtaaagattgcagtcgctgaaacttctgtcattatccgaagcggactcacgacagtgctgaagcgcctgcccaatctgaatgtagtacctatagaggtttcctctccggaatctttgcaaagctatattcacctgcatacaccggatgtattgattgttaacccgacctttggcggctggttcaatctcccagcattcaaggcagaaaatgggaaagtggaaaccaaatatctggcactggtatgttccgtcattgacagtaactctctgaaagaatatgatgatcatctttctatttgtgatgatccagaaacaattgccaccaaaataaaccaactgctttgcactgacgaagaagaggagaaagaaaatgagcaggagacgctcagtcagcgtgaaaaggaaattatcacctgcgttgtgaaaggtatgaccaataaagccattgccgaccagctctatctttccatccacacagttatcacccaccgccggaatattgcccgtaaactgcaaatacattctccggccggcctgaccatttacgctatcgtaaacaaactggtggaactgcaggatattaaagataacctataaaagagagagagcatcgtctcacactgtctttcatttccaactatggatatcccgcataatacaataaaaacacaatctttttacttttaacttcaactccgttcctatttgcttgtattcaccaacaaggcaaatcaagattatcactgattatcaaataattacaagaagttaacttcctgtctgcaaggagttaacttcttgttgacaaactcttaacttcttgtagacagggtattaaatgaaaaaatccccgctctttcacgatatcacatcggggaagacgggaaccttttttccttaataaaagtggttacgtaattatgactaactaattcattaaatctgatgttgcaaaagtagggcatttgcgaagatgtcacaatccctaaaacaaggtataatgaaagggagtaatagccataactaggtattaatgcttgtaaacacctctatttatacttaaacgccaatatataatagactataagcgccaatatcatcaaaccaacgaccgcactcgtaatcatattacatagatcttgcggaataccatatcccatctctactttattaaaaacaagagttaggaaaagtaaagtaagaaacacattcaatatacgagcaatacgggctgccataaaatactgtaccgcaacattgcgttctgtgatacgtacaggaaaacgtatccaacgaataggaagataggcagaaataccaactaaaaggagacataaagtacctaatcccgcagccataaaggaaaaattagctgtaatcttgtcctctatatgaatatacacccatattgcacacacccaggcagcaattgccaacaatacggcaacaccttctaatatacgatctattatagtgggatatacccggatattaggaaactctttagttgaatatggaccaagatttaacataaacaatatatgaattataattcaaactactaatcacttatcactaacaacttatcgctaaactacgactcaggttctttaggcggaggagtattctttgtattcttcatccgcccgcttttccgcaatgcctcagcgataatccactgaagctgtccgttagtgctacgaaactcatcggctgcccacttttcaatggcatccatagttgcagcatctacacgcagaacaaagcttttggttgaagtttcttttttagccacgattctatttactatttaacaatttacaattgaatttgtattataacaggtttccgttatgaataaacgatgcaatatcatccatgacatatccgactacaggcgacgcctggttatactcaaacggagtagctttaccactaccttcctgtaacatatgattaagtttagggtaagattttaagaaagcatttttattacgcatcagcccgaagcgccataaaccgaaatcctgcatagtcacctgataatcacgctcgccctgcaatataagtatgggaagagccagtttagatgctacttctaccggtttataggcgttagcaaattcccagtaagaacgaggaagattcagcaacaaaggaatcttatcatcatattccggtgtacccagtttctttatattatcagcttgtttttttatttctgtaatctgctttttggcattagcggaagagtcagtcagagaagatatataagtcatttgttcaacaatagcatcttcaaatggacgagctaaagcggcaacaaggataattcctgtcaacccatctgcttgttctgcaatgcgaggagcaagtgtagcccctaaactatgtcccagcacataaacactgtccgcatcaacctcaggcaattccttcgcccaagcaataatagccacagcatcatctacactttctgtatcataatcgatattccgaccttccggcacacacgctgcaccatataccttcgtacgtttatcataacgaaccgttgcaatgccacgttccgccaatccccaagccaaatcacggaaaggtttattcggaccaacagtttcatcacgatcctgcggaccggaaccatgcacaaggattacgacaggagcctttttctttcctacaggcagcgtcagcgttccgggcaatttaaagtcatctgctcccaccgttatatctcgttcctgcattttctctttattataagctaccggttttgctgtagaagcagcaggtacaggcatcaaacgaatggtattcatgcttccatcagcatcgaaagacaacaaaaaacggagactgtaacgctcaaacttcagatcgcgataataaagtgttatgccttcagcactctcttgcttccactctccttttgcttgaagttttccgaacagcttttccgattgcttaaacatgtctttaaagatttccggtgataatttttcctgcagatttttattcaagagagcatgaatactgtccccctgatctgccacaaacaattcgtacacatgcttcgcatggtccatatttgcatcctgagcaaaaaccgtcactacatgccccagcaataagccaagcgccaatgcccacttatataaaaaagaaaagctcatattatcttgattaatgatttaacgtacccgcattaacaattggctgtgctgcctcatcggcacaaagtaccaccagcaaattgctgaccatagccgcctttttttcttcgtccagttcaacaatttgttcttctgaaagtttgtgcaacgccatttttaccatagaaacagctccctcaacaatcttttcacgggcagtaatgatagccgaagcctgttgacgacggagcattaccgcagcaatttcaggagcataagccagatagttaatgcgtgcttccactacctccatacctgccatggcaagacgttcattcaacttctgttccaactgttcattgatttcttcaccaccggagcgaagtgtcagttcttcagtatccgcttcgttatcatcataagcatattgtccagccacctggcgtaaagcggcatcactttgtattttcacaaaattctcaaaagcgttcatacggctggcaaccgcattacctatattaatttggttagcatttccccccgtatgagcagatgaagccattgtctgcgaatcaatctcaaacatagctttgtaggtatctttaagtttccataccaacaccaaacctatcagaataggattaccgatcttatcatttaccttgataggttccacatccaaattacgtgcacgaagagaaagtttcttcttatccagaaaaggattcacccaaaagaaaccagtttccttgaatgtacctttgtacttaccaaaaaacaccatagcccgggcctcattcggttccaattgcatataaccggcaaacattatcagccagacaatgcagagaataccagacacaattgcagttggcacacacgtaataaagccaaagaaaattagtgcaggtaacacaatgagatgaacaaacaatcctaaaaagccattcatcttaaaccctttgaaattcaattcttttgtttccataactgatagattaagttgatatcattttgatatcacaaatatattacttcattttataaaaaagaacttttagaacatctattttaaagaagattaagcaattcactttttttttatatctttgcatgtcgcaatattaattaatagcacatgagaaagtataacacaacaaattcccacttattaatctgcttggtactactaatcccaaccatgctcctcgcacaaccaagctgtcagatccgacacttctctatatataacggattggcacaaagaaccgtttcagatattgtacaggactccaagggatttatctggttttctacttggaatggtttaaacagatatgacggttataccttcaagaattataaggcatatcccggagatggatgtacactaacaagtaaccgtatattaagaattgtacccgaccaacaaaataacatctggtgtcagacttatgatgccagagtttatctattcgacagtcatcaggaaaaattcatcgatattctccaaccttttgagcaaaaaagtggggaaacttatatagtacgtaaaatctatgccttacctaaaggagtcagttggattgtatgcgatcacggagcttttcgggtagacgaacgaaaattagaaaatgaagacgaagatgccataacacattacactctagaaatcggcaatctacccggtaggacggtttcaagagttgagcaagatgctgcaggagatgaatggattttcactaataaaagtgtctgtatagttggacaaaaaacaatatccgataaaactcatttcacaaatttctgtgaaaacaatgagaaaatgtacctgatatcaagcaaacgtttagcaatctataatcagcaaaatggacaaattcaatataaagaaataccttttaattattcgcgactcaactgtatactaagcttgggaaaagatactattggaataggtaccagcaatggcatcatactcttcttcgcacaaaacaaccaattcaggaatgtagaaatgcattttaacgtcatgagaatatttgaggacagccataatgaattatggctattctcaaaagaacagcgtggaattgtacggtacgatcccttgactaacgagcaacagcactatgaaacccctacacaaaatatgcccaaggctgaacttagaagccgtgacgttatattcgaagataatcaaggaactttatgggttgtgcctcacctggggtgtctaagctattatgaccgggaagataaagaactaaagccctattacaccgattacagtaaaccggaatctaaattcactcctgttatcctaaacttctatgtggataatcaaaaaaacttttggtatgccaacaatttctggatggataaaatttcattctttcccaatgccaatcaattgactacttttgactccggacatgaaacccgcgcaatcatggtcgataagcaacaaaatctctgggttgcaaacaaaaaaggagtcatccggatttttaatccggacaaaactcttaaaggctacctgacaccggaaggaactatcagtacaaaagccatttcattctccaaaaacatttattgtttcacagaagacgaacagggaaacatatggatgggtagtaaatgggatggtatcatccgattaagtcctaaaaaagacggaagcttccaaataagaaactatgtacataaggaagaagacccctatagtttaagtaataatagtgtttattgcatatatcaagattctaaaaaacggatgtggatagccactcatggcggaggtattaacctacttcaagaaacggcagatggagaaatccgcttcctgcataacggtaatttactaaaagattattcaaaagataaatttaataaagtacgtgtcatcaaggaagtgaataatacccttttagtcggcacaaccgaagggctgattactttctcctgcaattttgaacgtccggaagagattaagttttataccaatgtgcgcataccggatttagcatccagtcttagtagcaatgacgtgatttatatttatacagacagccgtcaaaattcgtatgtactcacattcaccggaggcatcaatcagattatttcaaataatttgttaaccgatcagattcaattcaagacctacaccaaacgaaatggtttagtgtcggatctggttttatccatgattgaagatcaacagaaaaatctatgggtcatatcagaaaatacattagccaaatttgatccagagaacggaactttcgaacattataatgaaaagcatttgcagaaagaaatatatttcagtgaagcctcacccgctataatacggaatcagttgattttaggtacagatgcaggaattttaaagattaatccagcagctttcagcaaaagttcctatactcctcctattgtattcactagtttaaaaatacaaggagttcagcagcaactggatcttgacgacctggaagaattaaaattaaaacctgacgagagaaacgtatctttccagtttgcagcattagactatattaatccgtcttccatcagctacgcctatcggttgaaaggactagaagaaaaatggaatgaagtagaaaatagccgcacggccagttatatcaatcttcctccgggaaattatgaactacagatacgctccactaatagtgacggtgtatggacagataatgtgcgaaagctttctgtcatcgtaatccccacattctgggaaacatactgggctgtattagtttatattatcttattcatcttatttacagctactatagtctatatcatattgtatatctataaactacgtcatcagatttatatggagcaacaactggcaaatataaagttgaggttcttcacggatatctctcatgaattacgcacacctttaactctgattaccagccctgtaggtgaagttcttgaacatgaacctctcactcccagtgcccgtaaacttctgacagtagttcacaataatacagagcgcatgttgagactggtcaaccagatactcgatttccgcaaaatagaaaacaaaaagatgaagctattgctggagaaaacagatattgtagaactattgcagaaagtgatggataatttccgtctcatagccgaagaaaaaagtattaatttccgcctgcaaacagataaagagtcaatacattgctggatagatcaggataaagtcgaaaagattatctttaatttattgtctaatgcattcaaatacacacctgtcaataaatcaattacagtatatgcccatacgacaaaagataaagtcatgatttccgttaccgacgaaggtatcggcattgactcaaagaagcaacagtctctattccaacgttttgagacattggtaaataacaatattctgcaaccatcttccggaatcgggctatccttagtaaaagaactgatcgaattacatcaaggtaatattcaagtgaatactgaagtcggaataggtagtgagttcattgttacattgccgcttgaccagaaggtttatgaaggaaaagaaaatacagagtttatcctgaatgatattccgtctgctcataacccaaaacacgataagcataaaatcatttccaaaacatcagagaaaaataatattctgcaggagaagacaaaagacaccgacaataatacggatcagtatcctatctctgtgttagtcgtagaagataatactgaattgagaaacttcctgaacgatatcctttccggaacctataaagtctttgaggcaacgaatgggcaagaaggactggagcaggctctacaatatgtaccggattttatcatcagtgacgtaatgatgcctgttatggatggtctagatatggtgaaagctatcaaagctcatcgagatgtttgtcatattcccattatacttctttctgctaaatcctctttagacgaccgtatttctggattggaacaaggaattgacgattacatcaccaaaccattcagttctacctatctgaaaacacgcattaaatcactgttacatcaacgcaaacagttacaggaactttatcttgaacaatggttggatcagaaaaaagaagctcctacccctactctccttgttgaggtagaaccggaaaaaccacaaattgttccgtttgatgaattattcatgaaacgagtaatggaaataatgcataatcaaatggataattcgaaactaacgattgatgaatttgcccaagaactgggtatgggtcgtacagtgttctaccagaaactgaaaagtattgtcgggctttcacctattgatttcgtccgtgagatgcgtataaaacgtgccaaacaattaatggaaacaggagaatacaacgtctctacaatagcctatatgacaggctttaatgatcccaaatactttagcaagtgtttcaagaaaaaatacggagtaagcccctctgagtttacgcctaaagagaaataagagaataccaacttcattagttactatatacataaagggcgttcctccgaatggaacgcccttcctgcaaagaatgtctaacaaaacctcacggcttcattaacgacacgttattattattgtctccaacgcggatcgccaatccccaaacgatagatagcagatttacgtaccttatcggtattgttataatacaggtt

SEQ ID NO: 6388 - DNA, 4835 bp, Unknown
  gut microbiota DNA sequence
tgatgtgataacaataacgtcagaatttgcagtcttctcataatcgttggtgcagcctacaatagtggtatcaaaacccaacaattgagctgtctgcatcatatccattgccttaccttctgaaacgccttccttaacatccagcattaccacttcgtcagccacttcattaaaggccaacacattagcgcatgtagcacctacgttacctgcacctactacggttacttttgacataatcttcaattttttgtttatatgtgtaataaagttgcgacaaaagtacaacgacattcgtaattaaggaaatttttccgtaataattttagttaaatgattattaagttaagggttggtgattagcgattgacgattaatgcttatttttgcggcggaatagacctaaccctattttacacacctattatattaatgaaacaatatggcaaataacaaaaataagctggtgattattgcaggtactgtattagtattagccttggtgggcgtcactgtattattactcaccgaaaagcagaccaacaaagaactggtacaggaatttcaactggaaaaggaagacctggaaaacgaatatacacgctttgcacaacagtatgacgaactgaaattaacagtctccaacgattccctgtccgtactattagaacaggagcaactgaaaacccaacgtctgttagaagaactgcgtaccgtaaaaagcagtaacgccgctgaaatacgccgtctgaagaatgaacttgccaccttgcgtaaagttatgataggttatatcaaccaaatagattcactgaataggcttaccgctcatcagaaagaggtgatcgcacaggtcacgcaaaaatacaacgatgcttcccgccaaatcagcaatctggcggaagagaaaaagaatctgaataaaaaagtaactcttgctgcccaactggatgcgaccaacatcaacattcaagccgtgaacaaacgggataaagtagccaagaaagtaaaagacgtggtgaaattcaagataggatttactatcgtcaaaaacatcacagctgaaacaggcgaacgtactatctatgtccgcatcaccaaaccggataatgacgtgctgactaaaaacccttccaatacattcccgtatgaaaaccgcgagttggggtattccatcaaaaagtacattgaatacaacggtgaagagcaaaatataaccgtgtactggaacgtagaagagtatctatatgcaggtacctatcgggtagatcttttcgcagacggaacacttatcggctcgcaatcctttacattggactaaaaaagattaaattattttgaggtctcactgaaagcctatacatttgcatcgttgtttatgcaattattgttgcatcacaaaacaacgttttaatcaccttaataatgtatagacacgatgagaaagttcttctgtttcatttggttggtatgtctgaccttctctgtcggtgcacaagaggttttgagcctcgatagttgccgtgcattggccattgccaataacaaagaactactgataagccaggagaaaattaactctgcacattatcagagaaaagcggcgtttaccaactaccttcccgatatttccgccaccggtggatatatgcgtacccaaaaagagatttcactattgagcgatgcacagaaaggtgcattaggttcaatgggaactcaggtaagcggtgccatgcaaaatggtatacaaggtatactgacacagcaccctgagttgacacaaaatccgcaattcatggcgttgatccaggcgttaggaagtgtggacgttgcctctccgctcaacggcctcggaaattccctcgttgacgcatttcgtacagatacccgcaacatgtatgccggcgccctgacgctgacacaacctttatatatgggcggcaaaatccgtgcttacaacaaaatcaccaaatatgcagaagaactggcacgtcagcaacatgacagtggtctgcaagatgtaatacttagtaccgaccaggcttactggcaggtagtatcactagccagtaaaaagaagttagccgaagggtacctcaagttactgcaaaagttggaaagcgatgtggacaagatgatcgccgaaggtgttgccaccaaagcggacggtctatctgtaaaggtaagagtgaacgaagcggaaatgacactgactaaagtcgaagatggcttgagcctgtccagaatgttattatgccagttatgcggtttggacttatcctctcctatcacgctgaaagatgaacgggaagatgatctctctcctgatccggtagcagcgaatggaattgatctgaatacggtttatgctacacggccggaagtacgcagtctggaacttgccacagaaatctacaagcagaaggtaaacgtcactcgctccgaatatctgccgtcactggctctgatgggaaactatatgatgaccaacccctccgttttcaatggtttcgaaaagaagttcaaaggtatgtggaatgtgggtgtggtattacaagttcctatctggcattggggtgaaggcatgtacaaggtgaaggcagccaaagcggaagcccgtatcgcccaataccaattggacgatgctaaagaaaagatagaacttcaagtcaaccagtccgtcttcaaggttaatgaagccgctaaaaagctgattatggcagaaaagaatctggaaaaagcagatgaaaaccttcgatatgccacactcggatttgaagaaggcgtgatagctgccagcaacgtactcgaagcacacacagcctggctttcagcccagtccgaaaagatagatgcacaaattgatgtgaaattgactgacatctatctgaagaaggcgttgggagaattaaaaattaataattaaaaattaaaagggtgagaattcataattcataattcataattcataattacctaaatggataccaaatcacaaaacagtaacatgctattagcgtttttaacgctgacaggcgtcattgccattgtagccgtagtaggtttcttcatgttgcgtaaaggaccggaaatcgtacagggtcaggcagaggtcacagaataccgggtatcgagtaaagtaccgggacgtattctggaattccgtgtgaaagagggacaaagcgtgcaggccggagatacactcgccatactggaagctccggatgtattagctaaactggaacaggctcgtgcggcggaagccgctgctcaggcacagaatgagaaagcactgaaaggcgcccgtcacgaacaggtacaggctgcctttgagatgtggcaaaaagctaaagcaggacttgaaatagccgagaaatcttataaacgtgtgaagaatcttgctgatcagggcgtgatgtcagcccaaaagctggatgaggtgactgcacagcgagacgctgccgtcgcaacagaaaaagccgccaaagctcaatacgacatggcaaagaacggtgcggaacgagaagataaagccgctgccgccgccttggtagaccgtgccaaaggagctgttgcagaagtagaatcttatatcaaagaaacttatcttatagcccaaacagccggagaagtttcggaaatcttccccaaagtaggtgaattggtaggaaccggtgcaccgatcatgaacatagccatactggatgatatgtgggtaacattcaatgtccgggaagatttgctgcaaggtctgacaatgggaactgaattcgaagctttcgttccggcattggacaaaaatatccgcctgaaagtgaactacatgaaggatcttggtacttatgcagcctggaaggctacgaaaacaaccgggcaatttgatttgaagacttttgaggtaaaagctttgccacaggagaaagtggaaggcttgcgtcccggaatgtcggtgatactgaaaaagtaattaacggttagtgattagtgataagtaaaggaatggcacgagataagaaatatatagctttgtggaacgttatgaaacgggaaggccgacggctcgtttcccgtccgctgtacctgttctgcatggtgatagcgccgttgttctgctacgtgttcttcacaacactgatggattcggggttaccggtcaatatgcctgtaggggtggtggatcaggatatgacatccacttcgcgccaattgatgcgaaacctggatgcatttgagcagaccgccatcgtagcccattatcctactatcaacgaagcacgtgccgccatgcagaaaggagaaatctacggattctactacattccgaaaggtaccaccgccaaggcgcaatctcaacgacagcctaccgtatcgttctataccaacaatacgttgcttatcgctggttctctgctctacaaagatatgaagatgatgagcgagttggcatcgggagccgccgcacgcaccagtttgtatgctaaaggtgctacggaagaccaggctatggcattcctgcaacccatcgtcatcgatacacatccgctgaacaatccgtggctgaattactccgtatatctgtgtaacacatttgcaccgggtgtattgatgctgcttatatttatgataacggtctactccatcggtgtggaaataaaagaccgtaccgcacgcgaatggctgcgcatgggaaataattccatctacatctcccttgccggaaagctattgccgcatacggctattttcttcctgatgggtatattgtataacgtatatctatatggcttcctgcacttcccctgcaacagtggcatcatgccgatgctgcttgccac

SEQ ID NO: 6389 - DNA, 71197 bp, Unknown
  gut microbiota DNA sequence
cggatggtgtagccatttgcactaaagggtgtagccatccgaggcaaagggtgtagccattttttatatcccccacaagaggtttctggaggggtaatagggagatgtcggtgaaatattctccgttttttcggaatatcggaaaacgaaaaaaagaacaataattcttccttcgtaccttccttgtatcttcttcgtaccctcttcgtaccaagttcgctattttgttctctctataggagcgaaggagatgcgaatagggtggatgggagaagagaaatggaacaaagcggtatgatatggagaaaggtcttttgaataaaacttggaaaattatatgaaaattacaatttagtgtatacatagttcttatatttgcccaggcaaaacatctaatatataatgtatatgaaaaatgaaacaacgaagttttctgtatcgagcgcaatcttggttattagtaatcgtataaagcattgggcattaatcatatttccactttgcttcttctttatttcttgtaatgggagcaagaaacaatctgcgggacaagaggttaatgaagtgaagttgcagacggaagatattctgttccccgtttcggaggttttgaatttgaagtcttattatttgtcttcttattttcataatgactctctgagtttgatttatggatacaattataaatctcatgctttggattgtatggatttgaagcgtcatcagatatcgcaaatattgctttcaagtcaggggaaatcagctgtaatgcgttctgtagctgggctttttatacaaactccggactctatctggatttatgatgatacgcaacggatactcctgataaatggtgatgggaaacttttgaaaacagtagatttacgtccggaactgaaagataatgaacaaattctgataaacactaatcatgcaatatctacagcgcggctgttttatgacggaggacgtcattcattgctttatggaataaaggatttctctacatcgccggttacctttaaagttcgggaaacttttctgaacagtatgactccgtctgtcgactatttattgcagccatcggtggctgttacgaatgtgagtggcagagattatggcaatatgagtgatttgaatataacctttacagcggaaaaggtcctttataactatccggtcgagtctcatgtatatgttatggatcgtaagagtggagagcaaaaagtttttgaagcagatagtcgtttcacgaaaaatgtagtggaaaaatgcgaatcgggtaactacgagcaatgggaacggcataatattgagaatcctcatttctatgatcttatgtatcttccgcaaacgggaatgtatgcccgtttacatcttggaggaatagaatttgatgctacgagagatatactgaatttgatggatgatcgtgatctttatctgacgttttttgataaagactttgtggttgtgggagaggctaagttaccgtctcatcgatataactatttcacaggatggagagaaaccaatgacggagttgccctttttgttgataattcgctggatgagaatgagaaaacagaggaattggtactggatatagtgcggctgcaagcagactgaatctatttgtccgattagttttgagccggataacgttacgcctaatcacgcaacgttatcactgtaatttccggccatgccccgaagcggaacggtagtcctacataaccgattcctatattgacatataatccccgatctccttcagtgtacatccctccccattcgggataaatcagcgaagcaagtgaatgaccgaacatgatagcctgcatcgcatgagtatgtccggcaagcatcagctcgatgtctgtatccggcagtacttcccggcgccagtgcgtaggattatggcttaacagaatgcggaacattccatctgtacctttagtcgcttttttcaggtcggcaaattgtgagaaaggaggttcaccatcattctctacaccgataagtgcgatgctgtccccctcatgatgtaatatatcatactcattgttcagtagtttccatcccattgtcttttgcatccgaaccagattgtcaatgttattaacctgttctttcaggtttttccaatgatagtaacttccgtagtcatggttacccagaatggaatatactccatctttggcatgcaattgcgccagaatgtcctgaaatccttccagttcgcaacttctttggttcaccaggtcaccggtaaatactatcagatcgggtttctgggcgtttacgagttctaccagttcattgatgggtttctcattgtctatccagctgccgatatgtatatccgatagttgcacgatacggtaaccgtcaaatgctttcggaagattggggtggtgaaattcgatatccttcacttcaaatttgctgatacccaccagggtgccataaagtatattaaagaaactgactacacccaatactaaccctacagccgtaaacggtgaacggggccagcgcagcaaataatgaaaaggtagccccaccaacgagcatatcataaagatggtcttggggatggcaaacaggaaaatgcagatagccagtcttccgatggcttgtgcatggtgagccatcgcattttcgcctatgccctgcatcaacagaaagtagcctgctatcaataaaagagtggggatccagtgcgcaatgcgcagccagatgtttttggttttccgaacaatgtacataaagtagatgtacaaatcggggatcaataaaaaaaggataaggagtagggttattctgtgcatatatcttctaattcttctatattcttcttgatgtcgttaaggaatttgtaagctacttttttgtatagcagatagatgatggcaatgtcacacaacacaaagaatgcaatcaaagtggcctgaacgccgaaagaagctttgtaatagcccatcacccaataattgagtacattgaaaacaatcacccatacggaaatagcgataatttcatatctcgtccatcggcggaaacttgccatacgtttgcttactatggctacaggcatttcatctattttcgtgtttcttatccagcgatagtttttgtgatcccaccagatccccagcagaatactgatgccgacaaatattacgagtgtattaatcttgggttgccattcttcgttgatctgaaagatggacggcagtaaccaaataaccagaaggagagccagtcccacgactccaatacctatggagaagcgttgccaacccgtaaggcgccctatgcttttgcgtgcgtttgccttgtattcggcaatcatgcccgcaatctgcttttcatcggcaatcggttctttcttcaattgctcgtccagcgcgttccaagatttctttagttcatccaattccatattattcctccttgttcatttttctaagtttgtctttgatccggctgattttggtagcgacgtttgttaccgtcaggccggtgatttcagcaatttcctcgtagcttttttcttccagataaagcaaaataatagacttctccaacgggcccagacggttaatcatccggtagagctgctttagcatggcttgtgtttcgtccgattcttccattcggtcggagtcctggcttagagtcatgatttcgggaatgttcttttctttgcgaataaagctaatacaagtattcagtgcgatgcggtaaatccatgtggatactttgcactctctccggaatttggggtaggctctccacaaattgagcacgacgtcctgatacaggtcgttaagagtagcattcggcgtcgtgtacagatagcacactttatatatgacgcgttcatactcccgtatcacggacaagaactcctgttctacattctccatcgtctgtttcttgcttcttgaattgcttttgcactgttagtcgcaaaggtaattagaaaatcacaagggtgtgattagattttaatcatttagtattccttttaggctatttggctgttgaaattgcttttttggctaaatattataaaaaaagggtttgattattctaaaggagtgcattatctttgcaaggatactattaacaacaatataagagaacgatgatgaaatattttatgggagtgtgctgtgcaatgctgctgggcttgtcggcatgtggtgatattgatagcccggagtttccgccttctgaggttaagagtgaagtaaaagaggcggtggatttttcatatactgaactggaaaatttagaatctactcatggtatgcatcttaattaccataatagagtgtatgtgttgtctgctgatatagtgctggattctccttatcagtcattcgggcatattgaatactttatatctcctgataaagacaatttgacggacaaggctttgttgtcatatagcttcgattatgacaatgtatatagtgtctatcccgagtattattatggttggcaaagtactacagctatttggtattttgatcattctgattggcaggccggtacctattattatcgtgcggttgcttatagtaacagttggggtagtggtcccggtatccttcatgactgtttgcagcaagatggtaggcaagctactttggatgatcttaagtcctttacgattcctacgaaataccttccttatgcagatttaggatatgctaatgagaatgaagtatcagtttactttggggtggatggatttgaaggaagaattaaagaggttggagtttgctattccgatgtaaatcaactccctaccattgatgataaaaagtatgtttctgagtcggctgacggtatgcattttattggtcctcttctacagaaggcttattatatgcgtccttttgtagtaacgaaagataatgatacaatctatggatatgttcaacggattcaatactcaagataagcaaagatgaaaaaactgattataaccatgctcatgacgattgccggactgacaaccctcatggcacagcagacgcacgatataaaaggtgtggtaacagacaagagaaatgaaccgatagtaggtgctttggtcaccgcagaaggtaccgacatcagttctataaccgatatcgacggtaaattcctgttacgggacgtacctgttgatgctaagaaagtgatcgtagagtcaatcggtatggagactaccgatgcaaagattgatcggccgataatgatggctgctcgaccgaagcgtctctcgctggtagtggaagccggaatggactggagccgttatacggcagagggctctgatagcaaaaacggttatcactttggtgtaggtatggaagtgcgtatgtctaagcgttgggcatttcgtccgatggtgcaactggccaatcggggcgcggaatataatttcacggaaggatcatactcttataaagagacctggaatccgttgatgctggatgtaccgtttaattttctggtacgttatgacttggctcgtaatatgagtttggtactttctttcggcccggtattttcatggggacttagcggtaaagtgaaagtttcagaaacgggtaaggaggatgctgaatatgacatttatagtaaagattatgagagtagctggggaaattataagcatgcattgctgcatccgctcgggttcggtatgacttatggcataggtgtggaatataagaagcttatgataaacgtttccggtaagaatatgggaattattgcggaggatgaaggaccgggagatgtgaaggaacataactttgtgctgggtgccagtgtttcataccgtttctgatcctacttatcaaatgttgaatttataaagaatactatatataatgaaacgaataattatattagcaattataggcctctgcatatcaggagcatctatggcgcagggacaaaaactgaaaggcagacttattgataaggatcattatccggtgaagaatgccaaagtaaccgtaaaaggcacaaatttgagtactacttctgataaggatggtaattttttcattgaagatgtaccgttgtaccttgattctattcaggtggagaaaggccggaaagacatcaccgttaacacacctatgaagatttcgatggggcggttggttatagataaacgtttttcctggtttgtgaaggcaggtgtaggtgttagtcgctttttgggtgctgacgagacgaaagataaagtgtcttttcatgtcgggggaggtgtagacattaaaatggccaagcattggtctttccagccggcagcttacattgcgcaccgtgaaatggagggcaatacttggtattatagtgatgaaactaccaactataaattgacgtatctggaaattcctttgctgtttgcttataagttccgtttaagttcctcgatgaactgggtaattgctgccggcccttatgtagattgcggtattaatggggatattcgtgatgtgagaaaactttataattccagcccggatggctatggctctcagtatacatacgaaacagaagaatctgaagcttttggtaaacgcttcaccggtggagcagcttatagtatgggggtagaaggacgccatttcacattcggtctaaccggacgtacaggttggacttcatggcgtaggagtgaaggatttacgaatctggagtttgaaataggatataaattctaaatagaacacttgcggttgcatcagcttacacttgcggctgcgttgtcttacacttgtataagtgtgagctgacgcagccgcaagcatataataacgcaactataagctgatgttattctttttaatagggagaaagttagagattggccgccaaaaactttcttacttcattaattggcattcttctgcgtcgtgcataatcttccaattgatcatttccaatcttgcctactgcaaaatatcgtgcggcaggatgtgccagcattaatccgcaaacagtggcgtgtggacgcatagcaccgttttctgtaagcgtaatgcctatttgctccatatgaagcaattcattcaacagaaagttgacagactgatcgggcagagaagggtaaccgacggcaggacgtatgccttggaatttttcctttaacaactcggggatggaaagattctcatcctttgcgtacccccaggcaactttacgcacgtattcatgcatcttttcggtagcggcttcagcaagtcggtcggcaagtgtctgtaccaacatacgtttgtagggatcctcctcatagagaagttcaacttctccgtcacaggaagctgcaaaaatacctaccgtatcaggtgtaccggaagcaagagggcggacaaaatcgctgaggcagagaaaaggactaccatccggatgggggatctgttggcggagtaaaggaaagcgtgtgccgtccagcagtaaattatccccatcggcattagccttgcaaagacggaaaatggtgtgtacatggtaagtctcatctagctggttaagcattcggttagcttctttaagtagctgcattgcctcagcggctttggcacgatcctcttcagaaaaagtcgtaagccaggaagcacggcaggcatcgcagccatggatatccgcaatagtggcgaagcggggctgaaatccccacgcatgaaagaagtatatccagttgatgtatggagtaacgtcatgaatagcgtacgtcaacaccttatccgcagggctgttcatcatttatctttgtaatcgaatctcaattcttcgccacggtaagtatcatctacttgtccgtcactgtatatcaggtgtccgttagcaaatgttctttctactttccagcggaaagaattaccttccagcgggctccatccgcacttgctgagaatattctcagaattgacttcccaacggtctccgtggctgacaagtacaaggtcggccttatagccttcgcggacataaccgcgatcacagataccatatatctgggcaggggcatggcacattttctctacaatggtttcaatagagaaaattcctttttctgccagttcgagcatgctgaccagagagaattgaatcatcggcatacctgacatggcttttagtgcgccaccttccttttcactaagcaggtggggcgcatgatcggtagcaatcacatcaatcacgccggtattgacggcatttcgtaaagcatcacgatcagcttgtttctttatggaaggattgcacttgatacgtgttcccagttctttataatcttgttggcggtataacagatgtgcaacacaggcttcggctgtaatgtgcttttcttccagcggtatatcactgaacaattgcagttctttggctgtagagacgtgaagcacatgcagacgtgcacccgctaagcttgccatgcgtaccgcaagttctgttgaggcgtagcaggcggctgaagaacgtatgttggggtgcttgctgataggaacttccggtgcatcactgaacatcttcttatagtattcggtgttttttttgatgatttcctggctttcgcaatgagtagcaatcaacatatctgttccattgaatatattgagcagactgtttgttttgtctaccagcatatttccggtactggaacccatgaaaagtttgatgccacatatacgatgtttgtccagctggttgaattccgtatagttattattagtggctccgaagtagcaagagtggttaacaatacacttctcattcagcaaatcaaacttttgttcgagcgcactaagggtggtagtcagagggttggtgttcggcatatccatgatggaagtgacaccacctgcggctgctgcacgactttcggtgagaatatccgctttgtgggttaatcccggatcgcggaagtgtacatggtcgtcgataacacccggcaacaggcaacagccggtagcgtctatggtttcatcacaagggacagagagctttttcccataggtaagtacttcggcaatccggtcgccttcaatcactacggaaccttgtacagagcgtccctcgttcactattgttgcgttatgtatcagtgttcttttcatcttcactaatcatttatcattaatcactaattgttttttactgcttgcgggtatttatggaaccaactatgcattttcagtttgataacaccaaaaacggcctctccaaagatactgctgttcatttttgaggtacccagttcccggttgataaagataaccggtacttccacaatcttgaaaccgcatttgtaagcagtgaatttcatttcaatctggaaggcataacctttgaagcggataccatccagatcgattgtctgcaatacctcacgacgatagcacttaaagccggcggtcgtatcatgtatcggcagtccggtgatgaggcgtacatacttggaggcaaaataggacatcaatacccgtcccataggccaattcactacattgacgccactgacgtagcgtgaaccgatagagacatcggcaccttcttcggcgcaggctttgtacaggcgtggcaggtcagcagggttgtggctgaaatcggcatccatttcgaagatgtattcataattatgttccagcgaccatttgaagcctgcgatataagcagtacccagtcccagtttgcctttgcgctctatcatgaacaaacgttcgggaaactcttgctgaagggtcttgactatgttggcagtgccatcaggcgagccatcttctataatcaggatatggaatactttttccagggcgaaaacggcacggatgatgttctcgatgttttcccgttcgttgtatgtaggaatgataacgatgctgtccgatgtctgcatattcataaaaggaggttctaaattgggaacaaagttaagtgttttctatcacatacgaataaaactaaggattatttagtaattttgcgcccgttatgatgactattaccgagctacaacaacgatatgccgcccatcccaatgtggaagctatgagtggtttactgaagaatccgtctgtccgcactcttttctgtggtggactatgtgcttctgctgcttcactgttttcgtccgtgctggtgcagcgtggagaatttccttttgtttttattctgggcgatctggaagaggcgggatatttctaccatgatcttacgcaggtgctggggacagataaagtcttgtttttcccttcttcatttcgtagggcaataaaatacggacagaaagatgctgcgaatgaaatacttcgtacagaagtgttgagtcgcttgcagaaaggtgaagaagggctttgcgtggtgacatatcctgatgcattggccgaaaaggtcgtttcccggaaagaattgggggataaaaccctgaaactgcattcgggggagaatgtggatacgaacttcatcatggaagtattgcgtagctatggcttcgagtatgtagattatgtgtatgaaccgggacaatatgccgtacgtggtagcattatcgatgtgttttctttttcttccgagtttccgtaccgtattgacttcttcggggatgaagtggaaagtatccgcacgtttgaggtggagacacagctttccaaagaaaagaaagatagcattgtaattgtccccgatttaagccgcagtctggagcagggtggtgcgagtggcatggtttcgtttctggattttctgtcggcggataccgtactggcaatgcgtgatttactttggttgcgtgagcgcattcaaacagtgcatgatgaaacacttactccacaggcaattgctgcccgcgaagcagaagaaagtggctgtataaccttagatggcaagctgattgacggaagcgagtttacactccgtgcattggatttccgtcgtatggaatttggtaataaaccgacaggtacaccggatgctacgattacttttgatacgtctgcacagcctattttccgcaagaactttgatatggtggctgagagtttcaaagaatatatggagaagggatatgcgttgtacatctgtagcgacagcatgaaacaaactgaccgtattcgtgccatctttgaagacaggggggatcagattgcatttacggccgtggaacgtacgttgcatgaagggtttgccgataatgccttgcggctttgtatctttacggatcatcaattattcgaccgttttcataaatataatctgaagagtgataaagcacgtagcggtaaggtggctctaagcttgaaagagctgaaccagtttactccgggagattatgtcgtacataccgatcatggagtagggcgtttttcagggctggtgcgtattcctaacggagatacgacacaagaagtgatgaaactggtctatcagaatgaagacgtggtgtttgtttccattcattcattgcataaagtatctaagtataaaggtaaggatggtgaagctcctcgcctgaataagttaggtaccggtgcctgggaaaaactgaaagagcgcaccaaaactaagattaaggatattgcacgcgatcttatcaggttatattctcagcgtcgggaggaaaaaggattccagtttagtgtggacagtttcctgcagcgggagttggaagcatcgtttatctatgaagatacgcctgatcagagtaaggctacggcggatgtaaaagcagatatggaaagtaatcgcccgatggaccgtttggtttgtggagacgttggtttcggtaaaacggaagtggcagtccgtgcagcttttaaggcagtggcggataataagcaggtggctgttctggtacctacgacagtgctggcttaccagcattttcagacgttcaaggatcgtttgaaagatttgccttgcaaggtggaatatttaagccgtgctcgcacggcagcgcaggcaaaagctgttataaaaggtttggctgccggagatgtgaatatactgatcggtacacatcgtattttaggtaaagatatacaattcaaggacttgggattactgattattgatgaagagcagaaattcggggtatctgtaaaagagaaactgcgccagctgaaagtgaatgtagataccttgactatgacggctacacctattccccgcacattgcaattctcattgataggggcacgtgacctgagtgtgatacagacacctccgcccaaccgttatcctattcagactgaagtgcatacctttaacgaggaagtgattgctgatgccatcaactttgaaatgagtcgtaacggacaggtgttccttgtaaataaccgtatttccaatttgcccgaattgaaagcaatgattgagcggcacattccggattgcagaatagctatcggacatgggcagatggaaccgacagaactggaaaagataatttttggctttgtcaattatgactatgatgtattgatagctactaccattatagaaagtggtattgatattccaaatgctaatactattattatcaatcaggcacagaactttggtttaagtgatcttcaccagatgcgcggccgcgtgggaagaagcaataagaaagctttctgttatttgctggcacctcctctttcttctttgactcctgaggcgagacgtcgtttgcaggctattgagaacttcagcgatttgggtagtggaattcatattgccatgcaggacctcgatattcgtggtgcaggcaatatgttgggggcagaacaaagtggtttcattgctgatcttggttatgaaacttatcagaagatattaacggaagctgttcacgagttgaagactgatgagtttgccgatctctatgctgaagagttgaaagccgaaggtggtgtcattagtggcgaacaatttgttgatgaatgtcaggtagaaagtgatctggaactgttgcttcccgctacatacgtcacgggtagtagtgagcgtatgttactttaccgcgagttggatagtctgacattggataaagatgtagaggctttccgtaaccggcttatcgaccgttttggtcctgttccgtcagaaacggaagagttactgcgtattgtgccgttgcgtcgtcttgctgcccgccttggtgcggaaaaggtttttcttaaaggtgggcgtatgtcgctattctttatttccaatccggaaagtccctattatcagagtcaggcattcggtaaagttattgcatacatgatgaagtatactcgtcgctgcgatttgcgcgaacagaatactcgtcgtagtatgctggtgaaggatgtgaagaatgtggaaacggcagttggtgttttgcaggagattgtggcgatgcaggtggaagagggatagttttctgatagctatcgtccaaattgtatcgcaaatcccagattaaagaatgtaacattgtttttaaaccaactgtggtctattccgtcatcataatcgtatggattggaaagccgtgcgtcggggtttgcaaaccagtcggctgtgagtatatctgcacgaaacactcctgataatttcttggtaatgtagaactcgtaacccatgccgaatgacagtccgcaatagcctctctgaaaagatattccgttccgttcacctcgttggtaagtacgttcctgatagttcatgtagcctatgccgaatgaaagaaatgctccttgatttccctcactccacaagtagcggtaagtaatattggggtgtatataatggaggtgcattttatccggcagacgagctacccgtaagtaatcatactgaagccctagggcaaagttgggcatgaagtagtagcgcccttctgtcatcaggttgtatcccgcacggtcgccatttttactgaaaaagtcattacggtttccttctacacgcggcaatgttactccgccacccagtgagatactgaagttttgcggtaggttatcttgtgcttgcaaggtcgtgcttgcataactcaaaaagatagtgaagagaataaagagtcgtttcatcattggtagattaatatttatcgttttccatatagtttgtctatcaaatcaatccgtccgatacggcgtagttcgttgatgatgttctttcgttcttccggtttataccagaaaaagaattggcgttgcgctaacttttcacgtggtgttttagcactgaatacaggctccaatgtgtatggatggtagccggtataccaagcttcagtggctacggtcataggggtaggggtaaagtcttgcacctgttccagatgaaaatcaaggcgtttggtgataacagccagttctgccatgtcctcttccttacagccgggatgactggaaatgaaataaggaatcagctgttgtcgcaatccttcttcgcggttgatacgatcgaatattttcttgaattcctggaactgcccgaacgagggtttgcgcatgatactcaatacccggtcactggtatgttccggagctactttaagacgaccgctgacgtggcgggctattaactcgcgggtatattcagtagtgcttttattagttgccggatctttgctttgatgcaagagtaagtcgtagcgtacaccactaccgatgaaactctttttgataccgggtaaagtatctaccgcatgataaatatccagtaaaggccgatggtcggtattcaggttcggacaaactttgggatggatacatgaggggcgtttgcatttcttgcaaatgttctcatccctccctttcatccggtacatattggcagatggaccgccaaggtcactcagataccctttaaaatcggggagttccattagtgcctttacttctttaagaatgctttctttactgcggcttacaataaactttccttgatgtgccgagatcgtgcaaaatgcacaaccaccgaaacacccacgatggatatttaccgaaaacttaatcatatcgtatgccggaattcgcttgcctttgtatttgggatgaggcagacgggtgtagggcaaatcgtacgaatgatcgagttcagcttccgtcaggggtgggtaaggaggattgacaacaacagtcataccatctacttcctgtgtaatacgggaagcagtatatttattactctcttcttcaatgtggcggaaattggcagcctgcttcttcttgtctttcagacattcagcatgagaaaagagacggatatctccttcttcgctgatgaaatccgttgttttgcataggtaagcaatttgcggaatggtatttagtgatagcctcttatcattgaatcttcttatcagttccaccaccggtttttctcccattccgtaaatcaacaagtcagcaccactttctacgagaatgcttttcataagcttatcctgccaataatcgtaatgcgtcacgcgacgcatgcttgcttcgatacctcccaatacgacgggaacatcgggatataatttcttcagaatttgggtgtaaacaattgaagggtaatccggacgcatatccggacgtgcatccggtgtgtaggcatcgtcactacgtaaacgcttgttggcagtgtatttgtttaccatagagtccatacatccgggactgataccaaagaacaggcggggacgtcctaacttcttaaagtcgcgtaagtcatcccgccaattgggttgaggtataatcgccacgcgcaaaccttctgcttcgaggatacgtccaataacagcagccccgaaagaagggtggtctacataggcgtcaccactgaacaggataacgtccagttcgtcccatccgcgcaactccacttcttttttcgttgtgggcaaccaatcagtcagtcgatattctttcatgccgcaaagatacgcataaaatgaggttcagccagaaaatgcgtagttaaattgctgttgatgatgcttgcgactcttccccaagtccggggcaaaacggcttcgtgagacgatgaaatccatctcgtgagatggaggctaacaaaaatatcaaagaatcgtctgttatatccttatattttatacttttgtacgcagatggcacaagcaaaatataaatcaatctatatattatggaaatacctccgtatgaagaatcaaaagatgtggtacaacgcaaactcgatcagacaactatgattttgcagaatatcaatgcttattttttactgatagataaagattttatagtctgcgataccaattactattccttgaataagcttccagctcctgaggttggtatgacacaaaaggtcggtgacctgttgcattgccggaatgctgccgaagccggcgaatgtggtatgcatcagcagtgtaaactttgtggtatccgcgcggctattggaagagcttttcataagaaagagagtttccaaaaagtaaatgcttctatgaatcttctgaatgacaaagaagacaaagtgattccttgtgatgtttcagtatcgggtgcttatgttgttattaacggggaagatcatatggtattgacggtttatgatgtgacggaactacagaatgttcaaaggttgctgaatattgagagaaagaactcgatatctgcagagagattaaaatccacttttattgcgaatataagtcatgaagtccgcacaccattgaatgcgattgtcggcttttcgggattaatagctaccgcttctgatgaagaggaaaagaaattgtatatggatattatttcagagaacaatgagcgtttgttacgtttgataaatgatatctttgatctttcgcagatagaagccggaactttgaattttgagtattctgaatttgatgccaatgacttgttaagagagttggaaggtatgtttaaggtgaaactattcaataatccttcagttgatttgatttgtgaagactcagtgcaatctattatcatgtattctgaacgccaacgcatcattcaggtgatggcaaacctgattcataatgcgatcaagtttaccaaatcaggtgagatacgctttagttgccgtatggagggaacggatgaggtttacttttatgtatctgatactggaattggaattccgaaagaagaacagcaagaaatattttccagtttcaaaaagttggatcgggaagtaccgggaacaggtctggggttgacactttcacaaactattatccaaaatttgggaggtagggctggtttggaatctgaggtcaataaaggttctacattttggtttgtagtacccttgattatggatccgtataattgaatgagagaaaataatataaaacgaatcctgttagaagctttcttatgctgaaacaggattcgtttttttatttcttatttccggatacgatcatgaatgatgatttgcaatttactgcacaatttatcttttggtgaattgtaccgtcatttgttcgccatcgtaaatctcacgaaagccgatttgttgttctgcgagatattcttttaaatcattgaaggcagcagtatcattcataataatttccagtttctcacccagtgtagcttcgcacatggctttgacggccgggatgagaggactgtaaagtttttgaccgcacgtgtcgattgttttcattttattattcctcttctatgggttcctgctttgaaaaccattccagatagagcttaatcagttgctgtaatccgaaggctttcatattgttgtggtatatcacgtcgatgcagaggtcgagcaagtctttgctgtcttcttcttgtgatgcgatgagggagcggatattcagtctcagcttttccagaacagattcgtctacaataccattactgtcgataagatgacggaaaagtccgtatttctcaatggttgccaggttctcttcggatatctctaaactgcgggtaccgctggggtttgcttgtatagtatacatggtgttttatatttttaaaggtttatactctgagagcaaagataagcgttatttttaattaggcgcattgttttttatttttttgcttgaaagaattgcaggatagaagccatgacagcgttgcgatccgtttcctgttcaatactttctaatgggaaccccataacgaaggtacggtagttgccctgataggcaatggcagcactttgatttccggaagtataggtaagcactggaaaagcagtatctgtcggtagaatacattcgggagctgttacgggataagcgtactcattgggtaggcgggggatactgaatgtacgtcccagaccattaatatttcctgagcgattatcggtgatggattgtccgtaggcatatttcaggatgttttgtgtgaactcccggtctccctgcgaaccgttcatatcgctgccaagataggaaccgctcacaagcagatttccaccggattggcaataagcggtcagtgctcgctgcatggcagaggaaaaggttttgtaatatgcattgcttgccggattgctttggcggtcttctttttccagtccgaggatatagtctacgatatcgtaagcttccaatggaatacgtccgctttctacggcttcatcactgcatgacacgaaactataatctccggatgcctgtatcgcctttccatgtatgaacggataatcgaagctatttccggcaattcgcattccttcccattcgctaccgctacgtcccagttccttcccggtctgtttgcgggagaattctgtttgagcaccacaaagtgagatgtcatataaataaggtacacccgggtctttcgttaaatcgaatccggcttcagtgggggtatcaatgacggctggcccactgaggcggtcgaaaccattgacaatcaaaatacgtcctttttctctttttgctttataagctgcaagaatctcggatggaaaactttctccaccccggttggctgcggttactttaaaggaatagacaataccgggttctatctttacggtataagagggactgctgacacgtacgccattgtcaaagcctccacgaccgatgcgggtatatacgatgtattcgcgcggtttggctgttggttccaacaggtcttcttcaccattccaggaaagttgcagtgtgttctttttattaccgaagcgaatagcaaagttacttacaggaagaggttgtactacataatctttgccatgctgattgcaaaggtattgcagaatagctttataaatagagcgtcctacagtgaatttaaagttgggatcatgcccgaggcgcatatcggcaaagttttggtgcgaaagtaattcgataatagtggaaggaacggcgggcagtcgcgtttcactgtaattacgattccacatgctgcgacgagtccaatctatggcataattggaacggatatcccgctggagttgggtaagcagaatgtcggaaaggtctcgggaggcatagcggtctgttccggctccgagtactccgttattgaaatcggtggtatatatgccgagcgtacctatgattttatcttctttgctggcacccgcatcgctgtgcaatgccattgagagttcaaaaggtactcctaaacctttgtctttgggattgaatatcgaaccgccggacagatagttaatcattctggaacgtacattaatgtcatcagacatgtcatctttaccttcacgtccgccataaaccgaataaggcatgccggcccattgtgcagaataacgggcaccttccagatagcgaggcattccactggtttctccaccgcgttctatattgcccattccaccgccaaagcgtacggcatcagcgcagactacacctttctgtttgctttcattgctaagtaccaccatgccataatcgttctttcccttatcaaaagaaaaagtaccgagatacacccacgtaccaccacctatctgctgatttactttgaactcagtggttcctccattatggaaaacaatatatttggcgtcacttacgctattaggcaaagtttgataagagacgtatacagcataatcccctgtttccggaatatcgggtatccactcggcaaaggctttatcttttttcttttcggtttgggcatagcgggctgtaccggtaatgaaaggattttcgttatcttgatatactctcttctgttgggcaaaccctggttggcttgtctgttgccaacgtgcttttcggcttttgacttctaaatagagggaaccttgtccaccatatccgctcaggtttccgtcattgtcgacgattacttcttgtttttgcgtatcccgttcacggggggtgaatacgttggctccggcattttccagcatgggtatgaggtagggtaaaatgaatgattgtgtgaactggtcttccgttgtacaaaacaggcgcggacgttgccatccccatttatttttgttgttgatataatattttccatgactttgccaaagggcgatatgtcttctttccaatccacgggtaatttcgtatggacgtgagatacgggatacccacggactatctctgtattccaacttattaaacagacgtgtcttgtctttcttctctttccgataaagatttggaatgaggtcttcaatgcttcgtccgtttgcaaaaagggttattttgaaataactcaccggtcccggcaagatttgtttcaaatgtcgataaatggcatctactgttgctggtcgtaagggctggtaggcaaagcgttcgtttgtatagatgagcaacctttttttccggaagtcaatacggaaactgtccagcttgcaagtccctatatttaccgtattggtggtatattctttaaagaaagcttgtagacgttcttctacattttgtttgatttcttgtgccggaagaaatgtcccatacaacaaaagtaatatgctgattagaattatttttttcatacttatggaatattcaagtttgtaatgtctgcttctatgtggaagtagtgcatacaaaagtacataaaagaagattgcattgtttattgaattgctctctttttgatatattttgcaaatctgtatttcagaaaatgttcccgatgatttagttgtaaattattttatttgataaagattcgatatttgcaatgttgttgaattcatacataatacttatgaaaaaaatacggcattatctggttgaaaacgcgcaaacagaaatgtatcctctttttttatccttacatttttcatgaaatcgtttccgatgatttatccctgtttctttgaacaacctgcttcaaatcattagttttgtcttgccagccagtttccggctgtaattgtataatcactaaattactaaaatttatgcagaaaaagacactactccttcaatcggttcacaaattaaaacggatttggatattatgtttgataagtctgtgcattgtaccattaaatgcacaaactctttacaaaattgaaatgcccaattacatcctgcaagcatcaggtacaaacacagagactttgtatatcaaaaacaaggaatctgaaaacctgattcaactcggaaaactaaagttcggatggacacctgccatcacaatggaaaatacatgcagttatgaaatcattgaagtaaacggatatcaggccatccgagccacctacacttttccttcatccgtgccttcttctattacactgaccggaactttcattgcacgtcccgaccgggtagacgtccaatatttggtttctggtgttcctactggatatgtcaccaactggggaggctcacaattccgcttcatactttccaacaaggcaaatacccaaatattgccagaggccaaactcggcttatggcaacgggatgcacaaggaggattgcccattgaagccgcagactccaatttcttcccattcctcataaaagataaaataatatgtttggcctatggtcctgagaataaggctaattccagttggaaggacgactggtacaggcatactgtcttaattgataataaggacggttcctactccacgaagttctccgtactggtggcttcttcggactggccgtacgaagccatctgcgcccaatggaaaggacgtccctttgcattaactctcagcaccgataaatcttacaattggtgggaaaatgcatccggaacattaagtgtaaaggcaaatctggccaacacttcccaagagaagaaaaattgcacactcaaatattggatcagagactatgccggaaattatgttgtcaatgaaagccggtcacttactatagaagccggtcagctacaagtctatcccattgagttcacccctgaaagcgaaagagaaatctactttgtggaggcttccattgaggatgaaactggcaaggagcaagtgttccacagaacgaatctagggctcctacccccacacgagttcacatctactcctgatgaaaacatcatgggactttccgcttactgggctatccctgactcaacagaattgaaacggttgttaaacagaatgggggtcagatgggtaagaaacggaattaacagcagtttcaagaatatcgaagcgatgtatcataacaatatcgactggacaaaaaagtggactgatacagaacgagataaacaaatccgaacctgcttccaagaaatggtgaagaatggaaacaaaatttgggagtttggcaatgaactgaatatgagttctcctgatataggtggagccggtgaaggtatcggaaaagcactattggccgagccttatgtgaaatggttaaaagccatccgcaagatacagtcggaaaaaacggaatggcaaaaaatcaaaattatatctttcggttttgccggtactgacgaagtattcctggaaaaactcgtcacactaggaggttgggaattgctggatggaatagcacttcacccaggaagaggtaactttactcccgattatcctgtaacagttccatggaatgaatttgagaaaccttcttcaggatatcaatactggaattactatggttccatccgtattctcaaaaactttattaaagcacatggaaatgataaagatttatacctgacggaagtctacgcacttgactttccgaaccattcatggaatgatactccccgcgaatcagccgagaacgtggtcctttcatttgcacttgccgctgctgaaggagtaaagaatgcactctattaccagctattcaattctgtatggaataatcaattaggtgtgagagaagacaaccgcgaatatttctttggtctaatcaaccgcgatctaagtttcaagccttccttcatggcctactgcaatatatccgaagcattggatggggcccgtttcaaaggatggattaagttcagtgaaaataatcctttcagcaaaggagtcatgttcgatacgcctaaaggtcctatgagtattatttgggacagaatggaaggcgatatactaccacgtcccaacgggaatagttctccggaaccttggatcagttcatggaatatacaaacggaattgactttgccttgcaaagaagaaagtattacggtattgaatgccatcggacaaaaagaatcaatcccggtgaaagaccataaagctacaataactctaaccggagctcctgttattgtttacggcatggatgcctctcagatacagcttcacggagatgccccgaccggcatagagaacctttatgtcgatgggaaagatatacaaataagtcctaatccggtaaaggaccgactgttcatcaaaggtaattttcagtcggacatcgagcaaatacacctctatatttataatgtaatcgggcagcagattgcaagtcagtcaatttcggtattaggtaatactttggaacacagcataaacatgactggaatcaatgtaggaatctattacgcagtcttcgacataaatggtgccaaacgcataaccaagaagattatcaagcaataaaacagtttatattattcttaagatagaagtgttacccgaagcaatctttttgcttaggtaacacttttatctatcttgctagccatgctccatgtgcctcggtgctatctattgggtaaactggacagaatgtattacggaaacaacaagaccaccgcgcggaatataggttttgatgactcttttatttatgacgagattgccttaaagcttgctaaccgtaaactaccgccggaaatattgttgcacaatgaagagatcaaagtttttgaggcatggactcaaaaggaaggaaaaacaggctattaagctttcacaatggcatgcaactgttccatattgttgaaattgaatatcgggatggaatacattgcattatgagcattatcttttttaaaagtttctaatggtaattttagtgtgccgtcgttcagaaccatattttctactttgtggggcttcatcaaatcttctgaaatttcatagtgtatggaaacatttcgcataggaacctgatcctttcatacgcaaatagagacggttgctttctcttcggtcttgcatagccagtttgcatgatcgggagagacagtaacttttatcagttttagggtggctgtgaaaaaacatatattgtcttcatttctaataaatacaacaatactaatctgataataagtattttattcatttctggtaatatttaaaaagttgtattgaattttacaaccgtgggcggatgttttatttgaatcatttatctgcgaactttacatactgtttccagtcatatagagtgatattatgttttccggaacgaatatggtaggcccgaatataaactcatataccggaggatgtactccggataggaattctcctttagggtcggctcattggccttcggtggtgctggcaatataaaccggacgtggggctaaaagagttatcaactcatacaggtcaaaaggaagcgtgttttctttgccgttgtatttctggaaattacgataaaaataatggggaaactgccagttgacagtctgaacagtctctccgaaagtgtgtcgggaaagggcggcccctccacaactgaaacaattggaaataatcatagcaaatttgggaagactttcagccaacaccgtgaacgtaaaacactgtaagaagaataaaattcctgtaatcatttttagagtattcatggtaaaatgtttatattattcttatttttttaactttatggcatccttgattaatgataaagctgaattcgtgacgcgtctattccgtatatcacgcaaggagcgccagtcagttctatagtcacttggttgttaatagcgggtactatttgtttttgtccgatggcattcagtaaggtaacctcgggagcactgcttggcaaggtcagtttcttttttattctccatgagcttacccaaggttccggaaaaatatctccgttaggatgggtcaggatatttccttctgtcctatcccaaagtacaaccatgcttccctggggagtgtcgaacaaaattcctctgctaagcggatgcttttcgtccatccgtatccagcctttgaatacagctttatccaatacttcagccgtgttgcaaaaggccatcaaagaaggtttgaaactcaaatctctgttgatcatcccaaagaaatactcccggttggtggcatttactcctaaatggtcgaaccatacggagttaaatagctgatagtaaagcgcattctttactccctctgctgctgcaagcacatacgataataataaattctctgccgcttcgcgaggggtatcgttccatgaatgatttggataatcaagtgcgtatatttcggtaaggtacaaatctttgttacctccatgcttttgtatgaaattcttaactatccggatagaaccgtaataattccagtattgatatccggaagtaggcttcttgaaatcttcccaaggagcggctaccgggaaatctggtgtaaaattacctctgcccggatgcaatgcgattccgtccagtaagtcccatcctcccaattctacaattttttccaggaagacttcatctgcccctgctattccgaatgagataatctgaatgttccgccattcaatttgttctttttgaactttgcgtatggctttcagccactctatatatgcttcggctaaacgagctttgccaatgccttcgccggcaccggcaatatccggtgaactcatgttcagttcattgccaaattcccatatcttatttccgttctttacaatctttcggaaaaaggagcgtatcaattcttctcgctctgggtctttccagttcttcttccagtttatgttattgtgaaatgtagcttctgtatttttgaaactgctggtaattccattacgtacccatcggacacccatccggtttaataaacgttttaggttcatggaatcgggaatggcccaataggctgaaagccccataatattttcatcgggtgtggctttaaactcatgcgggggcaatatagccagacttgtccttgaaaaagtttgttcttttccgttttcgtcttcaacggagacttctacaaaataaatttcccgttctgtgtttgctgtaaattcaatagagtgaacttgtacttctcctgtttctaagaagtatttcttggagtcattcactatgtaatttccggcatagtcgcgaatccaatacttaagcatacatttttgtggaactggtgacgtattgatgattttagcttgtacgccgattggagcagttgcgtcctcccaccagttatagactttatcagtggtaagtgtcaaggcaaacggacgtttctgccattttgcactgatagcttcgtaaggccatccataaggaggaaataggattgaaaactgagtgaaatagttgccgtcttcctgacgcgacagaatcgtatgtctgtagtcctcgcttttccaatttgagtcgattttgttatcggctccataagtaaggcaaagcaagcggttttttatcaaaaacgggaatattttggcatcggctgtttctaacggaagtcctcctttagtatcccgctgccatatccccaatttggcttccggaagtttttgagtaccggcgttttcgggcaggcagaaacggaactgacatcctttccagtcagccttatacttttcgggaactcctgaaagcaaatactgtacgtccactcggtcttggtgtactatgaatgtacctgtaagtttcatcgaagtcggtactgatggagaaaaaaaataattgatacgaatggcacttgccccatccacctctattatttcatacttgcaattgttttcgagttcaagttgaggccaccggccaagtttcagctcgccaagttgtaccaatgtctccgattgtttgttttgcaacagcaatcttcctttatctttggatgctattcttaaaatataattggaagattcaatcttataatttgccagcatttctatgggtgttatacagaaattgattattaacaataataaccattttcttttcaattcggcaaatgaaatgttatataaaagcttgtacatatctttattctttgtaaattataaaatttacccctgctacaaatattatgtggcaggggcaatcctttataaaagtggatatccacgattaatctttcatgaactggccttcttcgggtacctgcaagggggttacattattttcacagcctaaataaccgttattttgattaatgtgtccattggtgttggctctgatatctttgttaggaataggccataacatgtgatgaacactcatagtgtattcagcaaatctgttctttacacctttgttgtaaaaattgttatgttggctgatccagtcgaaccagaaattgtatccggcatctttcaagttgttggcacccttcggaccacataagttttccattttgtagatacgtccgtcgaatatctcacaaggtttacctgtcagtgcgtatgtataagcgatacgaactaatgtaatgtgacgatgttcttcgtaataaagttcacgtgcgcgttcattcagaatttcaccgatattgatgtcctgagcagtcaacagatcggcacctgcacgtttgcgtactacattcagcatgttggcagcttcacccagattatctttccaataataacattcggcaagcatcagataaacttcggcactacgcattagatagataggacttgaaccacctttccattgaccgctacctgctgttggatctggaatatatactttgtagtggggccatgaaaaccagcaacgaatggaatcgccacaagacatatttacaggctttacagctttctttccataccagggatcattggcttttttcagggccgggtcattatagatcaagtcttccatacgtctccaactatcgtggttgtatcggccacgtaagtcatttttttccttctctgtccaaatggtatattggaagtagttggtggggcgtacacgggcaatgcctcgtccatatgttttattcacgtcctccacaataccggctgcaacgtctttgctgtcgggagtgacggcgaaacctgtttttccactcggagtttttactacgttattattccacataggaacacagttagccatgatttctgtttttgcagagcctgtaccactggcattattcggttcggatacaccatataatataccttctgtattggtcggatcacttttggcttctacactgtgcagatcaaacattaggttggggtgattgtttttagtggaagtaaaacggtttaccatcagtgggtgtttagctacgatttcatttccaactttgatagcattgtcgaattcccccaatgacatatagactttcatcaacagtactccacaggccgatttggtggtgtgtccacggtctacttgctcgggtacccattggtatgcaaattccagttcttttttcatacgacgtaaaatactccaacgatcacatgtattaaaatcataccgtgggtatgtgacttcaacatcaatgaaggggacatccccgaactggttgatcagtcgccagtatctgtaacaacgctgaaagtaacctgtacccaatactttgtttttttctgcttcattgacgaatttagtatctttcatacgtgaaagtactacatttgtatattttatttgattccagttctcatcccagttgtgcgatgtcaaataggagttttccgcattattaaagttagcatccggcattaattggcgatccatatcctgcaagggccctgctttatcagttgttccgctgatacagagatcggagaagataagttcacaagtatatccgcttccgtttccaaagtattcatgacgcatggaacgttcggctgctgcaagagaagtgagcagaccgtcagcatcaacatatgcattttcaggagtgaggaaagagaggggcttaggttccagccaactttcgctacatccggttagtagtaccgtacataaagcgacaccactgatagttttgaatattctgttctttttcattgttctttcaaattagagtgtaaagttaataccgaaattgaatgttcttcccattgggctatttgattcaggatcccaaccgtcgtaatgaggagcaaagactgctacattatgaatggatgcattgaagcgtaaatcttggatacctacaacttttgtccatttttgtggcaggcgatatgaaactgtgatgttgtccaaacggataaatgacttgtttacgtaatgtgttcctaagttctttgaaccgatacgtgcatagtcattaatcggattttctggtgtccagtaaggctgatcgtaaccgcaactgatagaagcatcgaagttattgttggcggcatcagcatatgaaccgtagtgaccccataaagagtacaacataaatgaaatatccagatcattgaacaattggaagttgttacggaatgtccaacggaaacgaggggttgtatatttctggtgtttcttgtcatcctggtccaatttcccattttcgttgaagtccagatatttaaagtcaccaggctggcagccgtattttgccgcttcttcagcttcatcttgttgccatacaccatctcctacataatcccaaatgcggtctgggtcctcaccaataaaccatttgttagtgatatcatcgtcttctacctgaccgatgatattaccgtcagcatcaagaatattcttcatgttaccgtataagtgtttaatcttacgacggttgagtgagaagttacctgtagcactccattcaaagtttttgcgtctcatgatgttggcattcaatgtcaattcaaaacctgtattctggagttgtcccatattactcaatactttgctgaaaccggtgatgggtgggatggcacggtccatgagcaaatcattggtcattttcttgtatacttcgatagaaccgcttaagatatctccgaagagtccgaagtccaaacctatattatatgatttggcacgttcccattttaacttgctatttggcattttttggttcaacgtataagtggtggtatagaatttgccatttccatcgatccagcaagttgggttagaggttaactctgcaagggcagcgtagataccgatgtctctattaccattttcaccccaagagaaacgtaatttaccatagcttaaccatgaggaggttttcttcatgaatttttcttctgtgaatacccatgctaaggcaatggcagggaatgtagcacgtgggttcatcataccgaaagctgagtaaccgtcacgacgaaccgaagcggtcaacatatacttattactaaaagagtagaacaaacgccccatcaaagcatcgccggtagtatattggtcagtactcaatgcagtaggattgttgcccaagtggataccatgatagcctaatgcgtcacttggattgtatcctttgttagtgctcttagtcatccaactttgtgacttttcggcattgactaggaaagttgcttctactttatgtttatcgaggaactcatatttccagttgaaaacattgtctacctgccagttgaaagctttattatgctggcggaaggaagagcctccttctcctgcccaggcatcgttcttggctgatttgtgctcaaagctttcgttccaagccaaacgcggagtaaagttcatctggtaagagaaaccgaacggtaaattcagacgcccgtagatagttccatccagattcatgtatacttgtttcttatctgtatatttacggtcatagaatgggttggcgatggtgtttgaaccattagggtagtgctggttggcactttctggattgttaacatcattactacaatacggagaaaaccatgtcagagctttagtatcgacagcaatagcgctttcgtcacggctggagaagttcatattcagtcccactgtgatatacttgctaacattggattccagattcaggcgggtagtgaaacggctaaatgcatcaccatctttgataccttcattgtccatatagccaatagaccaatagtattggtaatcttcacctttcttgctaatgctgacgttgtagttttgttgtactgcattgtttaacatcaaatcttgccaattggttagtttaccattgaaataattattgatttcaggggtagatagatccagacgtgacaaccatttcgttattagttcttcttctgatacagacgtaactttatccttctggtcataattataccaatctactttatctattccattaagtttccttggatcggtatacattcccggatattgttcaaggtattcatccgtttgcctaccgatttcgtatgcttggcggaaatcaagaaattgctcggcatttctgagtttgcggctcttaataggagtgaccaacccccaacttgtattgacgttaatcactggcttactgcctgctatacctttttgtgtagtgatagcaatgactccgtttgctgcttttgcaccatatacggcagcagaactggcatctttcagtacgtcaattgaaatgatgtcgttggggttcaattcactaagttcgccattataaataaccccgtctacaacaagtaacggttgtgaaccggcttttaacgtacccttaccacgtatcaggaagtcaccgccaccttttgcttcgttgttgactgaaatattcagaccggcagcattagcacgcaataagtcgtgcatattacggggcatttctgcttttaagtcggtcggacgaatgtttgaaatagcaccggttagatccttctttttagctgtaccatatccgataactacaacttcgtcgagtgcttgagcgtcttcctgcattgtaatgtttagattgctttgctgtactttgacttccacatctttgtatccgatataggaaagaaccagtgtttgaccgttttttgcggtaatggtaaagttaccattcatatctgtgatgacaccgttattggtaccttttaccatgacagtaacgccaatgaggacttctcccttgttatctactacatgcccttttattgatatattgcccgtttgttgttctggagcaacactatgaacctgcattgaaagggatgtcgtaatgaagggctgaccagcttgtactgtaccaatgcccaacaaagcagtcagagctactgattggaccagacgatagcatcgtttgtgaccttgctgccacatgcatggatgtgatgaattgtttttcatataactgaataataatttagtatttagatatttattagtctttacagattgcaactttatgattttcaacctcaaaattgctggataataatattgtttctgttctattctttttagatttgctttatgttatacatttgattacacttgcaaatctctgaaataatattataacttatgcaaagaatgatgaaaatcatcgggaacgattttgtagttttttgatgttaatagcttgttatatagttgattattcctatgtaaaaacatgtttttgcataccttgtgcagaaagatagttagcttttgttaaggaaaacgttcccgttgattttgcagataatgattctatattattctataatattgtgatatttgccatgttgttgaacttttaagtaattaatatgatgatatatttatccattttttataaatttcgtctacagagaataatcttattgttagttttagctttttattctttagttctgtgtgcgcagtttgtggattatgaaagaataacccctcatcctcgtttattattaacgcaaggaggagaagaagctgtaaagaaatcaatagcaacgtttccatcgttattgaaggttcataagcgtatattggaagaatctgatgagatactcatccaacaaatggcggaacgagttatggaagggaagcggttgctgagtgtttcccgtttggcattaaaacgtattttctatctttcatatgcctatcgtatgacgaaggaagaaaagtatgcctatcgtgcgacacaagaaatgctttcggtaagccgttttccagattggaatccatctcactttttggatgtgggagaaatggtattggcattatccataggttatgattggctttatgagtatttggaatcggaaacacgttctatagtacgtgacgcaattgtagaaaaaggcttggatgccgctgctcctgatgagtggttttacagggcagcctctaattggaattctgtttgtaatgctggtttattgtatggtgcacttgcagtttttgaggatgtgccggataaggcaaaaaaaatcatagagaggtgcttgctgactaatcctaaagctttatcggcttatggaccggacggaggatatccagagggctttcattattggggatacggtaccagttttcaggtgttacttattgctgcccttgaaagtgcattggggacggatgccggattgtccgaatatcctggttttttggaatcagctcgctttatggaatttatgacagctccaagtggtgaatactttaatttttcggatgctgttaatggagtgagatgtaatatgatgatgttttggtttgctaagaaaatgggggatttatctttactatggttagaaaatcaatatttagagaatccttcagtttgttttgcagaagatcgtttattgccctgtctgttgattttttgtgctcatcaggatttgagtaatatacaaccgccttcctgccatttctggcataatagtggaaagactccggtttttatttatcgtggcggatggaatagtaaagaggatagctatttggccgtaaaaggaggttctcctctaacttctcatgcacatatggatgccggttcatttatttatgaaaggaagggaatacgctgggcgatagatcttggaatgcaaaattacttaagtctggagagtagaggaataaatttatgggatcagtctcaagaaggacaacggtggggagtgttccgtcttggtaatatggcacataatacgcttacgataaacaataagcggcatttagtgaatagctatgcttctattaacagaatatataaaagtgaagatatgaaaggggcagaagtagatcttataagcgtttttgctgatgatatggaaaaagttgtccgcatcatttatctgaatgaagaagatgatctgattgtgaaagatgaactggttacgggagaaaaagaggctttggtaacttggattatggtaacaccggctgaagcaaagatcatcggtaagaatcaaatggaattggctaaggatggacatcgaatgttgcttaccgtgattgcaccaggtgatgttgaaatgaaactttggtccaatgaacctctccatgcttttgatgaacctaatccgggaagtatgcgtgtaggttttgaaacccaccttcccgcaaacaggaagaatttgttgaaagtgacattaaatcttatcagatgaattgtttattaattaaattataaaaaggatttatgaaagaaaaatggctcttattaagtttaattggtttccttatttcgtgttcgaaacaggaatcaatggatgcattgacggcacgtgtatttaccgttgctgaacagcagtatttgacaatggatactcgtttggaggttactactttaccgcagtccatagcttcggacagcacatttaaatcttcgacaatttattggtggtgtagcgggttttatcccggttcactctggtatatttatgagtatactcaaaatgaagccgtgaagacattggccgaaaagaatacgttgaagctggatcccattcaatacgtgaccaatgatcatgatgtcggtttccagttaaattgtagttatggtaatggttttcgtcttacgggaaatgaagattataagaaagttctttatcaaggggcacaatcattggcgacccgctttagttccgtaactggagtaatccggagctgggattttttgcgtcgtggttggaaataccctgttatcattgataatatgatgaatctggaattattgatgtttgcatcgaaagcctttgataatgatactttggaatatgtagctcgtacgcatgcaaatactacccttaaaaatcatttccgtaaagattattcttcttatcatctagtagattatgaccctgaagatggacatgtgcgtagccggcaaacagtacagggttattccaatgaatcatcatgggggagagggcaagcctgggcgctttatggctatacaatgatgtttcgtatgaccagagatgaaaagtatttggagcacgcagaaaatattgccgatatgcttctttcacgtcttccggttgatggtattccttattgggactttgatgctcctaacggtaatgaatatcgcgatgcttcagccggtgcaataatggcctctgcttttgtggaactgagtggttttgctacggatgagaaagcaagacaaaattatctatcaatagctgaaaaacaacttcgaactcttgcttcatctcattatcttgctgaaccgggaactaactgtaattttattctaaagcatagtgtcggtaatcttccagaaaagagcgaagtagatgtaccactttcttatgccgattattatttcttagaagcattgttacgttataaaaaggctatgggataggcttgcatagttttttctctcgaagagttggcttgtttaaggctaacttttcgagagaaaaacgtatttaacttctgttcttttcctaatatatttcatcagatatgcacgtttcttttcggttttggactaaatgagtattccaatataaattgagatagtattgctcagcatttgattcatttccataccgttatgaattaattcaccacagattacacagagtttcacagagcttaatcaatttgaaatcaaaagaatataactccgtgaaactcagtgttactctgtggtgaaaactcattactataccgttttactcctttctgcaccaagaaaaaatattgtatttcgtcaaatctatccgcttctttatttgttagtaatgcgaatcagtagctgaaattggtttgtttttgtcggatgatgaattaaatgacaaaagaatagtttttagagtttaactctctgcttttccttatatgaaccaaattcaacccctgatttgcattaatatgagattatgctgatgcacgtttagtatgttgttgttttaagatgatagcgataggatttgggcgataatgtagcttcttggctaaagcttgtacagccttcctggtgcttaggctaatatcctttttattggctaatgcgcgtgatatagtagatggtgccagattgagttgacgtgccatttctttaatggtaattttaggttgtttactgactttcgggttattcttatggcattgtttaagtttcactgccatgatattgggcttgtagtttaattgggtagccaattccattacgatttttttggtctgcgaatttacatcccactggtctgccaaagctctggatacagtggaagtagaaagatttagtgctttagcgattgttttaagtgttacttgagatttcatggtatttactttattagggttaatattattttctttattatcgctgcaaagttagaatgcaatgaattttaggactttacgatatatctcagaaactcccggatttgtatcattaaggaataaaaggtatatttgcagcatgtttagtcgatatattgtattgatattattctttttttgttggtcgagtggaagtgcccagcttttgaccgacaaattgttcttcgaacatttgactaccgaagacggactttctcataattatgtgcaatccatatatcaggataaggatggttttatctggttgggaagtgataatggtttaaaccgttatgacggacagcgtatcgatatttttagtactaatacccaacccactcttggaggtaataaaatacgccgcatcattcaggacagggacaagaatttatggatattgcatgaaaatggtttggacaggatgaaatattctactcagcaagtaaaaagtttcctgtatgacaagaaccaaagtagccgttgggttgggattggggttgataaagaggagagcttggtagcctatacggaaaagaaaatattcagatatgatatagaaaaagatactcttgtggttctgcaggacgctccggaggaatatcgatattctgcatttgtgcaggctggtgggaaatattatgtaggtactcgccaacatggcattattgtatatgatgaaaactggcaattgcttgagcatatttatcccaagtccatagagaaaggccccttgactgacggattgataaatgtgttgcaggtggattcagaaggttgtctttggagcgtgatcgtaggtatatgtattaacaaatataatcctaagaccaaggaagtgaaaacttataagctttcttctacatctctccttaataaggagattagggatatcatagagttgaataaggactatatgttgattggcactttcaacggtctatttaggttacataaggataatatggaggaagtgatagtagaaaaaggagaaatcggggaagaaggaggcttgagctattattctatatattctttgtttaaggataggcaaggaatagtgtgggttggtacatatgccggtggtgtgaactacagtcacagctataatcagcgcttcagattctttgctccttctcatttggctggacgcttcaggatggcaaaagaagatgctgataataatatttggttcgcaacagaaggtaacggtttgctgtgtcatcgtccgaaaacaggccaagtggaatctttttggttgaacgaaaacaagcatcacaatgataatattattaaatcgatctgtatatccggtgatacaatcatgtgcggtaatcaacggggagaagtctataattattctataaagaggaataaattctcattattgcggaaatacgataatacaaatatattgtatattttcaaagactctaaaggacattggtggatatccgtacaggatcagggcgttttctgtctgaatatggattccgtgcgattcccatgctcgaattacatagatgagatagatcctggaatacttgtgtttgccacccagaaagatggattgtatgtctataatctgaatacaggacaaaagaaacagataagtgcggcagatttgggggttcctgcagataaatcgcttagtataacttctttttgccgtgattcggaacataacctatggatgacgactgagagacagggactcttatctgtagataaacattggaaaatgcgaaagcaacatttgtcgcataccaaggttcattcggataaactttatttcgttgccaaacagaatgaagagaggttatgggtaattggtgcacacaaattgtatttgttcgatccaaaagaagaacaattacatacttttgataataacaacggtttgcgtctgaccgatatggatgcctccagtctgatagattcagccaatcgtttttggatattgggtaataccggctatataatggtagataatcggaattttatgttgaatgatataccggcttctgtgattcttactacgttacgtattaataataaattgcaaagaccttgtgaaagttctgtgttagataaatgtttggctgagacatccgtgttatgtttaaaacacaatcagacaaacatctcaatagcctatgcgagtgataaccatatatatggtaatagcgaccggttcttttataagatggatggagtagacccggattgggtggatgcgggtaatcgtcgtgaagtattctatagtaatctagcctccggtaactaccttttaaggatcaaagtacttaataatgatggaacgatagggccggaaactcatttgaaaattgaagtgcttccccctttatgggcgcgttggtgggcatttgctatttatgctgctattattttctacatattgcaacgttatattgcctataagcaaaggaaacaacggttagagcacgaactgtacctcaaacaaattgaaaaggataaatctgaggagttcaaccgggaattgcagaccttttttacgcaagtggcgcatgaattcaggactccgttaactttgattctaaatcctttggacgagatacagaaaaagataatacatgtttccggagtaaaagaagacttgcagttaatccgtcgtaataccaaacgcttactcacgttggtaaatgatctgatggatttgaggaagatagaaaatggcaatggggaactggaattatcttcttttaattttaatgattttattcaggagatttattactcttttcaggttactgctcggcaaagagatatagcattgcagctttctctaccggagacacctatattagctacatttgataaggacgcattagagaaagtgttctttaatttattgtccaatgccctgaagtttactccggaggggggaactgtaattttggctgtttccctgattgaaggagagaaaccgcaaatacatgttgaagtgaaagacaccggagtcggcatatccaatgaggatataaacaagatattcaaaccttttgcactgtctcatcaggatttgcatggacagatgggaggtagtggagtcggcctgaccatagcaagagctattgtagaaaaacatcagggaactatatcggtcagacgcagggaaccgcatggtacttgtttttctattgatttgccgtggagatatgataaatgttatgaagtggcggttcaagacacattagatgagagtgaagatgcagtagacgatgcttcttcttttaaagttacttcgatttctgagacgattttgttggtagatgataatattgaaattctgacttatcttcagaaggaattgtcgagaaactttaaagttgttacagcccagaatggacgtgaagcattggaggtattaggcaaagaaaatatgtcattagtagtgagtgatgtcatgatgcctgaaatggatgggatggaattatgtacgtatattaaagagaatccttctttttgccatcttcctgtcatattgctgactgcaaaatccatgaccatgtatgttgaagaaggctttcaggccggtgcggatgactatcttgtgaaacctttcaaagtctctaccttgatagtccgtattaataatattctgagcggtcggaagaaattgaaggagatttatggaaaacaactctctttaaagagtgtaggcattgagttggaacctgcagataaatcttttgctgaacaatatgaggcagtggtgaaaacacatctttctaatccagagttggatgtggaaatgttatgcaaggaaatgggagtgagcagagctaaattatatcgtaaggtaaaggctattactaatctttctccggcagaattgatccgtaatatccgtttggaatgtgctgctgagatgcttcgtacttctcaacagacagcaacggaaattgcctatcaaacaggatttggcagttataatcattttggtgattattttaagagtgtttatggagtttctcctaaagtatataaggagaggtataagaacacctgatttattcgtttatagagtcgattgcagcgtgcaaagatttggaaatgtatattggggctaacaaggccgtctaaaaataaactgtacctcacaatttagaactgcccccaaaagttagacacgaaactttaggagcagttctcttaaaacgataattccgtttgatttgttagcaatgtgaataatagataatgtttaccaattatctgtgcggaataggcaagccggtaggccatccttattataaagatttccgtccggattgttctcccagttatagcgtacagcaatagggttaggaactttcggattccaaataacaattcgattatctttgagttctccctgtgcccagtagaattttttatcttctcctgcgatggtaaacccttgcagacatccatatcggctgcgtatttctaaaccggaacctgtatttttgaatgtaattatgattttgtcaccattgatttccatacgttcgaacatggggctttcactgacaatatccggacgcccatactcgtgatgcaacacttgtaatgctaccctcatacctacttcttgtttgttgcgaggatgaagatcatgcggatctcctaagtcgctggtaacaatgagatgggttttaggaactgttagaactttacgctgagcatctcgtatttccgcccaaagtggtgtcttgttagtagaatcgaagttgggaagttggatgatataaaacggtaattctgaattccagcgattacgccagtcactgatcatacatgtgagccaatcggtataaggttctgcatttcctacattgttctctccttgataccagacgactcctttaatggcgaaggatagcagtggatggatcattgcattgtataccaatgatggataatcattacgctttgcttccttatttgttcgtgtaaagtattctgtagggggggatagtttctcgtttttgttatatcggtctagtcgtttttgtggtagtgtattggcagcttccagacttgtccaggtttctacgattgtaccgccccatgatgaatttataataccaataggtatatttgtttcctcataaacctttctagcgaagaaataagccactccagagaaacgacctacggtttcaggtgaacatacgagccatgttgtgctgattgtatctttaggggataattccatgcggcgaggtatgtttaaagttcggatttgtgaatagttggcattctttttctccacttccgcattagtgacgttgtttactacccattgcatgttagactgtccgctacataaccatacatctccgataagaatatccttgatacttatttggttgtcttttccggtgatttgcagttgatagggacctccggcttccagagctttcaggttaacttcccagtatcccttggcgtcggcttttgccgtttgtttttgctctgcgaataaaatttgtattttctcctttggatcagcctgtccccatatacgaataggctggtttctttgtagtaccattccattggaatagatggctggcaatgtcactttggcttgtacacttaaagaggcaaatagaaaaataaataataaatgtttcatggtagattattttttatgcgaaagtaagtgaatgctataacatatacaatagatgtgcagataaaattatcggaaacgatttcgtgcttcatgtattagataaacgtcttgtatatagtgttttaatgtgaaagtgaatttgcaaacgttcccggtgttttcatacataaacagtaaaccggacttaagtaaatgtctatatttgtgacgcattatttaatttagtattaatcaaaatatcactttaaaccaataaaatcgatttatgagaagattttgtctgacacttacatttctgagtgcattcttgagttttagtatagctcaaaaacaatatcagttaaagtcaccgaatgggaagcttgaactaagtatcgaagccgatgatcaaatttgttattccttaagacatgaaaatacagcgattattgtctcttcgccgatttccatgtcattaagcaataataaaatattaggcgtgaagtctaaagttaagaatatacgtaggcgtgtgattgatgagaatatcactactgccatttacaaacggagtgagataagaaatcgttgcaatgagctgtctcttactttcagggatggatttcaattagaattcagagcttatgatgaaggagttgcatatcgcttcgtcgttacggagaataagccttttaatgtaatagctgaagaagctacatttaattttgacgatgattatatggtgtatattccctatgtgagaggaggaaaaaataaaaaggtggaagaccagttcttcaattcttttgagaatatctatacacatgtcaatctaagtgaaatgggtactaatcaattggcttttactccggttgttgtggagttgaaagatggaaagaagctttgtattgcagaatcagacgtggagagttatcctggcatgtttgttcgcaatgcgaatcagtctaattctttgaaaggtgtttttgctccgtatccgaaagaaacggtacaaggtgggcacaacaaattacaaaaactggttactgcaagagaagattatattgcgaagtgttccggtagacgaagttttccctggcgcattgctattgtatcttctgatgataaagagctccttgataatgatatggtttataaactggctgctccctcccgcttggaggatacttcatggattaagcctggcaaggtggcttgggaatggtggaacagttgtgggttgtccggtgtggatttcaaagctggtgtgaacaatgttacctataaagcctatattgattttgcttctaagcatggtattgagtatgtgattttggatgaaggctgggccgtaaatctaaaagctgatttatttcaggttgtgccggaaatagatttgaaagagttggttgcttatgctgattctaaacatgtagggctgattttgtgggctggttattatgcttttgaacgtgatttggaaagaatctgcaaacattattcggaattgggtattaaaggattcaaggtagatttcatggaccgtgacgatcaggcaatggttgattttcactatcgtggggctgagatagctgcaaaataccatttaatgttagattatcatggcacttataagccgacaggaatgaatcgtacttatccgaatgtgattaattttgagggcgtacatggcttggaacagttaaagttttctggcagtgagaatgtggatcaggttacctatgatgtgactatgccttttattcgtatgattgcaggacctgtggattatactcaaggcgcaatgaaaaatggcaataaacgcaattttcgtgctgttaatgaagaacctatgagtatgggaacccgttgccgccagctggctgaatatgtaatattcgaagctccgctatctatgttgtgtgatagtcctgttctctatgagcgtgaatctgagtgtacctcttatatttcagatattccgacagtatgggatgagacaagggccttgaatggaaaaataggagaatatatctcaatggcccgtcgtaaaggagatgtttggtatgtaggagcgttgactaactggaaaaagcgtacgatggaatttgatttgtcatttctgggtgaaggtaaatggacaattgagctttataaggacggtataaatgcggataagatagcttctgattatcggaagtctgttatctttgttccccaaaatcgtaaactaacagtgaatttggcagaaggtggaggatgtgcaatgaaaatttataaaaagtaatagagaaatatttatgaagaagaaatttttaggttggattttatttctgataactatctgtaatggccagtacgttggtgctcaggagttactgacaaatgtatatggcagacaatatactttcttgaatggaaagtggaatgttattattgatccttatcagcaaggtcggcgaacctctatctataagaacagacctttgagaaataaggctgactttaaagagtatgagttcgaaggagggttacgtttgaatgtaccttccgattggaattcgcagcttcctgaacttaaatattatgaaggtacggtgtggtatgcccgcaaatttaaggtgaataaaaatcaggatgagaatctgtttctctacttcggagctgtgagttaccgttgccgggtctatctgaatggaaaagagataggtagtcatgaaggtggatttacgccatttcagttcaatatcactgatttgataatagaaggagaaaattttctggctgtggaagtgaataatactcggacggtagatgcaattcctgcgctgtcatttgactggtggaattatggcggcataacgcgtgatgtgatgttggtacatactcctaaagtatatatcagcaattactttatacaactggataaatacaagccggattatattcatgcgatcttgcaactgtcagagcggaaagcgggtcagaaagtgagaattgaaattcctgaactgaaaatcgcatctgaagtacagactgatggacaaggaatagcgaaaacatctttccgtgcaaagaacttagaacgttggtcgccccaaaaacctaaactttaccaagttacagtttcttctgcaacggatcatgtgaaagagaatataggctttcgtaatcttagtgtgaaagggacgaagatttatctgaatgacgctccgatctttatgaaaggaatcagtttccatgaagagatagcgcaacgccagggaagagctttttcagagcaggatgctgtagcattactttctgaagcaaaggaattaggtgccaatttagtacgtctggcacattatccgcagaatgaatacatcgttcgtctggctgaaaagatgggtattatgttatgggaagaaattcctatctggcaaggaattgattttaaaaatgccgggacgcgtatgaaggcgcaaagaatgtatacggaaatggttatgcgtgacaggaataggtgtgccttggccttctggggagttgccaatgaaacggccccttccgaagcccgcaatgcttttctgaagagtcttgtcgagcactgtcacgagatggacactacccgtctgataacagcagctttcgacctgccgaaactaaatcctgaaacgaaggcttttgaaatgaacgattcttttatcgaagagttggatgtagtatcgattaataaatatatggggtggtatcatgcctggccgtcagatccttcggaagtgtgttggaatgtggctcctggtaaaccgttgattttttctgaatttggtggtgaagccctttacgggcaatcgggagattctacggtaaccagttcatggagcgaagaatatcaggaaaagctgtttagagataatctggagatgttcaacaatgtgaaaaatttggccggtatctctccctggatactatttgatttccgttctccgtatcgttttcatcctacgaatcaggaaggttggaatcggaaagggcttatttctgatcagggatttaggaaaaaggcttggtatgtgatgaaagagttctataataataagtgatgatatgaaaaagaatagtcttttatgtgcaataattttgggtatcatggcaactactttgcccgcccagacagtgaagaaggattatactcatcaggtcgattctgtactgaagcttatgactgtggaagaaaaagtaggacaaatgattcagtattccaataataagcttctgactggtccttcccttgacagtcgtaatcatacggaagaaatcaaacgtggtgaggtaggttctattttcaatatattgactgtagagcgtgcaaagcaatatcaggatttggctatgcagtcccgtttgagaatcccgttaatttttggtttggatgttgtacatgggatgaggaccattttcccgataccgatggctgaggctgccagttttaatctagagctgataaaaaaaacggcaagtgtggcagcagcggagacttctgcccatggaattcactggacgtttgctcccatggttgatatttctagggatgcccgttgggggcgctcgatggaaggagctggggaagacccttggtatggtagccaggtggcaaaggctcgtgtagaaggttttcagggtactgattataatgatagaaacacagttcttgcttgtgcgaagcattttgctgcttatggagcagcggtagcaggtaaggattatgctgaagctgatatctcggaacatacacttctacaagtatatttaccaccatttcgggctgcggtagaagccggagtgggtactttcatgaatgcttttaatgaaataaacggtattccggcaactgcccataagcctcttttgagagatattctgaaaggagaatggggattcaaaggctttgtagtcagtgattggggctctgttggtgagattgccaagcatcggatggcaaaagataatgaggatgccggtcggttggccgctattgcaggctgtgacatggatatgcattctatgacttatgccagacatttggtcaatttggtaaaacagggagctgtagacattaccttgattgatgatgctgtaaagcggattttgacagtgaaatttgaattaggcttgtttgatgatccttatcgttataactatcgtgaaaaggaaatcgaaaacaagaaagtaaatgctgctcacaggaaagtggctcgtgaagctggggctggttcagtcgtccttctgaaaaaccaaaatgttttgcctgttacatccactgctggtaaaatagctgtagtcggccctttgaataaagccaaaaaagatatgctgggaaattggtccgccattggaaaggctgaagaagtaatttctgtttttgatggtctgaaagcggccttaccaaaagctaaaattacctatattgaaggttatgatttggaaacgaatgaattgaaaccattaccggatttttctgaatatgacgtgattattgtatcagtaggagagcgtgcgatggagtctggagaagcgaaatcgaaagtggatatcaacatcaatgctaatcagcagttgatggtgaaacaaataaaggagaaggcagggaaacctgttatcactttagttatgggaggccgtccattgattttctccgatatggaaccttatgccgatgctattcttatgacttggtggcttggtacggaagcaggcaattctattgcggatgtgcttactggtaaatataatccgtctggtaagttaccaatgacatttccccgtcacgtaggccagtgcccgctatattacaatcataaaagtacaggacgtgcctgggcgcccaacaatccgtgggtaagcggttatatggatgagagtgtgaaacctgcctatgtgttcggatatggcttgagttatacgacttttgaaatagcggctcctgtgatgtcgaaaaaagaatataaagcaggagagccagtagtgctgactacctctgttacgaatacggggcaatatacgggcaaagaaaccgttcaactctatttgcaggacgtggtcagttctgtgacccgtccggttattgagttatgtggaatccggcaggtagaattggcacctggagaaacccgaaagattgaatttaccttgtctgaacaagaactaggtttctttaattcagataaacagttcgtcacagagccgggtgactttaaactctttgtcggaagcagttcggataatttaaaagcaacggaatttgaacttataaaaaaataaatggaattacatgtagtacgtcctatttttatcctattgctttggggatttactttgggactgaaagcggatgatttatccgtcatcaggcagaagtatatagagagtatattatataagaataaatcagaacagcagttgatacgactgatgtgtcagatgtcccatgagaaagtagtcggtgaccagatggttgtagaattaatggaacgttgcccgatagaagttgggtacgttcgtcaattattatctgatttgagtgaacaaggtagttggaatgggctcgatttcactaatagtaaggctgccagttggcttccgcggattcatgcggcccgtgtgcttgagttggctaaagtttatgctaattcggaacataccttttataaatcagctgagattgcagaggccattcataaggctatggggtattggttccggatgaagccggtagctgccaattggtggtataatgaaataggtatacctaaagttttgggagctgcatttgttttatttgaagaccagttgtcgacggaagagaagaagcatgctattgaagtgatgaaccaagcaaagatagggatgacggcccagaatagagtttggctagctggcaatgtattggtgaaaggactattgctaaatgatattcaactggtacaggaagcaaggaatgccatgaatgatgagataaaaatagcttatggcaaagcagaagggatcaaggtcgattatagttttcatcaacacggacctcaacagcaggtcgggaattatggtgcagcttatttggctactatgagtttttgggcatatattcttgacggcacttcattagcgttggatcaagagcgttttaagcttatcactaactatacgaatgaaggtgtgcggagaatcttgtggaaaaacaagatggatgtgaataatcttggaaggcaactttatcggcaggcacagcggaataaggctttttcgagcttattctctgctaatgcattggcgcaagtgaatagtaaagattgtaatgtatatcatatgttgattgatgaaaatcttgggaatacatcaactgcgttgttgggacaataccatttctggaaatctgatatgacaatccatcgttgtcccacttggatggcatctgtaagaatggcatcggacagggtgatcggcacagagtcgggtacggataacgtaaaaggttattatttggcagacggtgctctctacacttatgtggatggtgatgaatatacggatatatttccttgttgggattggcgtaaagtgcctggtgtgacttgctatcaggaagataaggctgtccatgtaatgggatggcttgaaaagcaaaataaaggctcatttgtgggaaatgtgaatgatggcactattggccttacttcgatggatttggtaagggacgggctttatgctagaaagacgtggatttttacaccagattatgtcttatgcttaggagcgggcattcgttctgatagcagttatcaggtgaatacttctgtggagcaggctgtactaagagatgatttattgtattggaataaaggaaagtgggaagctgtgaaagatttgaaattttcctgtggggattcccagcgcttttttcaccatcagaccggatacatcttgttggaaggcgaggggcgtattttctctgaacaacgtacaaattcttggaatgatatcatgaagatatatcctaaaagcgagttgcagacgaaagatgtgtttactatttatatgaatcatggaattcttccaaaaaatgactcatatcaatacgtgatattgccggctaccactcctaaggaagtacaacactttgatttatcttcatttaaaataattagtaataccagtcaatgtcaggcagtccaactaaataaagagacatatttacttgcattgtatgaagctggaagtgttctcttatccggtgaactaaagtttgaaagcaataaaaaagggctttttattctgcgtacttataagaaaaagtggaaagtgtatgcttcagatccaactcagacagaaacatccatggaagtgatccttaatggaaataaaagagaaatcaaattgcccgaaggcgaatataaagggactgttgccatgttctctgaatgacttgtggaacaaaatcatagttatgaagaaaatattgatgagatggagatgacgtgaaaataaaattaatgaaaatgtagaatggaaaaaggttgcagtgacaaaacattgcaacctttttctttctatttagcaaacatttacagcggaatatattccacgaatgcttccattgcctcgtaagatgccaaaccgagattgtcatacaatgcggcggtaccacggttacggtcttcactgcgttgccagaacaaacgttcgtcgttgcccaggaatggtgcactttccatctgagactggtgcttcaggattgaattacgttttgcacgcagttcttccggactgatgggcactgccatttcaatgttttcaatttcccactcggcccacgcaccacgatacatccaaatacggcaatctttcaaccattttgcaccttcttctttttccagatcgatagcagcaaatacggcatctgtgcaaacacggtgtgttccatgtggatcggcgaggtcaccggctacgaatatttgatgaggtttcacttcacgtagcaggttacgcacaatttccacatcagcttcggtcaacggacctttctgtattctacctgtttcgtagaacggcaggtcaaggaagtggcaatgatccagagggatattattgtacgtacaagcagtgcgcgcttcaccacgacgtatcaagcccttaattgtgaggatgtcacgtgtatcgatgtcaccatctttcttctctttcaggaatttacggatttctgcatatttatcaacaactaccttgtcttcgctattattgaagatctggttgaaaccattgatgaaatgcaggaagcggattacttcttcgtcacctacggcaatgttaccggaagtttcgtaagccacgtgtacgtcatgcttttgttctaccaagcggcggattgtaccacccatggagattacgtcatcatcgggatgcggagagaatacgacgatacgtttcggatacggtttcgcacgttcgggacgataagtatcgtctgcatttggtttaccacccggccatccggtgatggtatgttgcagatcgttgaagatcttgatattcacattatatgccgaaccaaacagagccagcagttcgctcaaaccattttcattgtaatccttgtttgttagcttcaggatcggcttgcctgtcagttgacataaccagacgatggcgctacgaattagtttgtcgttccattcgcaggaagtcactagccacggacggtggatacgtgttaggttaccggcagcagaaaggtcgataactacatgagcattgttgtgagtttgcaggaaagatgccggaatggtatccgttactgcaccttctacgcactcttttaccattttggctttgtcttcaccccatgccatcagatagattttcttggcagccaggatcgtagaaacacccattgttatggagctgatcggagtgctttcgatgctaccgaacattttggatgcttcattgcgtgaatcgttgtccagtaaaatcaaacgggtggtggagttcaggcgggaacccggttcgttgaaaccaatgttacctacgcgcccgatgcccagtaatacggcatccaatccaccgaaactttcgatgcgttgctcgtacaggcggcaatattcaaagatggtatctttaggaattgtaccgtccgggctaaagatattctgcttatcaacatctacatgatcaaggaacatttccttcaaggcattcaggttgctgttgatggcatctgatgtaagaggataatattcgtaaaggttgaatatgataacgttgcggaaactcaagccttcctctttatgtatacggataagggctgagtatacgttgcggggagaattaccgcccggcaatgccaatacacagaaacgtccggctttctgtttatcacgaataagttgagctatttcgtaggcaacgtggttggcgccttcctctgccgattcgtagatgtcggttgggattttttccagtcgggtcaataccgacctttcaaatgcattctcaggcctataatacctgggggagactctgttgagagtgatttgagaactaagattggttttcataacttaattggtattaataaattgattaaagcttgtcgcttctaagatttaacaaatatacaaaaaacaatgttcactaattctagtgttggggttgttttttggaacaaggtgttttcttctgacactgtttcgggatacaaatgtagccactttttggttactatgtactcacttcttttaggtattttcattaaaaagactaaaatggaatctttttgtacaaaaacatcacctgttcgggggggatggtatgctgaccggtttcatcaacagataaccttaattgatatagaatgtagtggttactgtatttcctgcttcgtctaccgctgttagtgaatgttttccgggcgtgggttgtagtgagattttatgaaagtcttgtgtctgggtaagataagtgttatcaaggtgccagaaaatggtggtacttggattgctgtgagccagctcggtggttagaaagcccggacttccatccatctgtttgggtaacacaatacgggcattcatgggtggatagatgaattgcatggattgcaatgcatcctctccgcagcccgttttgaagggaggaagcggattgtattccggatgatgttgtttgtaataccattcccatacaggtggtaaagtgaaccaggacttctggatagttggttccaaatttgcgcaattctcgtagatacggtgagtttcatcggctgaaagggtgatcaggtgatgataagggcaagcttccgtctttagtccggcaggaagaatcagtaaagtatctgtttcttcgcaaaacctacccttcaagtgtccggatttccggcatatctcagccttgacaaagacatctcccgggcgtttgaaccaccgtgtcggaggtagcagactaaatacatcaaacaaaaccggaccggctgtccgtgctcctacaagaccgggtttaccttctcctgtagcattccctacccatacacctacggcatagtgaggggtgactcctacagcccaggcatcgcggaatccgtggcttgttccggtcttccaggcaatggggtgcatggaggggattgatttccagtctatttcttcgggacgattcacctcggttaacgcattgaaggtttgccatgcggctcccgattggaaagtatccgtcgattttcccgaagcgaagacttctgattctcctgatccttcagcgtccgcaagcagcaaactacattctgtttgtggaagctgcaataaactccgccccatataagcatacgcatttgtcacatcccatagggtagcttccgctccgcccagaatgagtgataaaccataatgggaagccggacgattgattgtttttaagcctatttgcctcagaaaagtatgaaacttgggaacaccatatctttgtagcatcgtcactgccggaatattcaatgaacgtgcaagagcttccgaagcaggaacggcaccttcgaattgcaaactgaagttttgaggtgtaaagccattaatattaaccggtatatcgggcagtagcgtatgaggtagcagactgccttcctgcaacatggcgtaatataaaaatggtttcagaatacttcccgtgcttctgggtgcctgaataacatctacttggttaccggcttgcttccgttcgaaattgacattgccgcaataagccacaacctgattggttcggatatcaatcaccagaattgccaggttgcgtatatcactccggttaaattcattgctccaacgttcggctgcgttctctatttgggtttgaatacccctgtcgatggttgatatggaatattttccgtttcgttcctgatagaagcgactgactagatggggagcggtttgggggagtggatgaggctcgtcggggagtggttcgctgatagccagttcgtaagtggagttatctataatctttcgtgcatatagttgttttagcagacggtttcttttattaagtaataattgtcgtgatttggagagatgaatcatggcgggtgcatttggaagtactgccagcatggctgcttctgcccaggacagttcttcggcgggatgtccgaaatatcgccaggcagcggcatcgagccctactacgtttcctccgaaaggagcgtgtgagatgtacatagacaggattttctcttttgaagcgcgaaactcaagtcgggtggccagaatcatttctatgaacttttctccaaaagtgcgtgattcgtttcttgccagacggatcgtttgcatggtgagggtacttcctccacttacaatgcgcttattctttaggttttggtaggcagctctgctaatggagacaggattgactccccaatggtgatagaaatgcctgtcttcgaaagtgatgaggcattgctttattttctccggagtagtggtccggggtggaaagcgccattgaccgtcggatgcaatgcgtgcgcccaataattcaccgttccggtcagtgacgacggtggagtagggcacatggaaaagttgccgggggaggcaaaagatatagcctatcaccagaattgtaataagtatgagtattacttttctggtgatagacagttgtttgaagtactttataatttgaatcttcatcaatatttaaatatgactatcttaattctcctcctccgggaggaggagtaccccatagggggggaggtggtaggtagaatgaaaaatacctatgaattaataaggaactcttttcttacctaccaccccgccctttgggcacccctccttctagaaggaggggaatttggatagttttgctcagtggcatgttacttactgacagtcgttcttcccgccttggttcgtgcttgtgccgaaccgtcatacatggcttcgcactggatagccggcaaaatgaaattgcctgcatacgtagcttgcagtcttatggtgaactttttcaattcactgcgacgcaagtcgaagtaagtcaatacgcggtcgtcacgaatatcctgataggtatactcacgggtaggtgtcgcttccggagtcatcaaccggtcattgtaaatttcccaacctgacggcagaatatgtgtcaatgccaaattgctgtaagcagtggttccactgatattacctacagtgatgactgccataaagtctgttccttgcttgatatcatctatggatatcgtcgctccgttcatatccgtatattttacgtccaggcggaggttattggatattgcgggtaacgtgtcattaagtaattgcgtgcgtgtaatgaggtcgacacttaatgcacctttaccttcattctttactataatattacccaaagccggtgaagtggacagttcctttgcaaatacagccttggctgattttactacgggttgctgtttcccgttccaggtccaggtgaagtccagagtacctgaaagcttctcagccagacgtcccatcgccatcaatgagaaagcagtggactgtgtattgaaccaattctcttcggccagatttttggatactttctttgcctgttgcaatgccgcctggtctcggttcattaggagtaaagtttccaatatcatagcttcgtcacgatcatacgaaccatagatgtagttctgtgaggaataaggggtaacggtggtttctgccttaaataccagttcttcagccggtttcatcttacctgtcagggcataagcggctgccagtctccatttggcttgcagaggcaggttagcttgttctttcatccggttcatggcgccctgctcaggtgcaccggctaatgccagtgtgtacaatctgtatgcttgttgcactcccgtttgccagtaaccccaactgtcatcttgatccggcatccgccagttttgggcagcagcacgttggaagcgtttccacttattcagtacattcgagttgacagcgtagcctttctcctgtgccaatacgaggaacatgcccgcataagaagtaatccactcatcagcactggcattccccggccagtaaacaaaaccgccgttcggaagctggcgtgcatagagttgccgtatcgcttcctgtacgttagccttaatcttttgagcttcttcctcatccacagctttaaactggctgacgaacaataacggcagagctttggaagtcagctgttccgtgcaatgatgctgataattatacaggtagtcgaacctgcggctgatatctaccgaaggaatacgtgagacttccagcagcatacggctatttgccggagaagcaccattcaatgaataaggaagtgttacactttctcctttttccacccattggctattgcggaaagtcactgccggattcgggtttcggacttcgatttcaatggtctctttcgcctgctgactgccaccgctggcagtgatatgtatcgttgcttttcctgttttacttccggtctttatcttaaagtaaacgagctggtcacccggttggctgaaagtaatggattgtttattgggatcgatcacttgtacacctccacctgaagcctggatggataccgatacattcttcacttccttctccatggcaaagacatttaccgggacagtaatctcttcttgtgtgctcagcacacggggcagtgtggacaacaacatcaatggtgtccgcacgaaagaagtcttttccgcttttccataagctccgtcttgccccgctaccaccatcgtacgcacagaacctacgtacatcggtagtctcagcgtgtgcgttttctgttttcctttatccagatagaacggaccgatgaatttcactaccggcttgaagcgattcgcttttgcatcggccggtttcaatgtctcgtcaccacccgtactgaacaatgaactgtagcgtccggcagatgctccgagtacatcatcatacatatcccaggtgcggatgcccaatgcttcgcgggcatagaattcactccacggatcgggagtcttgaaattagtcaggtcgagtaatccgtcgtctacaatggccagtgtgtatgtcatctgcttgccgttcttttcgctgacggtaacggtgaagtccgtttccggccgcaacacttccggcattttaatttgcggttgcaatatagtttgtttattagtcactaataccggaaccacaccgtacatacgtatcggtaaatcattcaccgtctgtgcatgaggttgcaacaggctgatgtgcaggtaaacgttcggagccatttccggagtcactttgaaagaatactttgtgtctccgttgttggaaacttcaatccattcacgttgcagaacggttgaaccgttttccagggctaccaatgcacgtcctcccgcagcggcaggaatgatggctgttgccgtttcacctatttcatacgagtctttatccagagagaaagcgagcattttaatgccgctggggtctgtcttgcttgaacgtccgcgccaatccggccagtctatataaacagttccaccggtggcatgtccactttccttatctttcacataaatcaggtaacgtccccagtccggataatttacccggaatttaaaagttgcctttccgcctgtagtctgtatattgccactggctacgggagtgatggaactactgttgacataagttccgaatgattcgtcccggttctcccaccaccagctccaggagatacggtaaatcttatattccagattggagcggttcattaattgtccttccgcatttacggtgacaatgtcgaatacatgatcctggtctgtctcgatgtattttcctttcggttggttcagattaatacctacataagatgagaatggagagaatggaatgctttgcgtgtaaatactggcgtctcctcccggttcgaatacacggctggttaaggttgcattcagcattcccggggcattggtggcagccggaagtttcaacataaagttagcttttccttccgcatccagtgttccatcgaatatatcgttttttacagttgtaaattcggtagccggattattaaatatgtattgtccgtagttcttaaattgtgtatttacttttgacagggacatttccactttggttttcaaccgtgaagcggtggcgcctgtcagccatgtggaagtaagcattaccggtatttctttggtagaagcctggattgctttctccggtagtttcagattaattttcaggcgatttggtttcaccgtttctatgtgaaggcttttgtggaaagcggttccgcctactttgacgtaagcgttccataatcccgtcgggtcttccgggcgtgtcggcaggtcaaatgtgtagaaaccgtttataccttgcgtggaaatcattttggtatagaattgtcctctcggattatataattccaatgctacagggtgtttatccggaattcttttttcacggtcttccataataaagcttacatgcagcgtatctcccggtcgccatacccctctctcgccatagacgaaccccttcaatcctttctgaatatcttttccgcctacatcgaaccggctgacagattgttcttcaccatctgccacacgaacgtaagctttctgtttctctacttcggccaccacaatgaaaggaacacctttcggagtgatttctgtaaatccttcactattggtttcaccggttcctatggcttgcaactggaagttgtaaacagtcactttcgctttctccattggtttggtatccaagatgttgcttacggcaatccacagtttgttcagtgaattccgttttacaatcattcctatattggaggcaaatacgttgcacgatgctgcccggtcagagtccatatagtaggaggcatgacaaggattattgcgttcccgccagttatactggctccagtccatcttaatgttaccattgtagtagaaataagtttccggtgtatcccattcagcttcattttcttcgaaagtactacttccgctgactttcgtcaatccctctgaagcagtattgtctgcaaagctcatctcttgtttttctgttccgctgcaaggataggctgagtattcttgccggaaagaaagtatgacacggtagatagcacccggttcttgccgaatcagtccggcaaggtctattgaataatcttcccatcggtgcacgtcttttgtgctgtccttactcagccacaatgtgttctggtaaaccaatcgtccggaacggcgcagttcactggctgatgagagcgtattggtctgcatgaacatcagtacattgttttcaaaaatacggatcacgcttaaatctaccgcatagagattgactgcccggaacgggatgatcaaacttttggagtcgggtaggatagcggctgatgtagacatactcacttgtggtttcagattcagttcgctgaatgcgatggagtgtgatgtgccgagcgatttatcccggctgtttttcaccccttcgtgtatcttcaaagtcagtttgctcagttggttggcttcaaagtagacatatactttattattctccacttgaaatatggaagaagctacttcggggatttcaatcaatccgttcaggtcttgtgtagtagaaacaggatcggagaatactatttcaattccattctccggttcgtcaatgcgtttggcagagaggaaacggaaatcattcttggcagggatcagtacgttttctgtcagtttgcggtcgattcctgcaggactgccgttggcggtgatttctaactgatagtcttccgcttcgcgaataacaccggctatttcaaactgatagcgcgtcggatgatctgtcggagtgatactgacaggatagctttggccgtttccgcctttggcagagagcattttctcaactgcttctttgggagtggcatcactgaaacgtacttcacctttcaatgtcaccaagtcgccatggctatctatgtcgatggttgtcagtggttcgatatacagtgtgaaattgggttcctgtactctgaaagagaatttgaattctttcagacgactgtccacttctacaaacctgcctaattggaacgtaccttcatagaactctcccggctttaaagttcctggttcaggaacgaattcaatcgtattgttgctgatccaatacgctttgccttttagggagggagagaagctaaacggattttctttcagttcattgttcaaatctaccataggctgatcctgcgtcagttctatacgtatgttcgaagtttgcgagataactcctcccgtatatgcattcacaaaaggtgcatactcggcagaaggaataatatcctttttgctgtttgcgcaagaggaaaaaactaagatggtcagtaacagaaagaataacctgtcagctatgcggtgtttagctttcattcgtcccatagtgctttaattgttaattattaattcttaatttggaaacattcagcatctttccatgcagggaatttttgtctgaattctctcaggacagagaggtcgagagttgcggtggcggttccttcttcatggtcgggtacgctggcaagcaaatcgccctttggtgaataaatgacgctgccgccattatatagcatttgatttccatccgtaccgatacggttgacaccacaaacataactgatattttcgagtgcacgggcttgtaacagaatgtcccatacccggcggcggggaacaggccagttggcaacgtatatcagaagatcatattcattatttacgttccggctccataccggaaagcgaaggtcgtagcagactaacagtagtatattccatccccggtaggagataacaggccgctggttacccgctgtaaaatgctccgtttcctggcccatacgaaagagatgtcgtttatcgtagtaataagctcccccttcgggagtcaggaaaaaagcacggttataataagacttatcaggaatgggaaccgcatttttatttgcatctacttcttcatcacaagctatataactacctgtaatggcgaattggaattccgccgcccattggcgcaaggtggcgatggttacccccgatatcggttcagccagccttcggctgtccatactaaaaccggtagagaaggtttcgggcaagacaacaatctccgctactccacgaagcgctttgagcttcctacggagtaggcggagattttcttgtttatcttcccaaacaatatctgtttgtaatagagttacacgcataacttcattgaaatattttaggcgcggattatacgtataacgcggattaatgtgctacgctatacttgcaggcaaagattatttgcccggctttccacgccgcaaggtaataaaaatccgtgtaatccgcgtaatccgcgcctaaaagttattatcaaatgtttcctaaagcaaagttcttcgggttcttccctttgaaatccttataatagagctttacctcgcgcatatccttttctatatctcccgacggcataatcgcctttgtcgcagaaatcgttttagtggtataatcgatgcctatcattacaataggcacttgcgctttcaatgcaataaaataaaatcctttcttccaattaggattcgctttacgggttccttccggtgtaatggcgagttggaatttcttgcttttggcgaatctttccgtcatctggtctaccaatgacgttttgcgtccccgatctaccggtatgcctcccacggctttgaaaattaatcccagcggaaagaagaaccattcttttttcatcatgaagtatgttttccgtccgatagctccataaaatagtttgccgataaataaatcccaattagatgtatgaggtgctgcagttatcacgcatttatcataatccggcaccgtcacatttgtcttccatcccaaaatgcgatagtagataaagctgtatattgcttttttcattcccggtgcttacttcaggttgccgatagcgtcaataattgcgtctacttctttattaaagtcttcgcggaatttcttgtagaaaccttttacatttccgggttcggtatggctgattcggctgataaattcatcttgcacactcaggattctgcccatcagctcgtcggctttagttttatcggttccgggtacgtataagctgtttaccaaacactccatgaacagttcacctgcgatataattgacgtttttcttaagttctcttctacttgccataatctttacgttttaagtgaataaattgaaatatttccggtaaagataagtactttccacggtataaaccaacatttcatattttttttgatgtgcgcttcctttcataattcagaaaaaaacacgaaatttgcgacgcttttgaacgaaactttactaacacctttaaataattagataaaatgacaaaaagtgcattgcaaattgcaagggctgcttatcagcccaaacttccgaaagcgctgaagggtgccgttaaggcggtagctggagcagctactcaatctgtagccgatcaggaagctatccaaaaattgttccctaacacgtacggaatgcctttgatcaagtttgaggctactgacgaagtggttaacttcccagctatgaacgtgggcgttatcctttctggtggtcaggctcccggtggtcacaatgtgatttccggtatcttcgacggtatcaagagtttgaataaggacagcaagttatatggtttcattcttggccccggcggtttggttgaccataactatatggaactgacttcagatatcattgatgaataccgtaacacgggtggtttcgatatcatcggttcaggtcgtactaaattggagaaggaagatcagtttgaaaaaggtctggaaatcctgaagcaacttgatattaaagcattggttatcatcggtggtgacgactctaacacaaatgcctgcgtactggctgagtactatgcagctaagaagtgcggcgtacaggtaattggttgtccgaagactatcgacggtgacttgaagaacgaaatgattgaaacttctttcggtttcgacactgcttgtaaggtttactctgaagttatcggtaatattcaacgtgactgtaactcagctcgtaaatactggcacttcatcaagttgatgggacgttctgcttctcacattgcattggaatgtgctttgcaggtacaacctaacgtttgtatcgtatcagaagaagttgaagcaaaagatatgtctttggacgatgtggtaacttacattgctcagatagtagctaaccgggctgctcaaggcaacaacttcggtacggttttgatccctgaaggtttgatcgagtttattccggctatgaaacgtctgatcgctgagttgaacgacttccttgctgaaaatgctgaagaattctctcaaattaagaagtctcaccaacgtgattatatcatccgtaaactgtctccggaaaatgcggctatctatgccagcctgcctgagggtgttgcacgtcagctgacgctggaccgtgacccacacggaaatgtacaggtatctttgatcgaaacagaaaaactgttgtcggaaatggtagctactaagcttgctgcatggaaagaagaaggtaaattcgtaggtaagttcgcttctcaacaccacttcttcggttatgaaggccgttgcgctgctccgtctaactacgatgctgactattgctattcactgggttatacagctgcttctctgattgctaacggcaagacaggctatatgtcttctgtacgcaacactacggctcctgctgaccaatggattgcaggtggtgtgcccattacgatgatgatgaacatggaacgccgtcacggtgaaatgaaaccggtaatccagaaagctctggtgaaactggatggtgctccgttcaaggcatttgctgctcagcgcgaccagtgggctatcactacagattatgtatatccgggaccgatccagtacttcggacctacggaagtttgtgaccagccgacaaagactttgcagttagagcaggctaaataaatcggcaaactgacgaagagttaataaaaagaacgcaaattatgcgaattacacaaatttgaataatctatttgcgtaatttgtgtaatttgcgttctgttttgaatattacatggcaactaaaagaaaatctgctgcacgtcgcggtaaaaagaaaagcgaagcgcgtatcatgcctgcatggttacgtacaatacttgctgtttgtatcattgccgtattctctgccgggttttattggtttttcattcgtccgtatgcctatcgttggaagccctgttatggtcagaaaggatatggggtctgtatgccctgcgactatgaagtgcatggcattgatatctcccattatcaaggcagtattgactgggtgcaactgacaaccaacaaaacaaccaaatttcctatccattttgtctttatgaaagctaccgaaggtggtgatcatgctgacgatactttcccgttcaattttgatcaggcgcatcgttatggttttattcgcggagcttaccatttcttctctcctaaaacagatccgctaaaacaagccgatttctttattcgtacggtccagcttattcccggagatctaccacctgtgcttgatgttgaaactattggtaaaagtactccccatgatttaaggattgctgtcaaaacttggctcgaccgtatagaatcacattatggtgtgaaaccgattctttatacatcttataaattcaaaaaccgctatcttagtgattcggtattcaatacttatccctactggattgcccactattacgtagactccgtcaaatatgaaggtccatggcacttctggcaacataccgatgtggggaatgttcccggtatcagagaagaggtcgatttgaatgtattcaacggatctttggagcaattgcgggcgcttactctacagaaatagtttcgcataataagttgttacttttaatatgtatttcaaatcagttatggtttgcatatactttttgtaataagcgcgctccgagtatcggtctgtaatgtcctctttcgtagtagttatgaatatcgttcgtatattcattgataccactgaaatcgaacacgttttcatagccaaaaatgtctttcaatatttccacatctgccggatttatgctgatctggttatagtcgggactgatgatgattttaaccgaggtgttatgtttccggcagatttgatctatttcctttaataattcggtctgtgtttcccataggaatcgctcaccttcccggtattcaccatttctgtaattacagtctctggctttcacaaactcttttttgtggttttcccaatatgcttctccttcatcccggatcatcccctctctgggattgattgcatcatttgttactgcatctctgattgcgccataagggtttatcactccttgcatatagggacgatattgatgaaatattttataatcgagataaggaaacaggaaattagggaagaagaaggcctgacagaatttctcctggaaactaaagttgctgattcctgagatagccggaggcaacacatggttatggctgcttaaaagctggtctttccccaatgactctttatccagaatgaggagcagattctttatttctgcaccatttctttccaaagcctgcaacttcttactgatggcggctatgctttctgcatttccgaacaggcgtactgctctgccaccatccaaatatttttcccattcatgacattgataggccatggtgcaggaattgcccataataaaagaatcaaatgcaatggaatcccggttgttcatatacatttgccaaccgatatagccttcatttaacatgacgggagagttatcataacggttataatgccttaaaaccataaaaggatcattgaggaaatacaccactagtaaggctataaatggcgtcaggagtatagatagtttcatcgtgaagcgcatagctgcacttcgctcactgtttttcttcattctgctatctttgtttttagattaaaattgcaaataaataaaactgtcggaattgaactgtcccaaggtaaagaacataatggccagcagataataaatgccccatctgacaagcatgggttgtttttccaacgcttctaaaagatctcgtttcgacataatatattcgtaaactaaaatcagtacaagagcgctaccggccacaatacaattatgatccggaattccgatgcttacttctttccagctggcatgggtactgaacgaaatgtttctgatgtaatagagtgcatcacttaccgactctaagcgaaagaagatcaaagaaaaggcgaaaagcagataagtgcggaggatggacagggttgtaaacaggggattacctatccaattctttatcttgttacggatcatggcggtcttcatttcatagaaaataataagcccttggatgagtccatatataatatagttccatcctgcaccatgccaggcacctaatcctgcaaatgtcaggctcagactcaggaatactccccattgtccccaacggcgcatacccgaagataggggcaaatataagtaatccctaacccaaaatgaaagagacatgtgccatcttctccagaattcggcagtggtttgtgctatgaatgggcggttgaagttagggctgagtttgaatcccaacatacaggcacctccaagtgcaatatccgtataaccagaaaagtcaccatacaattctacaggatataaaaggcatgccatgagtaattggataccggatgccgtatgtatagagttgaaaataccatctatataaggggaaatataatcggcaaggatcaacttctttatcagtcccactacgatcagtttcattccgtagacaatggatggatatgctaccggtttacccgatttcaattgtggaagcatatctctcgcccgttctataggtcctgacaggaatttcatgaaaaagagcatatatatcatgaagtcggcaaggttctcttccggttcttcttctttccaatagatttccgtcaggtatgaaagggcctgaaaggtataaaaggagatgcctaaggggaatagccagtgcacgcctggcaggaggttggcatatcggaatgccaaccagcctgtaattagaaaacacaagcccgaaatatagattcttttcgcatccttctcatgttttgattgtcccacccattttccgagaaaaaaagttgccagtgaaatgagaagggctatgatcaggaaagctatgtggtaatagcctatgaaaatacagcttgacaacaagagtatagcttttctatatttaggtggaagtgtgtagtacaaaaggaaggtacatacaaacagcgtgacaaaattcaaagatatgaatgacatgtcttatttggttttggtgagaatggcattgcaaatatctcctacattcttgaatcggacaatgtctctgaaggtgaagtgaacattgaaatctttctctattctgcttatcagcaacatattggttaatgaattccaaccttccacatcctgggcggtggtttcactggcaagaacgatgttgtctctcttcaatatctcctgaaaaatcaggctcagttcatttaaaatcatctgcgtattcatattagtttagttttatattagttccagtattctttttctatcggttttgctgctggtattcagtggaaaatgttccatgcaatgtatgtgctggggaatcatgtagaaaggcagccggctgttcatatgttcttctatctggtgtttgtcgagatggactttttcaactaccagatgtaattcgcattgattgtttgctccatatttggggatgacgacagctttacattcattgttgaaatacttcttcaccacgtgttctatttcgcttagttcgatgcggaatccctgaagtttaatctgcgaatctttgcgaccacaatatatgatatcgccgtcagtatctatctggcagagatcaccggttttgtaataagtccttccatctgtcccttcgatgaggcattctttagtcttttcaggagcgttccagtagccgttcatcacttgcctgccgctgatccagagttctccggtttcgcctgtggcaacgggaataccgctattatccatgattagagcatccactccctcgaatggcttgcctatagcaatcataccgttatgatgtttgcatgaggtggtcggtatctggtaggctgtacaataaattgttccttctgtgggaccatacaggttcacaaaagaggcattgggagcacaggctctgaaggcagatagtaattcaacatccgatgcttcggcagtaactatcaggtatttgagttcaggaagttgtatctcagagaaatagggtaataataactggagtagggagggggctacggcagcaaatgtgaggttatatttttccaatatttcaatgacattgatatactttacgccttccggagaaactgtatatatgcatgcacctattgttaggggaaataagaaagaaacgatagaaacgtcaaaggttagttcgaacatttgcagcatacggtcgttctcgtccaattgccagtccaaatggctgtatgcgttgtagaaagcatttaggttgttgcgggagatgggaactcctttcggttctcccgtactgccggaggtgaaaatgatataagcattttcattcttttccgaatgtatgccagaagaagacggaactacttcctgtaactccgaagtacatataaaatctatatgttcggtatccaggttcaatacacggatgtcctttgtatatagaattaaatgaatatcggcgagttctgcaatctttctattcctgtgtctgggataggctggatgcagaatgacatacgtttttccactgattaatactgccagtatggaggcgtaagtctccaatctatcttcggctataatgccgatgattttatcttccctgttattaatcaaagtggatattttatatacagtttcagacagttgacgataggtataggtgatgttgttaataacaaatgcctggtgtcctgcatacttttcaaaagcctctatgatctcaccgatcatatctttttgatccttttccattctgttcgtgattttatagtttatagtaaatgtctaattcgttttctgtgtagtaaagacaggaggatttgatattctccctattgaggagggcttaatgtgtgttaaatatagaaggaaggtattaggagataatctttctctcttttgatgtaatgactatttctctgatttatagacgaataatagaatggctttgacctttttattatagatagaaaatatgaaaagaggaatttctaaaaagtatttagaggaatgataattcattgatatatagttatatatcatcctgaaataaggggtgtgcaaaaaacgttcgtttaatgtgcgcaaagataatgggtatttttcgaatgtacaaggtgtttaataaaaatatttctaatagattttatttcaaa

SEQ ID NO: 6390 - DNA, 41655 bp, Unknown
  gut microbiota DNA sequence
gacttacactttatcacatttattcctacctttgcggcaaaattataacttttaactaacaactcataatcaactaccatggctaagataactaaagaagctgccttgctgtatcactcacaaggcaaaccaggtaagatagaagtagtgcctaccaagccctacagtacccaaaccgatctttcgcttgcttactctcccggtgtggcggagccgtgcctcgaaatagaaaagaatccgcaggatgcttataaatatacagcgaaaggaaacttggttgctgtaatctccaacggtactgctgtactcggccttggcgacataggtgcgttgagcggtaagcccgtaatggaaggtaaaggacttctgttcaaaatttatgccggcatcgacgtattcgatattgaagtaaacgaaaaagatcccgaaaaattcatcgaagctgtaaaggccattgctcctaccttcggtggtatcaacctggaagatatcaaagcacctgagtgcttcgaaatagagcgtcgtctgaaagaagagctcgatatccccgtgatgcacgatgaccagcatggcacggctattatctccagtgccggacttgtaaacgctttgcaggtagcaggcaagaaaattgaagatgtaaaaatcgttgtgaatggtgccggtgcatctgccgtatcttgtacaaaactatatgtttcactgggcgcacgcctggaaaacatcgtgatgctggatagtaaaggcgtaatcagcaaagtacgcaccgacctcaacgaacagaaacgttacttcgctaccgaccgcacagatatccacacgctggaagaagccatcaaaggtgccgatgtattcctgggattatccaaaggaaacgttctgtcacaggacatggtacgcagcatggccccgtctcctatcgttttcgcattggccaatcctacaccggaaatctcttacgaagatgccatgtcagcacgtcccgacgtactgatggcaaccggacgttcggactatccgaaccagattaataatgtaatcggtttcccctatatcttccgtggtgccctggatactcaggctaaagccatcaacgaagaaatgaagattgccgccgtacatgccattgccaacctggcaaaacagcctgtacccgatgttgtgaacgaggcttatcatgttaacaactttagtttcggtccggaatacttcatcccgaaaccagttgacccacgtcttatcaccgaagtttcctgcgccgtagccaaggctgccatggaaagcggtgtagcccgcaaaaacatcgaagattgggacgcttactgcgtacaactccgcgaactgatgggttacgaaagcaaactgacccgccagctttacgacaccgcccgtcgcaatccgcaacgcgtggtatttgccgaaggttctcaccccaatatgctgaaagctgctgtagaagccaaagccgaaggtatctgtcatccgattgtattaggtaacgatgaaaccatcgaaaaactggcaaaagaactcgacctcagcttggaaggtatcgagatcgtcaacctgcgccatccgaacgaagctgcacgccgtgaacgctacgcccgcattctttccgaaaagcgtgctcgccaaggtgccacctatgaggaagccaacgataagatgttcgaacgcaattacttcggtatgatgatggtggaaacaggcgatgcagatgcattcatcaccggtctttataccaaatacagcaatacgatcaaagttgccaaagaagttatcggcatacaaccgcaatacaagcatttcggtacgatgcacatcctgaactccaagaaaggtacctacttcctggctgatacactaatcaaccgtcatcccaatgccgaaacattgattgacatagccaaactgtcagagcataccgtacgtttcttcaatcatactccggtaatggccatgttaagttactccaacttcggtgcagacaccgaaggtagtccggtaagtgtacacgaagccgtggaatatatgcagcagaactatcctgatcttgccattgacggtgaaatgcaggtgaactttgccatggaccgcaagatgcgtgacgccaagtatccattcacccgtctgaaaggtaaagatgtgaatacccttgtattcccgaacctcagttccgccaattctgcatacaaactgttgcaggctatgaatacggaaatggagctaatcggcccgatacaaatgggattgaacaagcctatccacttcaccgacttcgaaagctccgtacgcgacattgtgaacatcaccgcagtagcagtcatcgacgccatcgtggataaaaagaaagcaggtaaatgagacgcccgttatcgaaatcgcaaagtgtttgcatagtcttgctttgggcagcactttgctacatagttctaacaaccgccgaacgaattgacggtccagtcatcatgacacttgtcatttcggcagcgttagtattcattccggtaataaaatcattaaagagaggataaataatatctttttattcctttttgcgggataaaacaatatttttgttgttttatcccgcattttctttataaattgtttgtttgtctcatttttatgtgtacttttgcaaccgcaacagagaaaaaacaatctaaagaatactttgttaagacaattatatttagtagcaaccaataaaagaaatagattatgaatgcagctaaggtattagaagatttgaaaagacggttccccaacgaaccagagtatcatcaagcagtggaagaagtactttctacaattgaagaagagtacaacaaacacccggaatttgacaaagtcaatctaattgagcgtctttgcatccccgatcgtgtttatcaattccgcgtgacttggatggacgataagggtaacatccagacaaacatgggttatcgcgttcaacacaacaacgctatcggtccgtacaaaggtggtatccgtttccacgcatctgtgaacctctcaatcctgaagttcctcgcgttcgaacaaaccttcaaaaactctctgactactctgcctatgggtggtggtaaaggtggttccgacttctctccacgtggcaagtctaatgctgaagtaatgcgtttcgtacaagcattcatgctggaactgtggcgtcatattggtcctgagactgacgttcctgccggtgacatcggtgtaggtggtcgtgaagtaggtttcatgttcggtatgtacaagaagctgactcatgaattcacaggtacattcactggtaaaggtcgcgaattcggtggttcactgattcgtcctgaggctacaggttacggtaacatctacttcctgatggaaatgctgaaatctaaaggtactgacctgaaaggcaagacttgcctgatctccggttctggtaacgtagctcaatacactgctgaaaaagtattggaactgggtggtaaagtactcaccatgtctgactctgacggttatgtttacgacccggcaggtatcgaccgcgaaaaactggactacatcatggaactgaagaatctctatcgtggacgtatccgcgagtatgcagaacaatatccgggtgtgaaatatgtagaaggagctaagccttggggtgaaaaagctgatatcgctctaccttctgcaactcagaatgaactgaacggtgaccacgctcgccaattagttgccaacggttgtatggctgtatccgaaggtgctaacatgccttctactccggaagctgttaaagtattccaggatgctaagattctgtatgctccgggtaaggcagctaatgcaggtggtgtatcagtatccggtctggaaatgactcagaactctatcaaactcagctggagtgcagaagaagtagatgagaaactgaagagcatcatgaagaacattcacgaagcttgcgtacagtatggtactgaagctgacggttatgtgaactacgtgaagggtgctaacgttgctggattcatgaaggtagccaaggccatgatggcacaaggtattgtgtaagaagctatagttgttatatatgggaatccccttcatactgtatggtgtgaaggggatttttctttataattcagatgttggaaacacgctttatataaagccgcaaacaggaaaaaggtcatacaagagagatctcccattcaaagagctttcaatgcaatagatactgattctacgaatttatgtaaccggtcctctatctttttctttcttgcttcagaaccttctatagtcaataccacatcatatatcctttttacatattgtatcaatttcacacattcatgatactctccatacacatacgacaagtctattttaatgaaattttcttcaatttcttcaaacaaaatgtttttgtccggattttgcatctgctctatagcctcaatgcccatcctaagattattctttgttccgattatcttgatacgtttattcaattctttcttatactgttcatcaacaacattagccacagcattccgaacatcttgcaaaagttcattagcaacctcatagtttcccatatcatattgcatcttaagctctttcaagttagattctgcagctaaactttgcattgcgcttactggaataataaatgtatccaacattccacgatctattttagttatcagctttctataacgtaaaaatagactttgcttatatttaatgatatcatccgtatcaggaatacgctgaaatatgctatatacttcttggaaaagagaaacgcattgctcgggatttttctcttttatcaactttgcaatatcagccattatttcatcagcccgtctcagtaacgctctatcaccggagagcaacttcattggaagagttgccttataagcgtcaagaactttatcagttaaagaaggtagcctatcatcatattccttcttactggtaacatgccaaccaacacacgaacgacaataataactccggctaggggcatgaccactacacgcttctatctcttcatgattgaatttaataaaattatctgcttttgactctgactcaaatagcgttttatatttattgcaatcgcggcaaaatattctgttctttttgggtttcatatactcacttggtttattaccttttcgccattctcaatttgataaattatagtaaatgttgtctttagtgtgttccggcttaatcttcctgcaaaggtaaacagaatagaacagaaaacgaaggaaagtggccagcaataacaaaaaaccacaacctatataaaactaaaatcaaagagtctaagaactaatcccggcatcgcaagaaattaatctttcattacctaaaaactattcttacaacaattattgtaagaaaaaaatataactatagtaagaaaataacataactgttgtaaaaatcttctatatttgtagtaagaatactttttagtataaacgatattagtctgtaacacatccgacattaacctctcgcagttccagtaccaatttgtttctacgaaaacagaaacctcttaaaaacaatgtatatatgagtacttattatgacctttacgaaacaccggaccccagtggcgaaggtaagaagaaaccactccatgcacgcgtccgctccaaaggcactatcactgcaaaggagtttcaggagcggttaatgaaagaacagcacatgccacacgccatggtcgtgggaattatgcaagccatcagcaatgcactgggcgactggctcgccgaaggttacaatgtagaactggatgaactgggatttttcagtactacactgaaatgtacgcgtcctgccatacagaaaaaggacatacgtgctgaatccgtacgctttgaaacggtaaaattccgccccagcaaagccttcaaaaagtacgtgagacatcaaatggaactggagagaatagacaaaaaagcctcggcaaagaaaccggcagttgccaaaaaagatagaagacagatgatgctgacctttctggaagcaaatgtctgcatcacacgcgccgaatatgcccgactcacgcgcgtaacggacagatgcgccagctctgatttacaggaatttctgacagaaggtgttatccgcaagcgaggtggagggcgttcagtggtttatataaaacatcaggtatagtgtatcgctttccgtaaggcatctgctctgtatcgggcaggtgccatacctgtatttcttttaaaaaacttcccaaatgtagattgatccggaaaattcagttcaatagctacctgactgacattcatatccggtcggcgcaacaggagttttgcttctgtcaccacggcatttgtgatccatttcagtgccgattgcccgtcacactcccgtattatcttcgacagataatccggagtaacacacaattcctgcgcataaaatccgacatcacgatgtttacggcaatttcccaaaagcaattcgtggaaacgctgccgaattatttcattacgcgaaaatgagatttctctttctccatatttcttccaacggctattggttatatcgagcaatagatttatcacctcatttttaattacagtggcccgatacagatgatccgagtccgctatatacttctttatacgttctatccgattcagcacaattgcacattcatcatcggtcaaactctgttctggatatagacgttttaagtttcctgcttccggcaaacgtatgctggaagttaatgacatgatttcctgcttcagttccggtgaaaacaaaagcaagtatcctctgaaaccgggagtatacgatacatttcctattatattatcagccagtagctgcatcacggtacttcttttaagagtataaggcagataatccacttcaatttgcatttcacctgacacgaccaatattaaagaggaggcttcaagctgcatgggatacctcccaaccttatcttcttttgtcaccgaatcgtccaagtagataaccaccaactgctcctgaaaggaggattgaggattcattctttcaagataatcctgaaaacttaaatcaagtactgtatctttcatcacaattctgataaatgactaattttaaaatgcaaatttaataattattcttattataaacagatacgtttcggattatgactaattatagtagtaaaatgaccttgtcaattcatctattctgtccgacctttgcgtcacagaaaaaacttaatatttaaggaatatggaatatttaaacttatcgaaagagaaaacaagtaacttcatgctttcgcgcataggcttgggaagtatgagaatgggagacgtaagtgaaggtatcaacacgatacatacagctttggatggaggagttaatttcctgaataccgcagacttctacggaaacggacaaagtgaaatgctgataaaagaggcattaaagacccgcaagcgggaagatgtctttatctctgtaaagtttggagccatgcagggtgtggatggcagaatgtacggaatggatgcccgcccggaagctgtggaaaactacctgcgctatacactaagccgtttaggtactgactatgtggatttataccaacccgcccgcatcaatccacatatacccgtagaagacaccatcggcgctatatccgatctggctacaaaaggatatgtgaaaaatataggaatctccgaagtgaatggagagatacttcgcagagcaaatgcagtacacccgatcagtctggtcgaagtaagatattcgttggcagaccggcatatagaagatgaccttttaccgacagcaagagaattaggtgtcggcattgtagccttcggcgtactcctttcgggactgattggcggaagttcacaagaagaaaaattaaaatctatcggtcagagaatatctccggaagcattggcaacgatgaaagcaaatcttgcccgcaccaatgcgctgaaacagattacagttgaaaaaggaactaccctggcacaacttgccatagcctgggtgttggcgcaaggtgaagatatcatagcactggtaggttcaagaacagcctcacaaatcaaagacacgattcaagcattgaatgtgaaactaacgaaagaggatctggacagaataaaacggattatgccaaaagaagaggcaacctgttcatacatgttggatgtggatatcgattccaaaggattattccatgccaaacagtagcattgcttagcgaggaaacttggatgaaagtgcctcgtagaccgccgaatggaggaagtaacgaacatctttcccttcctccatcgcccggcgaataaaggtagaactgatttcaaaagtaggagaagaagctacttttacattctccgaaagggaatcgaaagaaaccggataaccgggacggggatatacaagaatatggttttcggcaagaatacgttccgactgataccagcggggaaaaagcgtccagttgtctgaaccgataatcaaatgaaattcccggtcgggataggtttctttcagtttatccagtgtatggatggtataggacggacggggtagattaaactcaatatcagaagctttaaacttgggatacccctcaatggcaagttgaaccaacttcaaacggaaggcatcatccatcaattcatcttcttccttcagcggattatgaggggttacgagaaaccacacttcatccagcccttcatattcgcaaagataattggcaagggcaagatgtccgatgtgtaccggattgaaggagccgctgaagatacccgttttcattcttttgttttcatacgtttccagcaagtataaacattgatgcaacttgaaagtaccaccaatgtcataccaagaacgattgtccattggctataatacaacgccatcagacctgacactaaagatataagtgccaggagtgcgttgagaatcaacaatgacttgttctgtttaggagaaacaggttttggctgatacatgacagaccttattatttcgataaaaactctgtaattacctgcaaagcttccgccttagcctgctccaagtcatcatttacaatgactttatcgaacttaggtgcaaacgtcagttcatattccgccttagctacgcgggcttctatcacttcgggagcatccgttccacgtcctaccagacgtttacgaagttcctctaccgaaggaggctgaatgaacactgacagagcacggtcgccataaaacttctttatattgcagccacctacaacgtccacatcaaaaaccacattttgtccggcagccaactgagcttctacctgagacttcaatgtaccgtagtaacggtctttatacacttcttcatattctagaaactcgtcattggcaatgcgggtacggaattcttcgggagaaagaaagaagtactccactccatgctgttctgttccgcgtggcggacgactggtagcagaacaagaaaaagccagattcaggttctgccccaataaatagttgataatggttgatttccctgacccggaaggggctgagaatataataagtttagccatattgaaatagtaattacatcacgttcaatacctgttctttgatttgttccagctcatccttcatctgcactacaatcttctgcatctcagcatgattggacttgcttcccaacgtattgatttcacgtcccatttcctgggcaatgaaacccaatttcttaccttgcccgcttccatcctccatagtattaatgaagtatttcaagtggttgctcaggcgttgtttttcttcgtttatatccagtttctcaatgtaatagatgagttcctgttccagacggttcttgtcatagtccacgctgatagtcttttccagagcatccgtgatgcgttctttgattttctctacacgctctttttcgtacggatcaacagaagtcagcaacttggcaatattagaaatcttttcgcggaacttcttctctaaagccgcgccttcctggatacggaaatcaaccagattttggatagcttgaagcacagtggcatgaacagctttccattcttcctcgctcagttcctgaatatcgttctttgtcatcacgtccggcatgcggagcaaagtagagaaccagtcttcgggtgcagggataccggtagtttcggagatagtgcgaattcgttcgtaatacgccactaccacatcctgattaatgggagtaataagttcacaggcatcttttttatcaatccacagactgaaatccactttaccacgttccagtgccttagcaatttcgttacggatttctatttctttttcccggtagaggggagcgatgcgggttgacagatccatcgctttactattgagcgatttgatttctacattgattttcttatcggacagttcagcggtcgctttaccatatccggtcatggattgtatcataagattctttagttttccgcaaaattacatgaatattttcattagtgaaaattattcaagaaataagtgatgtgtttatcgcttactctttactccaaatacgtgtgttcaagttcagttcatctacaatttccagcaaggattggagcactgcaaagtccgatttaaggatactcatatcactcaaagaactccacacatctgcttcaaaccggttctttgaatccggaatggcgaccagaatcgtagaattccggaaactgatggtaattcctttcttaaaattgctgtccaacttcaacattctttccatcatggaaggggtaatcagatagcgggcttcaatctggttcgtggaaaagacatcaaagactttttcaaaatcgggattttccattttcactcttgaagctcccatcttaattttgaaaaagctgtcccgcaaaacggtcgtttctccctgaaattctttatgaaagtcagcaatgaaaagaaatcctttgaaaatatcttcccaataatactgcactccattcttggtagaacgagctctgcgctcttcagcatgtacctcggaacagataaagctggttttatccagacatccttctatcaaatcttcggcatgataacggtcgggagaagtaaacagtccgctatttctaaaaagatcctcactcactccgtcattcggagaataggtcgcattcggacaaaaggcatggattatttcatctaccacttcttctttataaaaagaggagaatattttcgatttattattgatacaagtaataaaaatgattacagaaataacaacaataactatcggaccaaagatcccttccaatttaagtattagcaaagcaatcactcctactaccagaaaaatagcagcataaatcaaaccctctgaacgtcctttcctcaggagttccttacgtttattttccagaacttgcaatgtgggggccagcttctgcgccagagaatcaaaatctacataatccattgccggctattttatgaattgaataagttccttacatccggagttgcacgttctgcttccggaattgtcagcaccgcttttcttgtaaagccaaacatacctgccaacagatttgtagggaaagtctggacggcattattgtaatcggttacagaggcattgtaagtgcggcgggcagcagccaactgttcttccgtttcattgagcgaacgctgcaattgcaggaaattttcagaagcttttagttcgggatagttctcagctactgcaaagaattgagtgcgcactttagaaaacattttgtcaaagtccgccttttcgctgtcattaagagaagcataagtcttgttgcgcatttccgttattgcagcaaatgtatcagcttcatgcttggcatattgctgaacggttgcaaccagattggggatcaaatcgaagcgacgtttcaacatgacatcgatagtggaaaaagcattttctatctgatttctcttcctcaccaatgagttgtacatcgaaatcaccaccaaaataaaaagtacaataataatagctacgatcataattacagatacaacgacctccttgtgccggttattttatgttaacgaattcagtatttattcctaaaatcagatagcaaagatagaaataatctaaaaacctgccaataatgccgtaagaaagataccgaaccctttttggattcgcttgtgtatctgaaaataaacctgtaaatttgccacaattaaactaacaaaagactatgtcgtgtatcttgcatattgaaacgtccacctcggcatgctccgttgctgtgagtgaagatggacaaaatgtatttaacaaagaagatctgaacggcccgtctcatgccgctctgctgggagtatttatagacgaagctctgtcgtttgccgacagtcatgccatgccgattgatgcagtggcggtgagttgcggaccgggttcttacaccggactacgtatcggcgtatctatggcgaaaggggtttgttacggacgtaatattccgctgatcggtcttccgacattgaaggtacaatgcgtgccggtattgctttatcatgatgaattgcccgaagacgcattgctatgcccaatgatcgatgcacgccgcatggaggtatatgctgccatctacgaccgtgccctgaaacctgtgcgcgacatagccgctgacattgtagacgaaaactcttatacggaatttctggatcaacatcccgtttatttctttggagacggggcagccaagtgcaaagaaaaaataactcatcccaatgcgcacttcattgacgatattcgtccgctggcgaagatgatgtttccacttgctgaaaaagcaatagccgaaaacgactttaaggatgtagcttattttgaaccattctacctgaaagagtttgtagcttcccaaccgaaaaaacttttataatatatgcaatataacactcaacaaaaacggatgcctttgccggaatacggacgcagcatccaaaacatggttgaccacgcgttgacaatcgaagaccgcgctgaacgccaacgttgcgcaaacaccattatcaacatcatgggtaatatgttcccacatctgcgtgatgtacccgattttaaacataaattatgggatcatctggctatcatgtccgacttcaaactggacattgattatccttatgaaattatccgcaaagataatttgaatacccgtccggaagtgatcccctatcccagtacaaaaatccgttaccgccactacggccgtacactggaagtattgataaagaaagcaattgacttccccgaaggagatgaaaagcaaaacctgattgccctgatttgcaaccacatgaagaaagactacatgacctggaacaaggatacggtagacgaccgcaaaattgcagaagatcttaatgaatattcgggtggcaaattgcagatgacggatgacatcatcaaactgatggctgaacgtatcaatcagaactaccgtccgaaagtaaataatcagaataaccggagagataaccggaataataagagaaagtactaatagatttatgatttcagatttatgatttataagcggcagatccgttcataaatcataaattataaatcataagttataaatcccaatttatggcatcattcgtaattgaaggaggacacagattatccggcgagattcatccgcaaggcgcaaaaaacgaggtattgcagattatctgcgccacgctgctgacagccgaagaggtgaccgtacataatattccggacatactggacgtcaacaatctcattcaactgatgcgtgatatgggcgttacggtatccagaaaagggcttgatacgtattgtttcaaagcagaaaagctggatttgagttatctggaaagtgatgaattcctgaagaaatgttccagtctgcgaggttcggttatgttaatcggcccgatggtggcacgctttcataaagcgatgatatcaaaaccgggtggtgacaagataggacgcagacgtctggatactcactttatcggtatacagaatctgggtgcagatttttcgtacaacgcagagcgcgaagcgtatgagatttcagcttgcgaactgaaaggcacctacatgttgctagacgaagcttcggttaccggaactgccaacatcgtgatggcggcggtactggccaaaggaacaaccactatttacaatgctgcctgcgaaccgtatctgcaacaactttgcaagatgctaaaccgcatgggcgccaagatacaaggcattgcctccaatctgctgaccattgaaggagtgaacgaactacacggtaccgaacatacgatacttcccgatatgatcgaagtcggcagttttatcggtatggcagccatgacgcaaagtgagctcaccatcaagaatgtttcttatgaaaacctgggcatcatccctgaaagtttccgccgtctgggcatcaaactggaacaacggggagacgatatctatgttcctgcacaggaaacatatcagatagagtcgttcatagatggttctatcatgactattgccgatgctccctggccgggactgacgccggacttgctgagtgtaatgctcgtagttgccactcaggcaaaaggcagcgtgcttattcatcaaaaaatgttcgagagccgcctgttcttcgtggacaaactgatagatatgggagcacagattattctttgtgaccctcaccgtgccgttgtcattggtcataaccatgccatgcgtctgcgaggcggaaatatgacttcacctgatattcgtgccggtattgcattgctgattgccgccatgagtgcggaaggaagcagtcgtatccacaacattgaacaaatagaccgggggtaccaggatatcgaaagacgcctgaatgctatcggagcaagaattacgagaatatgatataggatggtggaagatgattaagaatggtaggatgataagatgataagatgataaaaagagaagatgtatataagataggagtattcaacaaaccgcacggcattcacggcgagttgtcattcacattcaccgatgacatttttgaccgggtggaagctgaatacctaatctgcctattggatggtattttcgtacctttcttcctggaggaataccgtttccgctccgactccactgcattggtaaagctggaaggagtagacacggcagaacgtgcgcggatgttcaccaacgtggaagtttattttcccgccaaacatgtcgaagatgccggaccgggagaactgacctgggatttcttcgtaggtttccgcgtggaagaagttaaccacggagacttgggggaagtgacagaggtggatactgcaaccatcaacaccttgtttgtagttgatcatcagggagaagagttactgattcctgcacaagaagaattcatcctgaacattgaccaaaagcacaaagtaatcactatggatttgcccgaaggattgctggctttggatgaaacagaggaagtgtaaacaagtgattagtgatagagtgataagtgattagcgcgtatggtgaaaaagaaacgacataaagcattctggagtaatatcaaattcaaatataagctgactatcatcaacgagaatacactcgaagaagtagtcggtctccgtgtatccaagttaaacggcatctcggtattactttctgtgctgactgttttgtttctggttgcctcagttatcattgctttcactccgttgcgtaactacttgccgggatacatgaacagtgagatccgtgcccaagtggtagagaatgctttacgagtagattcacttcaacagttggtagatcgccagaatttgtatatcatgaatatacaggatattttcagtggaaccatacgtgtagatactgtgcacaatatggactcactgactactgtacgcgaagattcgttgatggaacgcacacagcgggaagcggagttccggaaacaatatgaagaaacagaaaagtataacctgacaagcattacagcccgcccggacatagaaggattgatattttatcgtcccacgcgaggcatgattacagacaaatttgatgctgacagaaaacattacggtacggatatcgccgccaatcccggagagagcgtacttgctacgctggatggtacagttatcttgagtacttatacggccgaaacaggatatgtgatagaagtacaacataatcaagactttatatccgtatataagcattgcagttccttattgaaacgtgaaggggacactgtacaggccggagaggctattgctttggtaggaaacagcggacaactgacaaccggtcctcacctgcactttgagttatggcacaaaggacgggcggtgaatccggaacaatatattgtattttaagtgatagataaatgaaaaaacaaattgctatactcggttctaccggctccataggtacgcaggctttacaggtgattgaagaacaatccgaccagtacgaagcgtatgtgctgaccgccaacaaccgtgtagaagaactcattgcccaggctcggaaattcaagcctgaagcggtagttatagccaacgaaacgaaatatgcccaactgaaagaagccctcgccgacctgcctatcaaagtatatgcaggaacggatgctatctgccagattgtggaagactcggaaattgacatcgtactgactgcgatggtaggttatgccggactgaaaccaaccatgaatgctattcgtgcccgtaaacccatcgctcttgctaacaaggagacgcttgttgtggcaggtgagctgattaacgatatggcacgcctatccggtacacctatattaccggtagattccgaacattcagccgttttccaatgtttagcgggggagcttggcaatccgatagagaaagtgatccttacggcatccggtggtccgttccgcaattgcacaatggaacaactggctacggtaaccaaagcccaagccctgaaacatcctaattgggatatgggagcgaaaattacgattgattccgcttcaatgatgaacaaagggttcgaggtgatagaagcaaaatggttattcggtgtacgtccggatcagattgaagtggtagtacatccgcaatctattatacattcgatggtgcagtttgaagacggtgcagtaaaagcacaactgggtatgccggatatgcgtctgcctattcagtatgcattctcttatccgcaacgcctgaaggcttcatttccccggttggatttcaagatgtgcacaaacctgacattcgaacaaccggatactacccgtttccgtaatctggctttggcttacgaagctttgcataaaggtggaaatatgccttgtatcgtgaatgcagccaatgaagtggtagttgccgctttcctgcgggatgagatttcattcctcggcatgagtgatgtgatagagaaagcaatgtctatcgtatcatttgtggcaaaaccggaatatgaagactatgtagctacggatgcgatgacacgccgtattgcacaagagttgataaaataaaatagtacaggtattagagtatctcaactcccttcttcctcggaggagaataagaatagtaaatagtagttaatagtaaaatagaaaaattattagatggaaacatttttgattcgtgccctgcaactcattatgagcctttcgttgctcgttatcgttcatgagggagggcacttcctcttcgcccgtcttttcaagacacgggtagaaaagttttgtttgttcttcgacccttggtttaccctgttcaagttcaagccgaaaaatagtgatacggaatatggtattggttggctgccgttaggtggttatgtaaagatagcaggtatgatagatgagtctatggataccgaacagatgcaacagccaatgcaaccgtgggagttccgggccaaaccggcatggcaacggttgttaatcatggtaggtggtgtattgttcaatttcatattggcattattcatctattctatgatactttttacttggggagatgaatacgtaccggtacaaaaagccccgttgggtatggaattcaacgaaacggcaaaagctatcggtttccgtgacggtgacgtacttatatctgctgatggtgtaccctttgaacgttacggtggtgatatgctgacaagcgttgtcgatgcccgccaggtaacagtacgccgcgatgggcaagaggtatccgtttatattcctgagaattttatggagcgtctgctggcagacagtgtacgttttgcctcattccgctatccatatgttattgatagtatttgtgccaaccgccctgctgcccttgccggcctgcaagcgggtgacagtattatgcaattggacggaaagaacattgcttatttcgatttcaaagaagagatgttacgccgtcagaaagcggattcagcttctcattatatcacattgacttatgcacgtgccggagtgatagataccataacttttgctacagattcaatctatgagataggtgtagtagcacgtacggcaaccaatcagttactgccggttgtaaagaaagaatatagttttctggcctctttccccgctggtgcagcattgggagtacaaactctgaaaggctatgtaggacagatgaaatatctcttctctaaagaaggcgccaagcaattgggtggctttggaactatcggaagcatctttcctgctacatgggattggcatcagttctggtacatgacagcattcctttctattatcctcgccttcatgaatattctgcctattccggcactggatggcggacatgtactattccttatttatgagattgtggctcggcgcaaaccaagtgataagtttatggaacgtgcgcaaatggtgggtatgttcctgctattcggattgctgctttgggcaaactttaatgatattctgcggttcctgttctaacgcaggttctactttataaaaacaaatagaccatctattcgaagtgagtagatggtctatttattatatgaaatatctatcgtattttcttacactaaatgtccgatccactcttcacgatctcccggcaaaagatcaataaccggaacctctaccatcgtgtaacaacctggttgttgacgcatggaagcgcgagctacacaaaccaatacctgagcagtaagtgcaggattattaatgcgcatattgaactcaaacaattgattctgagttttaccggaaacacctttacgagtgaggtttacaccatgtcccatgtcaagcaaagcatctacgctgggaactaatttcacatgtgtctcgtcattcacaaagtatggatctgccttgatggcagcagacactttatcaaactcataaccgtctttcaattcgatataaaccatacggcggtgaataccagttccggtaggaatagtcatggaaagagctgcctttacaccgtcaatagcttttacagcaactgtatgtcccatactcattccaggaccaaagtttgtataagtaattcctttcggagcaatcgcttccaacagggtacgtacgatagagtcgcttcccgggtcccaacctgcagaaataatagaaactgcattatgctcttttgcagaagcagacagtgtgcgacgcaaatcgacaataccggtatgaatatcgaagctgtcaaccgtattgatgccaagtgcaaggatttctttggcataagtctctacactgcgggtcggtgtacaaagaattgcaacatcaacgccttccaattccttgatattctttacaacaggatattcactcagttctgcgggacggttttcagctccagctcggcgtactacaccggcaatttcaaagtcgggagccgcttgcaacgcttcgagcacgtattgcccgatattgccatagccaacaatggctgctcttacttttttcattcttttattgaatttatttatcagttttctattttatcggcacaaaagtaatcattttcattcaatttaaccacaaaacgattcagtgttccacagagttttttctttattaagacttctttcaaacttatgtaccttcaatgacttatcactctaaaacaatttccaaaggaaaaagttccctgaaactcttctgagtctgtaatgaagaaacacaatattcctcgctcgcgcgcgttatagtaagtattatgatagaatacatcagaggcggacttgccgagctcagcccggcaaccgcagttatcgactgtaacggattgggatatgccgttaatatttcattaaatacgtatgctgccatccaaggcaaaaaagagtgtaaactgtatatctacgaggctatacgtgaggatgcatatgtactctacggctttgtagataaacaagagcgtgaattattcttgttgctgatttccgtttcgggcattggcggtaatactgcacgaatgatactttcagcactttcaccggcagaactggtgaatgttatcagtactgaaaatgccaatttactgaagacagtgaaaggtatcggattaaaaacagcccaacgggtgattgtggatttgaaagataaaatcaagacaggtgctgcaagcgcaggaagtacgataggaagtctcggcggaatgttatctgctgctaatgcacaggtgcaggaagaagccattgctgcattgacaatgttgggatttgcacaagcaccatcacaaaaggtagttttggcaatattgaaagaagaaccggatgcaccggtggagcaggttattaagttggcgctgaaaagactttagtaaatgataagtggcacaagcaaaggttacctgcctgttaatgtcctccgtttagtttcaccttgactgagttattctcaagcctgtgagaaaacattctcataggcttgagaataaagtctcacaggtgtgagaaaacattctccctacggtgagaataaaagaattattctaccgaaagataataacatgaagtctcctcgtatacgacatatcatctggttattgctgctgtggctcatgcctggcagctttgtcgttatgggacagaatgtaaatggggagagtgcacaagaagcagaaaatgtacaggatacaatagctccgcgatattccgttcgcaagaccgtgccgggcacactaaaagacctttctccccaccctgccgacctgcaatcgcccatgaacctgcgaaccgaggcagaatatgatgcaaaaacagacagatactacatacgcacaaaattagggaataccgaaatcggtgtaccgatggtactgacccccgaagaatatctggattggacattgaaacaatccatgcaatcttattaccgccaaaagaacggagaacaaatcggcaaaggaaaagaggcttttgactttatggatatgaagttcaaccttggtccggcagagaagttgtttggtcccggtggggtacagatacgtacacaaggtaatgcagaactcagcttcggcatgacgtacaaaaatgtgaagaacccctcacttccggaaagccaacgcaaaacactcggttttgactttgacgagaaaattaatatcaacgtcaatggaaaagtaggtgacaaggtgaatatgaatatgaactacaacaccgatgctacctttgattttgacaccaaacggctgaaactgaaatatgagggaaaagaagatgagatcatcaaactgattgaagccggtaatgtgagcatgtccaccaataactcactaatacgcggggcatccgcactgttcggtattcgtacagacctgcaattcggcaaactaaagctacaagctgttatcagccagcaagaaagtgaagcaaaaacagtgacaagccgcggtggtgcacaaaccactacgttcgacttctccgcagataattacgaaggaaaccgccacttcttccttgcccattattttcgggatgtctatgataaaaatctggcacagcttccgaatatcctttcaggaatcacaattaaccggatcgaagtatgggtaaccaacaaacgaaataactatgataatccgcgaaacatcgtagcactaactgatcttggagaggcctttcacataggcaacactaccgcctggagcggagtgggaaacccgaccaaccccagttcaaacgtcaacgctcccgccaatagtgccaataacctctatgcggaaatgctcagccgctatgcagccgcacgcgatatcagccaggtaagtaatatcatgagtacaatccccggatccgaacccggcatggattacgaaaaaatagaaagtgcccgtctgctcacttcctcagaatacacactaaacagcaaactcggttatatctcactgaagcaaacccttcaaccggacgaagtactggcagtcgcttttgagtacacactcggtggacgaagttatcaagtaggtgagttttcttcagacatcaaggaaaccgggcaaagtttgttcgtaaaattattgaagaatacagcaaattccccggacgcagcctgctgggatctaatgatgaagaatgtctacagtctcaatgcctactctgtgcaaaaagaaaaattccagttgaacatcacttaccaaagcgatacaacaggtgtatatctacgctacattccagaaggaaagattgccaaaacacccctgttgcgtgtcatgaacctcgaccgccttaatagccagaaccaaacaggtgcggacggtttcttcgactttgtcgaaggctatacggtgacagcttcggacggacgtatctattttcccgtagtagaacctttcggcagccacctgcgcaaagccatcggaaacgatgcgctggcagacaaatatgtgtttcaagaactgtacgactccactcgcaccgtagcgcaacaaacagcagaaaagaataaattccggctaacaggtgaataccgtgcctccaatgccaatgaaatacggttaggggctatgaatattccacaaggttcagtacgtgtgacggcgggcggtatgacactggtagaaaactctgactatacagtagattacacattgggagtagttaccattctcaaccaaagcatcattgatgccggtacagccatcagcgtaaatctggagagcaatacgctctacagcatgcaacgcaaaacgatgatgggactaaacttcacctacgatttctcacagaacttctctttcggaggaagcatcatgcacctcagcgagaaaccactgacaagcaaagttgcaatgggtgacgaaccactctccaacacgttgtggggagtgaatgcttcatggaaaaaagaaagccagtggctgacaaacatgctggacaaactaccgtttgtcaccgcaaccgcccccagcagcatcaatctcggtgtggaattcgcccatctcattccgggacatgccaaaggactacaacaaaatgcttcgtacatcgacgatttcgaaagtacacaaaatggcattgaccttcgtcagccctcatactggatgttggcaagcaccccctctcccctctttcccgaagcaacctgcagcaatgatatcagttacggaaagaaccgggcactgctggcgtggtaccatattgacggacttttcacccgccgtaactcttcattgacacctacacacatcaaaaacgacctaaaccagcttagcaaccactatgtgcgtgaggtctatgagcaggaactgtttccaaataaggaaactccctaccaggaatcggcttccatgaacgtactgaacctagcctattatccacaggaacgggggccatacaatctggatacagacctgaattccgacggtactctgaaaaatccggagaatcgctggggaggcatgatgcgtaaactggataccagtgatttcgaagcggcgaacattgaatacatctctttctggttactggatccattcatctacgaagaaggcaatattgagggaggaataacacgaacaggttcggaaaaggcaacacgagcaaattcccccaaaggtactctctacataaaccttggcgaagtatctgaagacatcctcaaagatggcaagaagttctttgaaaacggtctgcccattgatggagatgcaacaaagaccgaagaaacagtttgggggcgtgttccccgcgatcgtagtgtggtatatgcctttgataatgcagccggcgcacgccgtaagcaagatgtcggactgaacgggctctctactgaagacgaacgtaccttctccacttatcagaaatatctggcagacgtacagggcaaagtggacgcctccacttacgagaaattctacaacgatccggcaggcgacaattatcattatttccgtggctcggactatgaccgagaagagcgtagcattctggaacgctacaaatactataacaataccgaggggaactccaccgcgagtgaagactctccggaacgatacgatatatcttcaaagaccgtgcccgatgtagaggatatcaatcaggacaatacactgaacgagactgagaaatatttccaatatcgcatcaacctgacaccttccgacctgaaagtaggacagaattacatcacggataaacgaaccgccagtgtccgcctgcgcaacggacaaacggaagaagtgacctggtatcagttcaaagttcccgtacgcagtggcgaggcggtgggaagcatcaaagacttcaagtccatccgtttcatgcgcatgttcctgaccggatttgagaaacccatcgtgctacgttttgcaaccttagagttggtacgcggcgaatggcgcacctataccgatgcactgaataatacacaacaaggcgcctctaccaccagctctgctgcactggacgtttctgccgtcaatatcgaagaaaatggagaccgtactccggtgaactatgtaatgcctccgggcatctcccgtgtcatcgatccgggacaaccgcaacttcgtcaacagaatgagcaagccatgagcctgaagctggaaaagttggctcctggcgatgcacgtgccgtctacaaaaataccggtatggatatgcggcaataccgccggctgcaaatgtttgctcatgccgaagctttgcccgatctctccacagatccgcaaaatggcgaactttccgtattcatccgcctcggctcagattaccgcagcaactattatgaatacgaaattcccctcacactcactccgcacggagaatacaacggaagcaccgttgcaggttgccttgccgtctggcccaaagacaacaatcttgacattgacctcagtgtactcaccaatgtcaagaaggcccgtaatcgcttgaagaatatctcgaacagtggtgtcagctatgcaaaagtgtattcggaatacgatccggataaaccctccaataagataagcgtgattggtaatccttcactggcagaagtcaagactatgatgatcggtgtgaggaacaactcacgcaccattaaatcggcagaggtctgggtgaacgaactgcgcctaaccgaattcaacgaagacggcggttgggctgcacaaggcaatctcaacttacaactttccgatatcggtagtatcaacctggccggtcatgtggaaacagccggtttcggtggactggaacagagtgtcagcgagcgtcgactggacgattattatcagtatagtttcaccactacattcgatctgggacgtttctttcctaaaaaggctaaattggccgctcctatttacttctcttactccaaagaggccactacgccaaagtacaaccctctggacaaagatatgctgctggatgatgcgctggatgcctgtaccaccgattgggaacgagactcgctgatgaatatcgcccgtgaaattactacctaccgcaatttcagcctcagcaatgcacgactgggtattacaagtaaaacccccatgccttatgatccggggaactttactttcagctattcccgttccctccgccacaatcagggtagcaccacagcttacgaaaacgaaacggactggcgcgctgcaatgacttataattatgctcctgtctatcgcccgtgggaacctttcaaagctatggaaagcaaatctccatggatgcgtttcatcaaagaaatcaatctgaactggctgcctcaaagcatctcattcaataccgatatgacgcgtcactattatgaacttcaactccgcgacctggaggcattgactgccggaagcagttccatcggcagcggggatctcagtatcgaaggcatccccatctccgtcgctaaagaatttctatggaaccgtgactttgccctgcgctgggaccctacaaaaaacctaaaactgaactttacctctgctacccacgccgagattgaagaaccttacggtgtagtaaataaagacctttaccccgatgaatactcagcctggaaagatacagtacgccgcagcctgctctcactcggccgccctattgatttccagcagacattcaatgccacttataagctcccattcgacaagttccccgctaccgactgggtcagcgctgaccttcgtttcgcctcttcttacaactgggaccggggtgtttccctttccgatggcatagagatgggcaatactgtcagcaatcagcgcagcatcgacgtaaactcgcgtttcaatctcgaagcactctataacaaggtgccttatttaaagaaagtaaaccgccgcttttctgcttcctatcgcaaacccgcctcacccaaagaacaaaagccccgtcgcttcgacaaggaagtacaattgcgtgcagacactacagttaccattcaacacggtatgaactcccgtcgtcccaaagtcaccgctctcacagtggacggacgtcgctatcccgtacgttataaagttataaatgctaattcactacgtattgatacgcaggacacggcacgcataaagctcactgtaatccccggtcccgatccagaagatggttggtggtataaattcggccagcatgctacccgcattgccatgagcgtacgcaatttcagctttacctacaaaaatacgtatgccatgacccttcccggtttccgtcctgaaatcggtgacatgttcggccagaagaaacacggaggcttccttgctccgggaatggactttgcattcggtttcaccggagacgactatatcgaccgtgccttgcaaaacgactggctcatctgcagcgactccgttgtcagccctgccagcagcaatgcccttgaagatcttcaattgcgtatctcccttgaaccgatacgcgacctcaaaatagaccttaccgccaatcgtacccgaaaccgcagccgcgaaatacaatatatgttcgaaggtatgccagatacccgcagtggtaacttctcaatgagtatcatttctatcggtagtgctttcgaacgccccagcgccggtgacggttaccattccggtacattcgaacgtttccgccgcaaccttgacgtcatccgtgaccgtgtggaatcccaattcctcggtgcacagtatccgcaaggcagcactcttgccggaaagacattcgatccggcaaacggcacaatcagcaagcactcaccggatgtcatgatccctgccttcctcgccgcctacaccggaaagagcgctcggaactccgctctcgacttctttcccagcctgttctccatgatgccgaactggcgtatcacctacacaggacttaccaagatagcctggttcaaaaagaacttccgcagtgtcaatctgaatcatgcctatcgcagcacctacagcgtcggcagctacaacactttccagagtttcatgagctatatgggggatataggctttgtagaagatgtgcaatcaggaaatcctatcccttcatcgcgcttcgacatcagcatggtatccattaacgagcaattctccccccttatcggtatggatgccaccctcaaaaacggacttaccgccaaagtggaatataaaaccagccgtatattaaatctaagtatgagtgcttgtcagctggtagaaaccgcttcccgcgatttcgttatcggtttgggatataagattgtaaacttcaatttattcagtggccggaatgtaaaagacagcaagaatcgtgtcagccatgaccttgctctccgtgcagatatttcattccgcaaccaatccgccctctgccgggacatccagcaaggttttgcacaagctaccaatggcaacaaagctctgaaaatatcatgttcggcagactacaccctgagtcgcttgttaaccctgcgcctctactatgaccgccaacagaatactccgttagtgtcctctagctcatatccggtagtcagtgccgactttggtttcagcatgaaattctctctcacgcggtaaatatactcgactattaaggagcaattcaagggaaagtcctatctttgtgagataaacaacaagcaatatgaaacaagcaagaatttacatgaagcgttggttaggaattaacgaacgcagtaaacaactctcgaccgacacctggtatttgaactttgccaatcaactactatctttgatcgatgaatcccctttatacagtaaaaagtttgaagcagagaaagtagacgctgccctttcattggctatttatctgcaagacgccatcgcccagtccggtggttggaaagagttttccaatgcctattacggattgtacaagtcctatcttcctttctatacgctgaccgacgagtatcttcccgacgaaatcaatgtagaggatatctcattcattcagtggacgctcctctcccgctatgccatcttcgaagaggacgaagttattatccagaatcctcatgattctgacctgatagaattcagccaaaaggtatatgatgtgatggataccgcctttgaagaagctcccatctgcgatgagccgtcttctcacatttgggtaatgggacttgatttactggaaatgccattagtaccacttcccgaaatcactcccggaatgacacttaaaaaagatgtggagaactgcctgtcatacagcaaaggagaaccgctgctttattttaccacctacgatgaattacgccgtttctttgtggaagaactaaaatgggaagataaaaatgaaagtctgttaccggaattaagagatgaaagaaactttgtgatctatgccaatgccaaaggtatgctgatagcctctaatgtttcttattgcttctgcgatccacgcaatccgacttataatgcagaaaaagcagctgccaaaggatacaaattattcacttatccgggcacctgcccctttgacctcctgaagtatggtatggcaaaaggcctgcttcctgatatgcaacttcccttccctggtggaaaagaagtattgcacgataattgggacttcattgcacgatacttcttgtgtgagtattacgaaggagagtgaaaataagtgattagttgttagtgataaattgtaagcataacattaatcacttatcactaacaactaatcattatttctacatttctataatctcttccttgcacagtgtcaacttctctaccccgtctgccgtcactacccatgagttttcaatacccagggggccgacacccggcaatacgattttgggttcgagggcaaataccatacccggttctaattcctgcttcatacgcggagccagtacaggagcttcgttgatttccaagccaatgccatgaccaataaatttcgccttctgtcctactcccataaagtaatcggcaaatccggctttcgttacgatatcaatagctgtattatagagatcttcgcaaacagcacccggttttgccttttcaatcacagctgcctgtacatccagacatgtttgatgcgcagcataagccttctccggtaacttaccgatagagaatactcggctcatatcacccatgtatccatagaagtttccacccatatcaaccataaaactctgaccgggttgcaacagtgcaccatttgcaccgataggtatagacggatcaagtccttcaccacctaaagcaaagtcataaggtgcaggagcagtggcattatctcccgccagcaagctacccataaatatctccatactctgaccaaatgtacggaaaatacccagacaaccttccaaacgcatcaagcgttctatttcaatagacaactgacgatctgtcattcccggtcgatacacagaaggaatctgttcataagccttcgtatgagcaatacccgaacgacggaacatttcaatttcaatatttgtctttacactacgtgccttacggatcaggggagtaccattcacaacagtagtttctgggaagcaagctgccagacgggtatactccgtataagagagttcgtctccctccaacatcaatttcgcaggcaaaggtagaccgcactctttcaataaatcgggcaattgttccggtttacggatagaatgtatatgttctccttcaatattattaggacgtttgataaataagcgtgccggagcattcaatggtaaatacagatagccgctgacaacgcgtccgtacgtataaatcaagtttacattgcaagtgataagagcggcatcaatctcttgttgagccatcaagacacgtatcttatcgcgtcttaactttagttccggttgtaacatctctttgttatttaatgattttccgggtgcaaaggtaataattttggtattaagtacgaggtattaagtattaagtttgactgatagttgcgctgtagaagtgaatatacctaattgttggtatgcctataaaaaaagtactgccctacaccttcacaggcaggacagcacaaaccacaaatacaaatacaactaaacaaagttttcctttaaataattccctgacccatcattgcgtgagccaccttcatgaagcctgcaatattggctcccttcacgtagttgatgtaaccgtcaggttctgtcccatattttacgcattgtgcatgaatgccgtgcataatagcgtgtagtttctcgtccacttcggcagcacaccaactgaggtgcattgcattctgtgacatttccaatccggaagtagcaacaccaccggcattgactgccttacccggagcatacatcaccttatgttcgatgaacaggtcgatagcttccggcgtacagcccatattagatatttcacccacacacatcactttattttcaatcaactgacgggcatcatcaccattcagttcattttgcgtagcacaaggcaatgcaatatcaactttcacttcccatggacgcttgcctgcaacaaatgtagagccggggaattcgtctgcatacggagccacgatatcgttgcccgatgaacggagttcaagcatataatctatcttttcgccactgataccattcggatcataaatatatccgtccggtccggagatagtaaccaccttggcacccaactcggttgctttggtagcggcaccccaagctacatttccgaaaccggaaacagcaacggtcttacctttgatatcaatacctttagtttctaacatctggttaacgaagtacaatccaccgaaacctgtagcttcaggacgaatcagagaaccaccgaattccaaaccctttccggtaaatgtgccggtaaattcacgggttaacttcttatacataccgaacatatagcccacttcacgaccacctacaccgatatcaccggctggaacatccatatccggaccaaggtgacgccataactccaacatgaatgcctgacagaagcgcatgatttcaccatcgctcttaccgcgcggagagaagtcggaaccacctttaccaccacccataggcagagtagtcagtgcattcttaaacgtctgttcaaagcctaagaatttaaggatggaaagatttacggaagcatggaaacgaataccgcctttgtacgggccaatggcattgttgaattgcacacggtaaccaaggttggtttgtacatcacctttgtcgtccacccaagtaacacggaacgtaaagatacggtcgggttcaaccaagcgttctatgattttagctttctcgaactctggatgctggttatagatatcttcgatggaaagaagtacttcctttacggcttgaagatattcagactcgccgggatgctttgcctctaaagaggacataattcgttcgatattcataatattacgttttaaaggtttattccttcgtgactttaaggttattcgagcaaattgtcaacgaataacactgcaaatataggaaaacttttggattcacctatacttttcagcgatattttgattaaataatgataaaacgtcaattatagcattaatatttactggctactgattcaatctgagattctatttgctccatagaagaaatcttactacttatgaatacttcatgttgctgcaaacagttcttaataggcaaaatcaagtgattacaaaagtattcatactgtttgtcattccatatattgcgcaaactgctagttatagaatccaattcttgctgtttttgagataatagtccgtattccaacataaaattaccttttagtattttgcaaatgatagataagcttatcaataaaacgacaggcattatcagcatattgttttgcttcattcatacatgtaaaagcctcttgagtgatatcatccgctagattccgggcttgatataatctattctgcacttcttccatatcattctcacattcaatgagttcgtcctccaattcttctttttcatcagttttcatatcaatctcatctaaaatatgtctccgatatgcttcatcttccacgttatataaactgttatgcaaagaatttatagaagactctaaagaatttatttgcctattgatacgttcacgggctcgttcaatgcggcttatcagattttcgcaccgactgaccttgctccgtgcacccgactgaagacggctacgcacagaatcaagtccacttataaaattatttatttgcgaataaaatgaatacaattcgtttatctcccgaacagatacatcattcatattatcttatgtttttcacttgctgaatagcagcagcataacgacgcatatatgcactgtaatcattcatcatctgccctatttgattaatgacttgtacactctgttcaaattgctgcatgaactgttgattctgttcatcattccatccctcatttacacgatacatttcagctttggccttattaaagttctgcaccatagcattacttagtccgttcaaggcttgtgcaaaagcgatgagttcttcttcatttcttacattaacttcatgtgccataataagttatttcattaagttttttatatcatttactgtaatagagtcaaaaggacaataaagtatttctgcccctgttatgtcgttacgaaagtagctgcgcaaacgttcatggtcatcactcatttgttccggcttaaaatcatcagacagagccagttttattgccgtttccgaatctgttctctgaacaacaacatactggaacatcgaataaatatcttttttgttcaaagaatattcctgaaagagtaaattatccagtttgttaacttgaagaatagtgtgaatcccataatcaggtccttttgttaaaacagtttgcagtatgtgttgcacagtatctaccttgtttttagattttgcagggttttccatcacagattctgctgtaaacgggaaaggacaatctgataaaaaatcatttgcattttgattggcaggagttgatactggcgaataatcttcaactggcagttcaacctccgcattatgctttagtgatgtaaagtaatcttgttcaaggataaacaagaaagtatcttctttttctcttctttcgcgtatctgtatcgccaattgtgaaagtatctcattgcgttggcgattgcgtaccaagatatgacaaccataatcttccaacgtattcaaaacttcttcgtcaacagcatattcatcatcggggtccatacaatcaataagatagaaacgagcatcttcacccatttttttataatagtgcatcaacgagagtagtatatttagctggatacgggtactttgtagacgctcattaatacctactaataatagattagaggctgtttcaggtttaaaacttacagaaaccaagttcgatttcacactgatacctctacccagataaactgcaggataacgccggggcaattcatccggtatccagtctaccaatctatatgtctgctttccagagaaatagaatggttggaaatccactatacagtttgtacttttttgatttatattctgcaaattttcagccagtctctcacgatcataaaaatccgctttgaatataatcccctcctcaaaacctttagggcggtaatatacctctcccgtggataaagcctctgtacgagttcccactgtaggaataaatacttgcgcatccgtcatacgacaattcaacaagtaaggatctgtgatattattttttattccccctggaatgttagtccctgtcaaagtctgagtggcaaaaattaaatgtaccccctgattacgtccctctttagcaatacgtgtcagaataacatctatttcactttgtattttaaatcttccttctttaaaaagttcatggcactcatctaccagcaaaactatacgtggcaactttttattcgatgttattgcattgtaatctttcaaattagagacttcttcattgcgcataagtcgtgcacgttcttgcatcacctcccacaaatctttcaatatttccaatgtgatttgtgggtctgattcatccaccattaaacatcgtacatgtttacaagtccgataacgattaaattccacacctccgaacttaaagtccatcaaatagaattgcaggctctccggagaatacttcaacatggcatgatttaaaatatcatgcagaaagaccgattttccagagcctgtttggcctattataaatgagtgtacatgagatatttcatcaagaacaaaattaatacgcccctgattgtttgttcctacttcaatactgaattctttagctgcatcctggtaaggagtaacagtcattgtttcttgtatttgttgtttttgcaattcggcttcccgttcctgttgctgtgaaagttccttttggaagttctgataacattgctgccatttttttaatatttcaattcttttggaagcagttcctatgggagtatttgctacagccgacattttaggtccatccgtttcaacaaacaactccttttcccattgagaaggcagattacctactacaataatatgaaaacctacacgccaaccattgcgaataatggatttcatagcttctttcaggtgtgaatctagctgttgaggcaaatcatacaatacaatcacctcataaggatattctatccgtttcttccggaggtgatattttatgatatcacctgcttcacggaatcgtttttctatctctgaattccaaacttgtatttgttttaatagatcacctagctgcaagatagtctctcctaccatcacatcatccaattgcttgaaattctcaaaggctgaagtgaaattcaagtcaacgccggtaatatgtaatttgccgggaacgaaatgcaacaacatttcagtgagtataaattcggccttcgcttgatctactatggataaatgaaaataactgctcttcccttctatttgccagtttatcatttggggaatatcagcagttacatagatattaccataacataaagtttctttccgttcataattgataggaaattgttcacatacataccgtttatctgcagcttgcagacaactgtttatatattcttctacggaataatcctctttctctttcactatgtaaggaagaaggaaaggatcatgttttcttaggagttcttttccgtaatttatactgtcttctgctattgagcgagagttccgggcacaataactcataaaatcatcacatatcagcgctgctttctgcttgaaatttttaggttgatcggccagactaggaaggtttttcagttcttttcggatatcaggataaaaagtttcaagatctgtatatgattttagcacttcctcagcaataatttctcccagctgattggcacgcgacaagctatcactatataacagcaatcggcctgcatctacatattgattagtgtagtctttaaaacaattgaaaagtcttcttttcagttgttcaatattatacaattgcacgtgtcgttcgacctctgtttttataatatcatctgtcaggctcataactactttcctaaaattttcttcaatttgtttaatgtcggatgctccaactcataaataaactgcttggcattttctaccatcttgactttctttacagaatcaggatatggtgtatactttatgaaggaccgataaagttccaacgccttttgctgattcatttgatatcctcctatcccctgatgacagaatacagcccaataaaaataagcgttagtatagctaaatttattaatagctacagatattaattttccggcttttgtatattgttgttcatcataatagatatctatcaagcggcaaactgctaatttatgattttgatcggcagctttttgaagccattgaatagcggtaaatacaggatatgcatcttcaatcgaataaagtctagaattaaaaaacatttctcccacttcatattgagcttccgcatacccctgattggcagcctttaataaccactccagagcaaatcgataactacaattagtacctattccattcttatagcataatcccagttcaaattgtgactgttttattcccttcttagcagacttttcaaaattctgaaatgccatttgaggtgatttctccgtaccataaccatttttataacaaagacccagataatactctgcgtatttatccggattcacatcttcatatctgcgaaaataccaaaatgccttattaaggttcttatttaatttgccatatccgtaatagtaaaacattcccataaaatagtaagtgccgctaaatgttccggcattactgaaataagcaaatgaacggtcaaagtccttaataactccccaaccatgataatacattactcccaaataatagttagcaggaagattaccatgatttacagctgtttgcagccatgtcagagcatctttatattccttgaccaaatatttttcttttcccaactcatattgggcagctatgcaaccttttaaggcagctcttcgataccaatccaaagctctagccttatcctttatgcgatgtacaccctcagtataagctttccccattttatatgccgcctcagtatgcccttgcattgctgctttttcataccatttataagccattgcataatctttttcagctcctgcacccgattcatagattgtacccatttgatattgagccaagacatgtcctgcttcagcagctttcaagtaatattgcacagcctttgcatggttcacaggcactcctttgccagaatcatattctacacctatgttatatagaaaagccggttcccctttcgtaccgatcaaagtataacagacatgaagcgatagaccagcttctttgaaatgttctatggctttcaccgaatcttgaataactccccacccgttggcatataattttcccaagaagaaatgacaatcagtgacatattcctttttagcgatcgataccataaaaagcgcgtgcgctttttgatgttgtttcaggttagctagcattctggcttgcccatacaaggcacccttataccctttattcgctgcttgttcataccagtgagcagctttctcgtgatacttcacccattcatatacaatcgccactttataggcagcctctgcattgccttgatctgcgcatcttttataccatttataagcctgcgctatgtttttctctatatatttacctgtttcatagcaggtggctagtttatattgcgccagttcatgtcctttttctgcagctctcaggaaaaattgcatagccttcacaaagtcgatagctactctatctcctttttcgaattgtaatccagattggtacaattcctctggtgcatctccccttagtcctttaatagaatagtaaaactctcctttggaaagattgtatcgttccacacattctatatacctttccggagatgacataaaccgtttctcagcaaggcgacgaaaaatctcggtagcttcatggtacttacctgtagcaatgaagcattcagctaaaaaatactcagatttcagatgtcctttcgcaacagcctttttataccattctatagctttaccgggtgctccatcccgttgatgatagtaatagcctatgctataatatgaattagcaattccccctgctgctcctatctcatagaaagcctgtgcagttgaccaactgtctacgcctccataacattcagcaagcatatcggcagcttcaggaagggtagacactttcgaaaggcaagaaattgcttccttacgcagatattcacttgatttttccgatagactcctttcatagcaacgtttgccatattccagataggcaggatataagaagttttttaataatttattcttcagatcatccggaatattccattcatgcagttgtgcgaattgctcaagtcctattttatagttcttctttcgcaggtttactcctccccacactatcttggaataaatgtctcctttttctgctgctgttctaagttgtgtttcacccgagattccacagttgaatgtccgtttcccaatatttagtacatatttcttattttccaatagctccattgccgttattacatctgatatatagggagggacaggacgcaataaaggttcaggagaattaatcgctgaaagtttatttcctaatgattggagaatttcttccgccttcttttgtagttctgcaaagtacataacaggattacatttaatacctttttaaattaattgaaacaaaaataggcaaacaagattaaaaaggcaaattaatcagaacatatttattggaagcaaattctgagatataaaagaatagggttcatcatctattacctaacagatgatgaaccctaaacaccaataagtacttttacttagattttcggtttcattccgagattatacatgataaaggcataagtgtcagcctgttcttcaagaaccttagtcataggtttgcctgcaccatgtccggctttactttcgatgcggatgatagtgggattcgtaccgtcattacattcttgcagggtagcggcaaacttgaatgagtgtgcgggaactacacggtcatcatgatcggcagtaatcaccatggttgcaggatatttggtaccgggcttcaggttgtgcaacggagagtagcctttcaggtactcgaacatttccttactgtcctcactcgtaccgtaatcgcttgcccagttccaaccgatagtgaacttatgatagcggagcatatccattacacctacctgcggaatggctacgcggaacaaatcgggacgttgtgtcatacaggcacctaccagcaaaccaccattagagccacctacgatagctattttatctttgttagtatacttatcattaataaggtattcggcagctgcgatgaaatcgtcgaatacattctgtttctgcatcttcgtaccggctatgtgccagtcttcaccatactcgccaccaccacgcagattaacctgtgcatagatacctccattttgcaggaacggaatacgtgatgtagagaaacccggattaaggctgatattgaaaccgccgtaaccatagagatacaccggattcttaccgtctttcttaagatctttcttataagtcaggaacatcggtatctttgtgccgtccttgctggggtagaatacctgctccgttataaattcatcggagttgaagtcaaccttcggagcacggaagagctcataggtattcgcatccatatcatatttatacgtagcaccggggatagtgaacgaagtaaaaccgaagaaacattctttgtcatccttgtcgccactgaaacctacggaaccgagcgaaggcaacttaatttcctgtatttccttgccgtccaggccatatacatacgcatgattggcagcatctttatcatacgtcaggaataacttctcacctatcacaccggcatccgaaagtacattctcactttccggcaccagctccgtccagtctttcaaagcgggtttattgatgtccgccgtcatgaggcgatatttcggcgcattgtagttcgtaaacatatagattttgtcaccgatcacctctataggagcataagtgtaatccatatccgtagccattgcaacgaacggtgcattcggtttacgcagatctttcatatacaaggcattgccacgtccgtcgccactctcatacaggaacaggatggtttcatcctcattcacactggcagtatagaaacgcttgggatatgcctgattctggtaaaccagcttatcctgcgattgcagtgtacccatcttatgatagtaaatcttatgattctcgttcacgttagagaactccttccctttcaccggagcatcgtaagcgctgtagtaaaatccatcgccctgccaggtagctcctgtaaactttgcccattcaatatgatcgtccagcaacttgccggtttcggtatccattacatagatttcctgccagtctgaaccactacgcgcaatggtatagccggtatattttccattattcgaaaaataaatgcctgtcaaagctaccgtaccatcatccgagagtttattaggatcaagaaatacacgtggttcaccgtccaagctatcctgtacatacagtacactctggttctgcaaaccgtcattcttatagaagtaatacttgccgtgtttcttgaacggtgtaccaatcttttcataattagccacatccgtcagtcgcttcagcagagcatcgcggaaaggtatcttagacaaatagtcgttcgttactttgttctgagcttccacccatgcagcagttgcagcggaagtgtcattctccaaccaacgatacgggtcgggtacttctgttccaaaatagacatctaccgtatccaccttcgcggtttcaggatacgtaagtttctgttgttgttgttgtgcacatgacatcatgatgataccggttgcaaataaagttacttttttcatattatacatatata

SEQ ID NO: 6391 - DNA, 7244 bp, Unknown
  gut microbiota DNA sequence
aaaatgatgtattgatattatgtaagaaaacaatcaaaccattaaaactcaaaaagaattccaggtgaaatcccttgttaatttaagtctaatttaattttaatttattaagtatgaagaatgttagattctttccgttatgtcagcatgtgaacaaacaattatgtagctgtataataataacagctttgacaattgtttcttcgccattgcaggcaaacacattcttattagaaagtgttcgtgagacagaagtactgaattcggtaactcaacaaaaagtaaaagtgacaggacgtgttgttgacagtacaggtgagccgctgccaggtgctgctgtggttattcaaggaactccacaaggagtaactaccgatatggatggtaacttttctatggaagttgaccttaatgctaagttggaaatttcctatttgggtatggaaaaagaggtacttactgcaagtgaattacaaaaaaataaagttgttcaattgaaagatcaaactgatgaacttgaagaagtaacagtagtggcatttgctaaacaaaaaaaggaaagtgttcttgcttctgtatctactatcaaacctgcagaattaaaagcaccgacttctaacttgacaactgctcttgcaggacgtgtagcaggtatgatttcttatcagcgtagtggggagcctggtatggataatgccgatttctttattcgtggtgttacaacttttggctattcaaagagtcctctgatcttaatggatggactggaaatttcatcttcggatctgtctcgcttacaacctgatgatattgctagtttctctataatgaaagatgctactgcaacagcattatatggtgctcgtggtgcaaatggtgtgattcttgtcacaaccaaagaagggaaagaaggtaaggcaaagattgaattccgcattgagaactctattcagaccccgacccgtaaagtagagttagcagatcctattacttatatgagattacataatgaagctgttaaaacaagaaatcctcttggagcattaccatatactcaggaaaaaattgctaatactatagcaggagccaatccttatatgtatccagcaactgattggtatgcattaatgttaaatgatgctgttgctaatcaacgttataatttaaatctgagtggtggtggtactgtagcacgttattatatagctgcgactttcaatcaagaccatggtttaatgaaagtagacaaacggaacaacttcaataataatattgatttgaaacgatatgccattcgctctaatgtaaatattaatgtgacaaagaaaaccaaagtaaacgttcgattatatactacaattgaagattacactggccctatagatggtggtaccacactatataataaaataatgcaaacttctcctgtaggttttcctgcattttatccgcaaacaaaagatacagaacatattcagcatattatgtttggtaatacttatgctactgaaagtgagttctatataaatccttatgcggacatggtaaaaggctatagagaccagagctcttctatgattctagcacaattcgaattaagtcaagacttggatttcattaccaaaggattgaaagcgcgtgcattatttagtactacccgcaattcttcttttgatgtatctcgctattacaatccattctattatctcgccagtaattataattcattggatgatacttataaattgaccgagttaaatcctgaaggaggtactgaatacttaggttataacgaaggaactaagaatatttcaactaatacctatgtggaagcagctgtgagttatgatcgtacttttaaggaaaaacatgccatcagtggtatgctgatttatacactgcgtaacgaattacatgctaatgcttcttctttgcaactttcattgccttatcgtaatatgggactctccggtcgtttcacttatgcatataatgatcgttattttttagaggccaatttcggttataatggatcagaacgatttgcacaaaaagaacgatttggtttctttccttcagtaggtttgggatatattgtttctaatgaaaatttttatagagggccgattgcaaaaattatacctaaattaaaattgaaagctacatatggtttagtcggaaacgatgcaatcggaaataacgaagatcgttttttctatttatcggaggttaatatgaacaatacagattattcatatagattcggtacagactataatgtttctaaaaatggcatttcggttagtcgttatgccaatccatatatcacatgggaagtgtccaagaaattgaatatcggtactgagttcaatttactgaatgcatttgatgttcaaattgactattttcaagacaaacggtctaatattttgcaaacacgcgcagcaatcccggaaacaatgggtgtgcaagctgctgttcgtgcaaatgtaggtgaagccgaaagttcaggttttgatatgtctgttgactataactattcattcaataagaatttctggatgcaaggacgttttaactttacctatgcaacaagcaagattaccaaatatgaagaagtcgattattccaatacaccgtggagatccaaagttggacattccattaaccaacaatggggatacgtggcagaacgtctatttgtagatgaacaagatatcgccaactctcctaaacaattcggagactatttagcgggagatattaaatataaggatatcaataatgatggtgtaattacggaagctgatcaggttcctatcggtttccctaccgatccggaaattgtatatggattcggtttatctgcaggctacaaaggttttgatatttcttgtttcttccaaggattagcacgtgaatctttttggctgaatgtaggaagtaagacagggacaacccatccgtttattgataatgatttaagtggacatggtcagaaccaacttctgaaaatctatgcagacgatcattggagtgagactaatcgaaacatatatgcattatggccccgcctgagtgaaactcttgtttcaaacaataacagaacgagtacatggtttatgcaagacggctcattccttcgtttaaaatcagtggaagttggttactctttcccacataagtggattaagaaagctttcctttctaaattgagaatttactatagtggtacaaatttactaacctttagtaaatttgacctttgggatccggaaatggctggtaacggtttaggatatcctattcaaagagttcacaatatcggtattcaagtcggattttaaataatagatagttatgaaaaaaagaaattatatagtaactttaatgttggtggcagcttcttttagctcatgtgattatttggatgtggttcccgataatatgcctacaatagagtatgcattccgcaataaagtagaggcggagaaatacttatacacttgttattcttatttgcccaactgggtcaatgtagcaaacaatccgggattgaatggtggagaagaggtatggaattgcccctatgtattgggaaatactcagtattatcagatgaatataggtaataatatctcttctccgaatttcaattactgggatggtgccaatggtggaaaaaaactttatgaagcgcttcgtaattgtaacatattccttgaaaatatagagttagtgaaagatttggatacaggtcaaagagctcaatggatagctgaagtgaaattcttgaaagcttattatcattggttcctggctcaactctatggtcctattccattaattaagaagaatatttcaatagaggcagatgaaaaagatatgcgtgtttatcgtgaaccgttcgatgaagtcgtgaactacattatacagttacttgatgaagcaaaagacaatctgcctcccaaagtagagaataacatagctgaggacggacgtatcacaggagctattgcttatgccatgaaagccaagatcctggtgacagcagccagtcctttgttcaatggaaattctgattatactaactttaaagatagtcgtggcatacagttaattagttccgaatatgatcatcagaaatgggaaagagcgcgccaggcttgtaaggaagctattgaattctgtgatgcagaacttggtggcccgggtgaaaggtctttatatacagtgaatgattatatagcaccatctaagatgacagccgaaacccgtttactgaatgcactgaataaagtaatgactgagaaatggaataaagaattgatatggggtgacagccggaatgacattcaaggtttcgaacgtaataaactaatcaccattaatcagactacattccgtacagcaggtgctaactcacagcatggtcctacccttcgcacagtagaaaactactatacaaagaacggacttccgattgatgaagatgccacatgggactataataaccgttataagttaactactattcctgaagatcataagtcttatgctgttgtaggtgaacaaaccgcctatctacatctaaatcgcgaaccccgtttctatgccaatgttggttttgatcgaggtttattatatttgaaaggtgttgacggtttggaaaacgatgaaaccaaacaacataaaatattcagccgcaacatggaggcagcaggaaaaaatggtataatgaactattctggtacaggctattttgataagaaaacagtttcttcagaatgttctgtaaataattcgggggcatgggcaggttatcgttatccatttcctatcatgcgcttaggcgatttatacttgctatatgcagaggctgtcaacgaatgcttgcctaatgataattctctctctgatgaaatatccatcgagtatgtagacaaaatccgtatgagagcaggacttaaaggtatcaaagaaacttgggatacatatgctatgagtcagttcaaaagtaagtatgagacaaaggctggcatgcgtgatattatccgtagagagcgtttaattgaattagcatttgaaggacagacttattatgataaacgccgctggaagttgatgacaacttatatgaacgaacctgtacaaggatggtatgttgaaggaatagaagctgaagaatactatacggtgactactctcttcaaaccgcaatttggggctaaagattacttataccccattagagaatctgatattctgggtaatccgaatctgatacaaaacccaggatggtaaaaaatattagttataaaaatagatatattatgaaacatctattcaaaacaataagtttgttatttgctctcttactcgtcatttcttgtacagatgttgagaaagcacagtttgcaacagatagcacagcaccaggtatagtaagtaattgtaatgtcataaatggtgctggcaaggcattaatcacttatgatctgcccacagacgaagatttactctatgtgaaagccacatataaactgaatgacggtacaaacatggaagttaaagcttcggcatatatcaatgaactggaagttgtcggatttgggaaagccgctgagcatgatattactctaattgccgtcgataggagtgggaatgaatcagaaccagttgtagtaaaaatatctccggcggataatcctatttacgaaatcttcagccagatgaaggtaaccagtgactttggagggctggcatttaactgggaaaataaagaacgggtagatattaccattaccgtaactacccctgacgaacacggtcagatgataacagctcagaatttctactctaactcaaaaatcggtcaaggatatatccgtggttactccacggagacttcagaaactgaagggagacgttttgctgttgtcatttcagatcattggggtaatcaaaccgctataaaggattcattatatttccctatatatgagaccgaaatctcatcggacagatatgctaagtatattataccaggctatggcgatccgggaagatataatagtagctccgactggcctaagttatggaatggttcatgggggacaaacaatgaccattatcacactaaagtaggcttgagttctccaatcaatttgggaatgaacttaggacgtttagttaaactgagtcgcattaaatattatcaacgttcaggaggttccaagtggcaatacttgtatgctcacggcaatcctaaacgcttccgcgtgtggggaactccgacaaccgatggcgttcaactggatattacagaaccgggcaacgactggattttattgacggaattcacttctgttaaaccttcgggattgcctcttggttcaaccaatgctgacgaccaacagttgggtggtcttgatggagaagatgttctgattccaattgatgcaccggccgtgcgttggatacgccttgaagtactggaaacatggggaggagtaactgacttcgttcatatagcagaactcacttattatggtaaagaagaaactaattgaaacaatgatgatgaaaactaaaatttatacagcactcattaccctggcagtactggggatgtgcctctcttgtacagatatcaatcaccttcatgaaccttatttagaaagaggtgaacaaatctatttgggtaagattgattccgtacatatgtatgcaggaaaaaataggattgaagcaggtctctggttctctgatgtaagagccaagaatttagtagtgaaatacaatggtgaaacagattccatttgcatacctttagaaagggagccggaacgcccattacgctcagattcaatattgattaaaattcctaacgtaaatgaaggaacggcaatgactttcaaattcatcatttatgatgctaatatgaagtataaatcattgcctgtagaatctttgtgcagtgcctacggtgataattatcaggaatctatactgaatagacgactgatcaatcatagctatgaaaatggtactctcactataggttggcttcgcactggttctattcagatattgaatacggaaatctattatattcagaaaaatggagaggagaacatgataaaattactccctaatgaagttagttgctttatagagaatgtaaaagctggatccaaagtacgctatcgtagtgtttttcgaccggaagcaagcgctataga

SEQ ID NO: 6392 - DNA, 24038 bp, Unknown
  gut microbiota DNA sequence
actctttcttataatacatcaataatattcctctgtttctcaataaacgcaatcctctgtgcctctccacttcccgaaatcagtgtggagtgccttttcaaagactgtatccagtttttttgtatctggcagatttggggactttgtgagtccatcgaattgatagaatacactctgaaaaggctgatctgataatccttcctgctaacataactgtatgttgcttcaaaatcaatgttcgacaggtagatgtataattcatgtccttcgttgaattcacctttaatggataagtgctccagatccgtgagtaactgttgcaactcatttttcaggtacatgacatccgatgtggatatcaggttcaatccggcaaagtactttatctctttcacgacagactgaaaaacattgctgtcccatacaaagtaggtttttcctacctttctgatgctttcactcagctttttgtgagcgttgatgatcttttcaggcacatgcatatcactcagagagttaggcgttttcatcttcccattctgatagatccaccggcaaatacggaatttggaaagatattcataagatgagtagagggtgaaaggaatggtgttggtggcggaatatgtctcactgttttcatctccgtttacaagctggaatatacgcagatagcgttctacaatctcatagtagctttccatcaagttgggtgaatgcagcagattcaaatcaaaagtgacccggttggataagtggtttccaataatctgatcgatagagatacccagattatgggaaatgacggctatttcatcaaaggtgaatgcaacttctcctcgcagcctgcgataaaccgcttcttttcccatatataatgtatccgtcagataattagctaaattatgtcccggaggaattctctctttcatctgattaatcaactcttttacaatataattctttgtcatagccttcttcttttttattaataatcaattatcatagaacgttttgtgacttatacaaatatagaacttgtatatgaaacttctatgtatgatttcatgtgtgcaaggcggagttattttctgtttgaaaagaatgctaagggaaatagctgaaacgtgaaaaaaaaacagatagtcggtctatctgttttcaatataggataaatatctttggatatatttcattattcgaaagaaagcactacaatgtgctgatgatttctcgctgctgcttaaagaactgaatgcgttgcatctcgccgctttcggatatcagggttgagaatttctttaatgattgaatccactccttcaatccgcggaacatctcgggatcctgtgtcgtaatggagttgatggaatagatgcggatcaggctgagttgcgtggaacttgtctccaaataactataggtcgcttcgaagttgatattcgaaatatagattctgacgtcgttgcctgctttgcttttccctcgggcggccagtgcttccatttcatctatcaatacgaacaattcttccttcaggagattcttgtcttcatccgtaatgaggtggatgctgcaaaagtattggatgtccgtgaccaggtgactgaaaatcatattgtcccagatgtagtctacggaatggatgcgggataccattcgggcatattccttttgtttgtctaccatattctgcggaatattcaattcatcaaaatgcttgcatcggatgttttcattctgatacatccatttgaataagcggaatttggagagcatgtcataattcagagagagagtctggggaatgatgttggaggaggttcctatttccgagttctcatcttcctcgactgcatgaaacagttctacctgcttttccaacatggaatagtaggtttcgagaggcttgttgctgcccactatattcatgtcgaatacagcattgtcctggaaacttacgcctatcatcttatccagtgatatacccagttttctggatataatagcggcttcggtcagtgtgaaaggtacttcaccccgtagccggcggtatatagcttctttgcctatataaagaatgtccattaaagcattggcaagattgtctttggatgggagtttctctctgacggcatttactaatcctgtgtttaactcgtttgttatcataatcttctgtgtgagttagagatttgtctattgtctatttaacacttttcgagggctacttgtttcggaaatcgtaacatttctttttagagataccccatttccgaaaaaagtgccggatcttgtttacctcgtcatatatagaaaacccggatgcttgatctttcttgttcttgccacaaatgtatatgcattgtgatgtaattttgtagtgcagttaagaagctgttattactaactaataaggaatagaataaatgatgaaagatagaaagaaaatggcggctgagctacatcataggaagcaggaaggaaatggaacctcgatgattttcggaagaaaggttcctgttattaaggaagtgtacgatccgttgacgggtttgcgtaatggcacgattactccgaatgctccggtcgttattacaggtgaaaacctgtgtctatcttcacttggaactatttacctgggtctttctcccgtctccgataagggcacattgatacatgttaaaagagtgtttaagtataccgacacagaggtgttggtgatcctgcctaatttggagccgggagaatactccccggtaatgatgattcatactggtgataaggtagattttacctatacgttgccggtatcgtggaaggtgcttgatgaaaggtatgtgaacctttttgtaagaagaagctgtagcgatttgatttgatattctttaagcttggaataaaaacatagagatatttgaacgttgaatatgaaaaaaacgtatcttttgaaggtgaacaagtgacatatagtattgtgtatatgtcctccttcctctttttatcttgtgaatgcggagtactttaggtggctccgcattctttttaggttctgattcgtacagaagtgaaactcgttacgctttattccggacaaaaagtaaccggaatgattcttttagtgacagaggctttcccgaaaatatccgaaatagattccggatgcataatatgcagaatatacatccatgttttttgcataaaacaagctgtatatgcaatacgtatgcaagaaactatacttctttcacaaaggaactatggatgggacgcgaacaatctatagatgggacatgaataatctatatatctgatgcgaactatctatagatgggagacgaacggtctatatatggaagacagaccatctgtttttagcttacagaccgtctgtttttcttttattagagttgtatgtatttctgtattgcactgtcagccagtgaaatgccgatattcgttcgtttctttttgttcttccctgcaacgggatggaaatatggcattctcgttatgcataaaaagcaaagtgtcaaaatgaaactattgagtaggtagaataatataaattcaccgatagaatagtttataattagttacgggctacaggcacgaatgataggtgccttgtagcccgtaattaatagtatggacgcgtcaggtggttgagactgcttaatgggaatccttaaagatagactttgcgatacccatttccagtccgcgcagttctgccagtccgcgcaggcggccgatgcaggagtatcccggattggttttcttcttcaggtcgtccaccatctggtgtccgtggtcgggacgcatggggatggatacttgtctcttctgttgcagttcgaggaaagctttcatgacgtgatacatatccacatcaccttccaggtggttggcttcgtagaagttgccttctgcgtcacgctgtgtgctgcggaagtggacgaagttgatacggtcaccgaattgcttcatcatgccttccaggtcgttggagctgcttacaccgagcgaaccggtgcaaagacaaagtccgttgctcttgttgggaacggcatctatcagtgcctggaaatcggcagcgctgctcataatgcgcggcaggccaaggatggagcaagggggatcatccggatggataaccagctctacaccggcttcgtcggcaaccggagtgatttcctgcaagaagtaaatcaggttggcacgcagcttttcaggtgtgatgtctttgtagcggtcgagttcctgctggaattgctccagtgtgaagctctcttccgaaccgggcagtccggcaatcatgttgcggatgagcagttgcttgtcggcatccgtcatttgctcaaaacgagctttggccttggccttctcttcgtcggtgtagtcgttttcggcaccgggacgcttcagcaggaagaggtcgaaggcgatgaaagcggcacgttcgaaacgcagggcgcggctgccgtcgggcagttcgtaagcgaggtcggtacgcgtccagtccagtacaggcatgaagttgtaggttacgatgtttacgccacacttaccgagattacgcaagctttctttataattatcgatgtatttctggaaatctcctgtctgagtcttgatatgctcgtgtacaggcacgctttctactactgaccagcgcagaccgacagcttcgatcatttctttgcgcttcatgatttcttctacagtccacacttcaccgttcgggatgtggtgcagggcgttcacgataccggttgctccggcttgtttgatatcccacaggctgacgggatcattaggaccgtaccagcgccaggtttgttcacataatatcataatgaatggttttatgggttagtattagatagagaaggcgtcaaaaccaccgtctactaccgacagggcacctgtcacgaaggaggaagcatcactgatgaggtagtgaatggttccgaacaattcttccggttcagcaaagcgtccgcatggggtgtgggcgatgatagtctttgcacggtccgtataagatccgtccggattggtcagcagggcacggttctggttggtcagcaggaaacccggaacgatggcgtttacgcggagttcaggactgaatttggtggctagttccgttgccatatagcgggtgtagttggcaatggcggctttggcggaaccataacctaccacgcgtgtcagaggacgcagtgctgattcggaacagaagtttacgatcacacctttcttattctttgccataacatctacaaatgccatggtaggcagaatggtaccgaagagattgaggtcaactactttcttgaaagcgtctacatccaagtcgagtaccgtcttgtccggagcaatggtggcgccgggcatattaccgccggcagcgttcagcaaaatgtcgatggtgccgaagcgttccaggatggctttcttgttttcttccagtatttccttgttcagaacgtccgttaccaggaacagggcttccgtcttctggttgagctctgcttccagttctttaccgatttcttctacacggtcgagaattacgatttttgcgccttgctcagcgaggtagttggcaatacttttacccagaataccgcaaccgccggtgacgataatcactttgtctttaatgtcgaataagtttttcatgtctttttcttttataaaaatgattctaatatctctgtgctacaaaaatagtggaaaagtagtttgctcaccatacaaaacgtctcaaaaagatgaactaccgtctcaaaaagtcctaattattgcttaagagcctcttttcttgccaatgcttccagataataatagtcggcatagttgatgggcacatcaatttcatcacctcccggatggtgtccggtggaatggaggagcaggaagccataagttgttcccggctcggcctgatagtgccggttgaggctgtccactatcttgtcggcaatgttttggtaacggttgccatcttctgctgaaacgtaagtgcggagttcatacagggcggaagccatgatggcggcagccgaggcgtcgcggggaatgtcggggatgccgggagctttcatgtcccagtagggaaccaggtcttccggcaggttgggcaggccgaaaaagaaatctgcaatgtggcgtgcctgttgcaggtatgcggggttcttggtgaagcggtagcacatggtatatccgtatagtgcccatgcctgtccgcggctccagaaggaatcgtcggcatagccttgtgcggtttgtctggcgcgtacttcgccggtttccggatcgtaatctactacgtggaaagaagagtagtccgggcggaaatgattcttcatagttgtattggcatgatttacggcaactttccagtagatggaatctccggtttcctgtgtagcccagaatagcatttctaggttcatcaggttgtcgatgattaccggaaacttccatttatcgcgattatgatcccacgaacggatgctctttactttcttattgtagcgggtaatcagggttttggcgctttgcagcaccacatctttgtaagagcgttcgcctgtcaattggtaggctttgccgaaactgttgttcatcatgaaaccgaggtcgtgagtgcctttgtgccatttggcttcttctatcagccaggtattgctgatggcctgctgccgccagaaatcatcgtttgtataggcgtatacctgccataatgaaccgggaaagaagcctgagcaccaatcgtgaggatgtatcatccgcagcgaaccgtctttgttgatgctacggggaattacacgatgcttgcattgattgtctgcctcttttcgggccttggcagcacactgcatggcaaattgcagttgtccgcaggcaaaggcataggcattgtccacatcatcggcttccatccataacaggttgaaacggtctttccagtcgatgatgcgatgggttttatagagcttcagataatctttgcgctcggggttcagcaggaaagtgcggtacaggtctttgcagaattcctgttgcttgtatttccattcactgatctgctggtacggccaggctttgacatcttttccaacgtatggtaccagaaagtccatggctttgtagaagcttcgtccgtcttcggaggttgcattatcaatggaaatcccgatcttccgggccatcatgaagatgtcaatgaaatgagacagattgaattgtgagtaaccgaaagcgagagtgcggcgtagttcatgcggttgtttgccgtccggctctatctgggtgaagaggcgcttccggggaatggcattgatgacttcccgggctactttcatgtttcctgcgtacatggcaaaggctatcacctgtgcatcatgcgccgtgctatggttattggcctgacgggcttcttcctgtccctgtggactattcagtatccacgtcagcaatttgccgaaccaggttttcagctgcttgacatccttgggcgtaaaggctttcgacttctctaacaactgtacggcatccagcatctctacgaatgaataagtgtctatgacgccgtaacagcgtcccttattgttgttgtgtcccggtatcatctgggcatactccaggtttggattcatacgcgtatctttattaaagaaccatacgcggataagttccgttgccttttgggcatatttctcgtcgccgctaaagtaccaggcaagggcaagagtagttacacgctgagctgtttctccgaggcggttgcgatccagcttgtccagttcggggttcgacttgccgtcatggctgatgtaaggcaggccatcgggtttggagggatcgggccaataatagcgtgcttgactcatgtagtcgtgcttgtctccgctaccgggtgtcttctctttcagcatgacggacaaggggcgcacatccagtagcctgtcggcacctgaaatcagctcctgataggcggccgaaaagtacggttgatgtaatgattgttttactctctccagatgtttcccatcccagatggactgtgcatgtatactgactactgcgagcaacaaactggtaataactaagcaaattttagctctcatggtgtttttgttttgaagttaataaagtttcctgagctttataccgttcagaaagctttttccattccgaacagggaagcgtatttcaattttattccgaaagtttgtaatattgtatcttttccgtagagcatggaaataaccgctttcgcggcaaggagaaaagttctcttcaacgctctcaccattgataactatatcgaagatattttcacggctctctacaccggattcccggcccaactggtaaacagttgctgcattttcgcggaagatatctgtaaaaagaaattctacctcgtagactccgttgggaacatcgaaacaatacccttcaatttcgttgcgaagagtttgaaacaatggcccgtcatgggtattctcaacctgtgtctggctatttttgctttctccgccgatatatccccaactgctttcagtgtagggctgatcgggtagccacgtgagctggctttcatcggaagtatagaaacagttgctgcctacatttacggcaagttccagattccgtaagtttgtttcattcagatttgcagggataggggtgaaattgatgtggagggcatcttctatcatggagatgctttgatctgactctttgttttcagcttggacggagatgaagtgctttttccggctgaatggtacctggaatgtaactgtataattctctgttttctgtttgcctaaggattttccgtcaatgaagagttccacttccggaagattggtatataccttaacgggtagcggaaccggagcctttccatgttgtacaccgctacggtgcgtccagtcacggctggcaatgtgtaacacgggaatgtcttgacgccaggcggctttatagtaatagtacacgtcttttggactgcggtctgagtataccagtcctttattgttgatgcgcggcatagattcatcacgcaatgcagaagagaaatcgataaagttccagtgagttccaccacaaatatacggcgtttcttccaataccggtaagtagtgttccaggtatttctgctggtactcgatactgaaatcaaaagcgtgcggttgcagcgaatgtagacgcttgtcagatccggcaccgtattcgctgacaatcatcggatgggaagggtactttttgtgttgctctgtcaggaaacgttcgaagcctgtgaggtctcctccataccagccttggtaaagattccaaccgacaatatcggtgatgttgcccagtcctacctcattatagctgttgctgccatgaaaagccatagtgctgacacgagtggaatcttcttctttcagaactttctccaaacgattggccagtgacagtgtccgttccagcacgggtttcagttcttcttcttttttatagcggcgctgggtgacgagtaatatctcattcatgtatccccaggtgatgatggaggggtggttatagtgctggcgtatcatttctcgcagattgttttcgcagttttctgcatagccgggagtgtcgggcacaatatcaataatgggtatttcttcccaagccagcataccgagtttgtcgcacatttccaacagagcgtcatcttgcggataatgggagatgcggatgaagttggcacccatttctttcattaacttcatgtcacgacggtgcatttcgtctgtcagggcaactccgatgggtttttggtcctgatggcggcaaataccgcgtaatttataaggttttccgttgagggagaagccggtcttaccatcgaagctaaaccagcggaagcctgtatggtgattactgtggtctaggatggcttttgtttttttatcgcgcagaatgctttctactctgtagagatgaggagcctcgggtgcccataatcggggggacagaataggggcggtttcggtgcggaaagagtataattctccaccttttatctggatagactgtttctgggtctgggcaatacttccatcgggattgtagatgatatgttccagttcaagagatgctttctgttctgcatcgttctttatctctccgcgaataagtattgtgcctttttcttcggatacttgcggggtactgataaatattccttctgaaccatagttcgtcaaatggaaatgttgtttgggtacggctgtaagccatacatcccggtagataccgccgaagaatgtaaagtcggcagagatagggggaatatcctgtcgggcattatctacatggatagcgagagaattaggagcgtcaaatgaacagaatggggtgatatcgaatgtgcaggcagtatatccaccgttatgctcacctattttccgtccattcatgtagatggtagcggccttactggctgcatccagtttcaggaatacctgtttggtttgccaattttgcggtaatgtcagtgtacggcgataccagcctgttccctggtaatactttttttctgtatatgcatccgtattccatgtgtgcgggagatgtatgctgttccacgcactgtcatcataggttgctgaagcggcagcttcgcattctccctgatagaatttccaactgtcgttgatcgttttgctttcatgttgtgcgtatactttggggaataggaacagaatagcaggtatcaggatcaggtatgtcccgattcgatattttttctctttgctcatggtatatttattgttggtttattagctgaaaaagaaaggaggcagttaccaggccggttatgccagtttctgcctccaaaccttcattcaatctttttacttatatccttcgaaaactaatcaaaaaagctgtcttttttaccatccgtaattttgtggaatacgtccgttggccagttctatcacattctgatggatgggatagaggtagagtttgtctgtccattgtcggttttctactttcgtacgcgtgtagtaagaagttggttcgcccggagttttgtcttttgaacccttcatgttcattccgtagaaacgtgtctggtcgcaacctattctgtccttgtcaccgcagatcatccaacgacggatgtcgaaatagcgttgtccctcgcaatagagctctacatagcgttcgtgctgtatggcatcgaactgcttgtcgtaattaccgattatgccggtcttgatgccgttatcgttcatggtctgatagcctgggatgcctgcgcgttcgcgtaccatgtcgatatacttgatgatgtccggattactcggatctgtttcattgagtgcttcggcatagaacagatagaattcggccagacgatagatgatggaaacacgtttccaactctgagtatcgccgctggcatgatttacggtacggttcttaaatttccccagcatatacccggttttcacgttgtcaccgttggaaaggtcgtttccgccacctgcagagaaatctacgatgtagttgggattaccgttcatccatttcttgaaccagcttcttccctgatatacaacgcttgcgtagaaacgcggttcacggttggcatacatgttggagatattctggtctgtcttcttgtctttatagtcggggtcgtagcaatggttttctacagcaccgaatccggtttcgtcataaccactgtttgggtcattgatggcgaggccgttgcccatgaagaacatgtctacagcatcctgagacgggccgatggtaccatagcatgagttcacgtcacgcgggttagtacgtttctccatcttgtactggtcggagtagctgttgttggtactgcaccacaggatttcttcattgtacacctggaaaaggttgtatacagaacggtcgggttgctctactccgtttgccatcacgcgatagagagcgtggtgttgcgcttcagcatagtctatcagatcctttacgcggtctctggcagttacccatttttgcggatccttactctgtgggaagatgtattcacctttagagttctgcaacttctgcagtccctggtaatattcggaaccatcgccaccattgaataacttggaggcagcatacatccacaacttggcgcgtagtgctttggccactacgatagtggggcgtactacttcattggtgttgaagttgtatgtattgtccgcgtatgatgtgatgactgattcgggcaattttgactgtgcggggtcacatagaggagccaatatgccatcaatgtggttcaccatttcgtctacagtagcgcggtcgtagtccgttatgtgcggttcggcagcgtcgtctatctccgtcacgatgcaggcagggccataaagctcgaacatggaaaagtaataataggctatcatgaatcggcattcgtctttcatgcgggctatttcctcggcagtcagtttgttagtactgctggggtcgcctacaccttggtcgtgggcgcgttcaatgaagatcatagcttggcgtatgtctttgtagaaagtagcccagcgatgatagcttccgctggctgccgtgaaacctgccatcatgacgtcgcgtgaactagctttttctgaagcgatttcaccgcagaggtttgaccatggatttttgaaggcgttaacttctgatccggtttctgaatattccatcagattgcggtagatgaccccgtaccagtttcgggtataggttgcattgtcccaaacttgatcgactcccagactggcgttgaactcgcctgatatgtcaagatagtctgaacaagatgctgtgctgaatgcaaggacggcagagccgacggttgcgtatagtaaatttttcagtttcatatcgtttattaattagatgtttagaatgtaacttctgctccaaaggtccaggtgctggagatggggtatttggcgcctgagtttgcatcgcccagttccggatcccaatacttcacgtgatcccaagtttttaggttagtaccttgcacgtaaaggcgcaggttggtgagacgcagtgacttcagttgcttcttgttgaactggtaaccgaattccacgttcttcaagcggatgaagctggcatcgcgataccaccaggtactcgcttgcaggttgtgtgcaaaggtgttgttacgcaagcgagggtagagcacgttgtcgttgtaggggtcggatgctttccagcggttcatagcctccatacgcgcagaagaagcgtccttgccttggttgaacggcatgaagttggatgctttgctcatcaggttgatggaacagcccgtcacgccttggaagaagataccggcgaagaatcctttccattcggcattcagtgaaagaccgtacacactgcgcggggtcttgtccagatgaccattacggtaggtcttgtcatcgtcgttgataagtccgtcctcgtttaagtcgcggtacttgatatcaccgggtgccacagcagctcccgggtcggctatgccgggtttcagttggtagctttcggcaccgctcacaggatcaatggtgatgttgaaatcatcgggtgtataaagaccgtcggcaatgtagaggtaaggagtccacaatgacatacctgtgagatcctggtagctgtatctatgtttgatttcatctgtttctacaatcttgttcttggcatacgtatagttggcacggaatgtcagattcaggccacccacatgctgtttgaaagtcaggttcccatctacacctttgttacttacgataccatagttctgagttgggttggattgtaaaccgctcatagaaggaaccgtattacgggtaatcaggatgtctttacgacggttggagaagtagtccatggagaggtccaactgtccgttcagcaagccgaggtcgaaaccgatattggttttatcctcaatctcccaacgcaggttggcgtagtaggcacggttttcgctcaatccgccgaaccagttctgtgcattaccattagagatgcctgagatacccaggttaagaccgccggcatcggtattcatggcttcctgataagggaaacgagtttcacctaactgatcgttaccggtccgtccgtaggatgcacgtaacttcagtgtactgattactttctgcacaggttcgaagaacttttcatggctcacataccaggctccacccacagcagggaaaataccccaacggtgtcccggagcgaaattctcactacctgtcataccgaagctgccttcgatggtgtagcggttgtcgtaagtataagaaccgcgtcctacgacgctttgcttacggtaaggaagcaggttgagtccgccaacgttttgtttttgagtttccttttggttgtatagcagcaagcctgtaatatcgtgcttgtcgctgaagttacgcttatagttgagggacgcctcaatgtatattttcttgttaccaccggatgaaccacttgaggggttactcaatgccgagcctgactccagtgacttgaatatcaggttaccatcggcgtcacgtccggtagctgtaaaagtagcgggtgacatagtacggttgacatactggttggagttggcatcgaaactgacactacctcttatagaaagtccctttgtgatgaaatccaagtcttgttctagcaataccttgctttggaatgtagcgtcccagcttttactgtatccactgaagtagaggaagttgtaggggttttgacgaagacctgaattatcatagttaggatgttgtgcagctgaaccgtcagaatagatttgcggatagaggtgtacaggttgcaatgtcataccaccgaagatgtcaccggctgttttggagggagccacacggttgatatactgtcctgacatatctacggacatacgggtagtcttgctcaattcgaagtcaatattggaacgaaggttataacggtcgaaactgatgtttgaatcgtaatcggcgttcttcttctccttgtatacaccgtcttgtgtgtagtaggcacctgatacgaagaagcgtacgcggtcaccaccaccacggaagttaatggtgtagcgctggctgctggtgtgatcacgtagcatactcatccagtctgcatccggatatagatcaggatctacgccgctacgatatttttccagatcagcgtcgctcaccggtgctgtatagttggcgcgcgggttaccgttgctgttccagtctgcctcgttgtataagctcaaatagtcgtaagaactcatgaggttgggcaggcggagcggtgtcgagtagccgtattctgctgacatactgacaactgttttttgtgatttaccacgtttggaagtaatcaataccacaccgttagcaccttcggcaccatacacggccgttgcggcggcgtcttttaggatagagaatgtttcaatttcgtccacatcgatatcgttcatcttacggggtacaccgtccaccagtaccaatgggtctgttccaccggcatacgaactgataccacggataaagaattgtgcgtcatcccaacccggttcgcccgaacgttgtacggcaatcagacctgacagcttaccggcgatgttgttggtaaggttggcactctttacactcaattgagctggtcctacggtggacatggagcttactacgctctctttcttctgtttaccatatcccacaactactacttcttccgtagcgatggcatccatctccattcggaggttgaaggtggtttcatcagctttcactctgtgttctatactgacaaatccaatatagctgaattccagtacttcgccgggagcagcttcgatggagtatcgtccttcgacgtcactgataacaccacgattggtagtaccttgtactctgacggtggcgccgatgatagggtcaccattagaatcggtcagcaaaccgctgatgcgttgtttttgttgctgtacagcctcaatgctgttagcttcgtcagcagcattggcacgtaggatggcaggctgggctaccaaaccaaaggcaaacatggctgctatgtaatatctttttttcatatatctatacttaattgtttatctatactttaagaaagtctgtcattcgcccatttcgtatgaggggagttcatccaaagctttcacccaaagctcgttcgggctggtgctggtttctacggtcatcaccatatatttgccggatggccaggtggcattggcgttgaagttgccgtcactggcatatttgatataatcgccgccttcttttgcggtataggctccgggacctttccattccagtccccatcccttctgtccgaagaacttgaagttgactccgttaacattctgtcctacaagcatgattagttcatatttggtctcggtgagcggaaccaggttgaatgctttgtccgtactccagtttatgttgttctgggcatatgacgggaatcctatcttatcattaccaatcacccacatagcggtggcattctgtgtacttgatgaagaagctttttccaactgttccatcataattgcattcatgcctttgttcagagtgagtttatacttgccgtctcttccgcggaaatggagcagagtttcgtcttcctttacgaggtcaaaccaagtggggttcttccaataatcagcatattcttctttgacaccgctgattttgatgatatcatccttcttaaattcggtttcgatgtagaaaacattgcccgacccatcgaattccaggaacttattctgagtgtcgaaacgtacaccgaattttgggaatgggctaccttcgaaagtcagggtattgaatgtgatttcatacttgccgtcttcaccgtaacctgtgttttcaaagccaatattcttggtggcattgaggacaatttttccattgtccataccaaatttcagttcattgccctgcaaataaggattacctgttccatcggaataagctggtgctacgatagatgcttccatgtcgagtgggaaagcctcacgtgctttgtattcatattctttacctggaacgggagtcatggtatattccttgccattggcagccacaagtttcaatgtttgatattttggacgctctatagcaacggtcatttccttactgtcattgctgaaacgttcattttggatgcgcagtataacctttgcttctccgtcaggcgtgtttttctggtagggagccagcacttttccactgtattttccgtcggctttcagactgtagaaggcttcggataccatttcttctccataatagagctgaactttggcctggttgattttcacgcctccgctcttcacctcaaagtcgaaggtgatactatcgcccatgtaggctttttcagtgcctgcaaaggatacgatagtcgagctgccatgatcatcgaactggtcaatctcatctttgcatgatgtcatacctataaggctgagtgccatcatgccgagcaaaaatcgatttctcataatttataaatttaaaattaaaaaagtgatttattatgtttgaatctctgttatttccacttgaaagagtttactgagcgcggctgcagagtgcaacttgccgagtgcttcttaccggcgtcatcgggggcggtaagtacaatgttcttgtccgaactgcttttgttgatgatgacaaaggcataacttccgtctgtattcttgaaagcactgtaggctatgtcattgtctgtgtagccgcttgtaccaattcgtatggcaccgggtcttaccactgccgacaggtggcagatcatatagtagtgcgagttcatgtagatagttttaagatcactcatgtttaggtctacagccccgaagcaggtttgacatccgccggggcggttaggttgtccaccattgttactgggtatgcttccgttgaagtctgtttcaagcatcaggttccagatggtcactgcactgcaatagttattgatggtgcctataccgatactttccatattagaaaggagagttttggtcaagtcgtgtccgttattccaggtgccgatagacgattctgtgaaaatcaggtccttctcaggagctcgttggtagacgttgagcagttcgctgcgattacctccatagtcatggtaggctgctcctgctatatacttagcggcttcggaatcgttgtatatctggtagggataaccgttttggtcgcttttgttatcataattgtagttgtggtcgtaagcgtatattttggtggaaagtccagcagcctcaaaagcaggacccagtactttcacaaaatcacgttgttctttccattccatcaccagtgaggctgagttcttgttgttgagtggttcgttctgtatggtgatggcattgatgggaataccagttgcctgaaatgcctgtatccacttcacaaaataggtggcatagtcagcatagtattcgggttttagttgtcctgcggtgtattcccgattttggtagacagggtatttccggtagtctttcatccataagggacaagtccagggtgaacccagtatgcggatgtccgggttgatggcaataatctcctttaagataggtattacgtaatctgtttcttctgaagtcagagcaaagttttctatacccggtgtgtcacaacaggtgtattctttcaaggagaagtcggaacagccaatgacaatgcgtacatagctacatccataaccttcagttagcgaataggttcttttgaggaatgctgtccgatcttcctgtttcattagttttaggcagaaagctgatgatcctgtaagtgccgctccgaatccctgcatagtttggtagatctgctgtggattcagtaggatgtttttaggcgacatgctggcttggggctcaaattccacggtggattctcttaaatcataggtacgggtgtcagtggtggtaagcatgtaggcttgtagaccactaggggagggcggagtttcaccgccgggcgtttcggggaagtctgtttcattgtggtccgatccgcatgcactaccgttgaccagtaggccgaaaagaaacacataagtgaatagtcttttgtttttcatgttagtacgacttatataggtttaacaaaatggttttatccgctgcaaatatatgcgtatgatgagggtgtttcctaaaaatacactacttcaaaactttctcattcattggttttaactacatcagaactttctcttggattaattattttgttgataattaaatgtttattataataatatggctacatctaaaaaataattcttttatttgtaggtaaaataccctatctttgttttcaaagaataaaacgttaactgctatgaaacgaaaaggcctcctgttttatattcttcttcttttgatatctattcctgtaagtgccggatggcaacgtccggtgacaaattatacccgacatatttataaagccggcaatcagaattggagtattcagcagcatgataacggttggatatatgtagctaacaacaaaggcttattggaatttgacggtgtggagtggaatacatatccgattcataatgccaaaacacgtgctgtgaaagtaggacatgacgggcgaatttatatcggtggaatggagcaatttggctattttactccaaatcgtcttggtgggttggagtatacttgcctttctgatagtttatctcccaatgtgaatgtcggagtcatctggaatatcttattggacggagaacgggtgtattttcaatcggaccgtcgtttcttttattgggaagagggcattgtgaagaaaatagattattcttcagagatttacacttcgtttatcttgcgtaacaaactgtatattacttctgctgaaggattgctaatgttgaatggaacagagtttatacccgttcttggtcctttggggataggagcgactgtcaaagtcggtggattgttacctcatcaggacagtttgttgatggtaacccgggataacggattatttatttacgatggcactgtttttaagaaatataatactgtagccgaggacttttgccgtaaaaatagagttttctgtgctgcattgcaagattcgttgttggcgttgggcactatccagggtggagtttgtcttttaaatctgaagacgaatgagatggaaatcatatctacggaaaatggcttgcagaacaaaactgtgttgagtatgctgtttgataagactggcaacctatggctcgggttggataatgggattgactgcattcatttgaaagcaaggcttgcttcactttatggaggtaaacctgtgattggttcgggatatgcatcttgtagttatcagggtaagtactatttcgcaacgaatcaggggttgtatcgctctactctcccagggcagttaaaccagagaaatcccatagacttcgtaccgggcacaggaggtcagatgtggtcacttcaccaatatgacgataagttgttctgttgttcggataatggtatctttattatggatggagatcatatggaacatctcaacaatcccaaaggagtatggggaattgtatcggtggatgaccgtaaggatgtgttgattgcaggcacttatagtggactgtatttgctcatgaagagagggatgagttggagggtagaaagctatatagaggggtttacccgttcgtgcaaagatatgttgatggaagattcgactcatatattgtgggttggaaataaagaaaatggggtttgccgtttgactttggcagatgatttacgaaaggtggaaaagatgaaagactataatagcatcatctttccacgtggatatgatgcttgtttgttgcgggtgaaagatgaagttaccatagcttcacattatggtctgtggcagtataatcggagccgtgatacgctggaagcatgtatttggctggaacaattattagaaggaaaggcagcatatacctatatgaagatagattcattgcaaaatatctggtatgtagcagatggcgcattgaaagtattgcattatgatgccaataagcaggagtattgccgggtaactaatgaacagttcttgaaaggagcattgatagaaaactttgaagatgtaaatctttataaggccaacaaggtagtggcaggaacagaggaaggtttttcactgatcacactggatagcctgccggtgcaacaaatgccgttgacattgcaaatcaggaaagtctacttgacgggattgcgtgattcgcttatttatggccgcagttatttgtatgatacagcaccgatagtgattccttattctcagaattcaatgcgaatagaatatagtgtaaacaacttcaataaggcacacacagtgttatattcttatcagttaagtacgggtggtgagaaaggaatctggagtgaatacagtgagaataatatgaaagagtttacaggactgcatgaaggaaagtatgtattcagtgtgaaattgcttaccgacggcagccaggaacctgtggaaacttcgtttgtctttgagatattgccgccgtggtatcgtacatggtggagttatctggtttattcggtagtggtagtattgctgttttattatgtgtattatcgtatctcagtagggcgtaagcgcttgttaatgcaaaaagaactggaactctatcgacaagaacaaaaatttcaaaaagaaagtgatctgaaagatcagaagatagattcactgcaagaagaaaacctacagtcggaattgcgtcataaatcggaggaactgattcgtactactttgaacatcgtacgtaagaatgaaattctattggatataaaaaaggaagtactgggcatttcccattccatcagcgaagagaatctggtttctcttcgtcggaaaacacttcgtctgttgggacagattgatacgaacattgagcatgatgacgatttacaggcattccaaagtacctttgattcggtacatcatgatttcttcaaaaaattggaagaagcatatccggaactgaacaacaaggaaaagttactttgtgcttatatcaaaatgaatttgctttctaaagagattgctccattgttgaatatttctttgcgcggggtagaaataagtcgttatcgcttgcgtaagaagctgggactggaagaaggagcgaatcttgcggaatttttgcagaagttctcaaaatgacttctgcaacacaagtaagctctcaggtcccatgttgaaaagaagatcgacgatactcagattcggcaggaagccgagacgttcctggaaaacctgataataaggccggactatgaagtccggatcttcttctttgtaattctttttgggatggatacgctcgcggaaatcatcttcattgggtgcaaaactgctctggaatgaagtagtacgttccatgtccggctgtatatctatcagtgaacagaccagatgacacagttcttcgttgaaatcgactaaaaactcatatttcttctcgtagaaaggttggaaatcatctctataatattcgaaaaaaggagtatggttataagccgatgataaagcattccagtgtagatgacgccaattgccgtgatcggaaatgcggatatcttttaggggacatttcagagtatcgggtttgacggtagggatggagagagctaattcgccatcgggtgctgcaatggtgcaacggttacggtaggtttgcttcacataatgatcgtgctgttcgataaagattttatcgtatgccaccaacttggcgtaatattctacgggtgccagataggcggaagagaggtatatggttttcatgagataattggttcttcgcaatttgtaatttatacttcgtaattagtaattcgtacttcatttatcttaccgttttccacattcttttccaacgataaccattgaacaatcctgtttctgtctttttggaaaaccagatgagcgaagctttaccgatgatgtggtctttgggtacaaagccaaacaagcgggaatcagagagattgatagagttattagcacctacccagtagtaatccttggtgaaatagcaatgctgtacaggcttcccgtcaatgtacaaagtatcgttctttatttcagcttgtttattctcatgcagtacaagtgtgttgcgtagtaaagtacgattccacggatatacacgcaccggtttacctttgccgggaacgatcaacgggcgcagggcttctatggagtctccttcattcagtaactttatccagcaattgccattcatagcctgttccagcagataatattcataacggctgaagctacgtacattttttatgctatcttgtcccatcaggtggttgttgcatatggacaatagtgtaagtaatgaatccagctgtttttctttttctcgtggataagtatataaaaacttctggtcgggagcgtttttttctgatggaattacggagaacagggagtctatcaataaggtatctcctggtacgccgatgcatcgactgatgaatgtttcgcgccgggaaataacaggttctgacagattagccggattattgaaaacaatgatatcctctttttgtacagggctgtctgcccaacggtgataattccacaatgccataaggggaagacgcagaccgtaactccatttatttaccagaatacgctctccctgaaataaggaattctccatacccgaagaaggaataagataggaagtcataacacaaccccgaagtaacaccacaacgagtattattccgatgattgctcccgttattttccaagccttattcatgtcgaaattaataattaaagaattaataatgaatacgttctcacctatttcattattaattctttcattctttcatt
